United States Patent Application Publication US 2024/0327476 A1 - sequence listing, part 119

SEQ ID NO: 226868 - DNA, 1011 bp, synthetic construct
  misc_feature 1..1011: note = Description of Artificial Sequence: Synthetic coding sequence
  source 1..1011: mol_type = other DNA
atgggtcagagaccagggccagtgctgcccgctgtcgcagtattagggcaagttgcaaagcggaaagtcgcctggttgcttcggtggaaagccgtaaccagaaccgaaaccgccggtaattccagcggcgtatacggctttgggaaaatgaaaatctttgtcaaatactttcagaagatggccgacccctggcaggagtgtatggactacgctgttacactggctagacaggccggagaggtcgtatgcgaggccataaaaaacgagatgaacgtgatgctgaaaagcagccccgtggacctcgtcactgccacagaccagaaggtggagaaaatgctcatcagctccattaaagaaaaatacccatcccacagcttcattggagaagagtccgtggctgctggagagaagtctatactcaccgataacccaacctggattatcgacccaatcgatggaactactaatttcgtgcatcggtttcctttcgtagccgtctccattgggttcgctgttaacaagaagatagaatttggggtggtctactcgtgcgtggaggggaagatgtataccgcacgtaagggtaagggcgcattctgtaatgggcagaaactgcaggtatcccagcaggaagatataacaaaaagcttgctggtaacagaactgggaagctcccgtactccagaaactgtcagaatggtccttagtaatatggaaaaactgttctgtatccctgtccatgggattcggagcgtgggaactgcggctgtgaacatgtgcttggttgccacgggtggcgcagatgcatattacgagatgggcattcactgctgggatgtggccggtgcaggaattatcgtgaccgaggcgggaggagtcctgatggacgtgacaggagggccttttgatctgatgtctaggagagtgattgcagccaataatcggatactggccgagcgaattgcgaaggaaattcaggttattcctttacaacgagacgacgaggactag

SEQ ID NO: 226869 - DNA, 462 bp, synthetic construct
  misc_feature 1..462: note = Description of Artificial Sequence: Synthetic coding sequence
  source 1..462: mol_type = other DNA
atggctgacccttggcaagaatgcatggattacgctgtgacactggcacgacaggctggcgaggtcgtgtgtgaggctataaagaacgagatgaacgtgatgctgaagtcctcgccggtggacctggttaccgctaccgaccaaaaagtcgaaaagatgcttatttcttcaatcaaggagaagtacccttcacaccggttccccttcgtcgctgtgagcatcggattcgctgtaaacaagaaaatcgagttcggcgtggtatactcgtgcgtggaaggcaaaatgtacactgcaaggaagggcaagggggctttttgcaacggtcaaaaactacaggtgagccagcaggaggatataaccaagtcgttgctggtgaccgagcttggttcctctcgtacgcctgaaacagtgagaatggtcctttcaaatatggagaagctcttttgtattccagtgcactag

SEQ ID NO: 226870 - DNA, 636 bp, synthetic construct
  misc_feature 1..636: note = Description of Artificial Sequence: Synthetic coding sequence
  source 1..636: mol_type = other DNA
atggggcagcggccagggcctgttctccctgcagtggcagtgctggggcaggtggccaaaagaaaggtcgcctggctgcttcggtggaaggctgtaacgcggaccgagacagcagggaatagcagcggtgtatacggtttcggcaagatgaagatttttgtgaagtacttccaaaagatggcagacccctggcaagagtgtatggactatgccgtgacactcgccagacaggcgggagaagtcgtctgcgaggctattaaaaatgaaatgaatgttatgctgaagtcatcacccgtagatctagtaaccgcaacggaccagaaagtggagaagatgctgattagcagcatcaaggaaaaatacccaagtcactcttttattggcgaagaatcagttgctgccggtgagaagagcattctgacagataatcctacatggattattgaccccattgacggcaccaccaattttgtgcaccgctttccctttgtcgccgtaagcatcggcttcgcagtaaacaagaagatcgaatttggagttgtgtattcctgcgtcgaggggaagatgtatacagccagaaaaggaaaaggagccttttgtaatggtcagaagctccaggtgtcgcagcaagaatag

SEQ ID NO: 226871 - DNA, 867 bp, synthetic construct
  misc_feature 1..867: note = Description of Artificial Sequence: Synthetic coding sequence
  source 1..867: mol_type = other DNA
atgaagccctcaggcgaggaccaggcggcactggctgccggtccctgggaggaatgcttccaggcggctgtccaactagcactgagggcgggtcagattatccgcaaagctctgaccgaagagaagagagtgtcaactaaaacatcagcggctgatcttgtgactgagactgatcaccttgtggaggacctcattatcagcgagcttcgcgagcggttcccaagccataggttcatcgccgaagaggccgcagctagtggtgctaagtgcgttctcactcacagcccaacatggatcattgaccctatcgacgggacatgcaactttgtgcaccgttttcccaccgtcgccgtgtctatcggattcgctgttagacaagaactggaattcggggtcatctaccattgcaccgaggaacgcctctacaccggacgacgcggaaggggagcattctgtaacggtcagaggctgagggtgtctggggaaacagacctgtctaaggccctggtgctgaccgagatcggacccaagcgcgacccggctactctgaaactgtttttgagtaatatggagcgtcttcttcatgctaaagcccacggagtgcgcgtaattggctctagtactctggctctgtgccatttggcgtccggcgcagccgatgcctattaccagttcggcctgcactgttgggatctcgctgccgcaacagttatcattcgtgaggcaggtggcatcgtgatcgacaccagtgggggtcccctcgacctgatggcctgtagggttgtcgccgcttcaactagggaaatggccatgctgattgctcaagctcttcagacaatcaactacggacgggatgacgagaaatag

SEQ ID NO: 226872 - DNA, 258 bp, synthetic construct
  misc_feature 1..258: note = Description of Artificial Sequence: Synthetic coding sequence
  source 1..258: mol_type = other DNA
atgaagccgagcggggaggatcaggctgctttggccgctggtccttgggaggagtgcttccaggccgcagtgcagcttgcgctgagagcgggtcagatcattcgcaaagccctaacagaggagaaacgggtcagcaccaagacctccgcagcagatttagtcaccgagaccgaccacctggttgaggacctgattatatctgagttacgtgagcgttttccctcccaccggagtccattctcactggtgcatatgtag

SEQ ID NO: 226873 - DNA, 1071 bp, synthetic construct
  misc_feature 1..1071: note = Description of Artificial Sequence: Synthetic coding sequence
  source 1..1071: mol_type = other DNA
atgctcgaacaaatacgccgtgatattagagacttcagaagcagcgcaggtctggacaaggtcatcgtgttgtggaccgctaacaccgagagattctgtgaggtcatcccgggtctgaacgacactgctgagaacctactaagaacaattgaactgggcctcgaagtgagccccagtacgctcttcgccgttgcctcgattctggagggatgcgctttccttaatggcagcccccaaaacactctggtgcccggtgccctggagctggcttggcaacaccgggtgtttgtcggcggagatgacttcaagtctggccagaccaaggtaaaaagcgtattggtggattttctcatcggctctggcctgaagactatgtcgatcgttagttataatcacctgggcaataatgacggcgaaaatctgtctgcacccctgcagttcaggtctaaggaagtaagcaagtcaaatgttgtggacgacatggtccagtccaacccagtcctgtacacaccgggtgaggagcccgatcactgcgtagtgataaagtacgtcccctacgtgggggactcaaagcgggctttggatgagtacacatccgagctgatgctgggcggaactaataccctggttcttcacaatacttgcgaggacagcctcctggcagcccctatcatgctcgaccttgcattgttaactgagttatgtcagcgcgtgagcttttgtaccgatatggaccctgagccccagactttccatcctgtcctgtccctcttgtcatttctcttcaaagcccctctagtaccccctggatcaccggtggtcaatgctctgtttcggcagcgcagctgcatcgaaaatatcttgagagcttgcgtcggactgccaccccaaaatcatatgctgctcgaacacaagatggaaagacccggtccatctcttaaacgggtgggacccgttgcggcaacttatcctatgctgaataaaaagggtcctgtacctgccgcaactaatggatgtactggcgatgccaatggtcatcttcaggaagaaccacctatgcctacaacttag

SEQ ID NO: 226874 - DNA, 1677 bp, synthetic construct
  misc_feature 1..1677: note = Description of Artificial Sequence: Synthetic coding sequence
  source 1..1677: mol_type = other DNA
atggaagccgcagcccagttttttgtggagtcaccagacgtagtgtatggtccagaggccatcgaggcccagtacgagtacagaacgaccagggtgagccgcgagggaggagtgctcaaagttcatccgactagcacccggtttactttccggaccgcacggcaggtcccaagactcggggtgatgctcgtgggatggggcggtaacaacgggagcaccctgactgctgccgtgctggctaataggctacggctatcttggcctacgaggtcagggaggaaagaggctaactactacggatccctcactcaggccggaaccgtgtccctggggcttgatgcggaggggcaggaggtgtttgtgcccttctccgcagtcctgccaatggttgcacctaacgacttggtgtttgacggctgggacatatcgagcttaaacctggcagaagccatgcgaagagctaaggtgctggactggggcctgcaggaacagctgtggccacatatggaggccctgcgaccgagaccttccgtctatatcccggagtttattgccgcaaatcaatctgctcgtgccgataacctgatccctggatccagagctcagcagcttgaacagattcggagagatattagagacttcagatcttccgctggcttagacaaggtaatagtgctgtggaccgctaacaccgagcggttttgcgaagtgatccccggtttgaacgatacggctgaaaacttattgcggacgatcgagctgggcttggaggtaagcccatccactctatttgccgtggcttctatccttgagggttgtgcctttctgaacgggtcccctcagaacacgctggtcccaggggctcttgaactggcctggcagcacagggtctttgtaggaggagatgacttcaaatccggccagactaaggtaaagagcgttttggtagatttcctgatcggaagcggcttgaaaacaatgagcatagtgagctacaatcatctgggtaataatgacggagaaaacctgagcgctccgctgcagttcaggagcaaggaggtgtccaaaagcaacgtcgtggacgacatggtgcagtctaatccagtcttatatactcctggagaggagccagaccactgtgtggtaatcaaatacgtgccgtacgttggtgattccaagcgagcacttgatgaatatacaagtgagctaatgcttggtgggacaaataccttggttctgcataacacctgtgaagattccctgctcgcggcacccatcatgctggatctggccctcctgactgagctctgtcagcgtgtcagtttctgtacggacatggaccccgagcctcagacattccatccggtcctctctttgttaagttttctatttaaagccccacttgtcccacccggatcacccgtggtaaacgcactgttcagacagcgaagctgcattgagaacatcctgagggcctgtgtcggactgcctccacagaatcacatgttgcttgaacacaaaatggagaggccgggtccatccttgaagcgcgtggggcctgtggcggcaacctaccccatgctgaataaaaagggccctgtacccgcagccacaaacggttgcaccggcgatgccaatggccatctgcaagaagaaccacccatgcccactacgtag

SEQ ID NO: 226875 - DNA, 1515 bp, synthetic construct
  misc_feature 1..1515: note = Description of Artificial Sequence: Synthetic coding sequence
  source 1..1515: mol_type = other DNA
atggaggccgctgctcagttctttgtggagtcaccagatgtcgtttacgggccagaggccatagaggcccaatatgagtatagaacgacaagggtgagtagggaaggaggggtccttaaggaggctaactattatggatctctgacccaggccggtacggtttccttgggacttgatgcggagggccaagaggtgttcgtacctttttctgcagtgctcccgatggtggctcctaatgacttggtgtttgatggctgggacattagttctctgaatctcgccgaagcaatgcgcagggccaaagtgctggattggggcctacaagaacagctctggccccatatggaggcgttgcgaccccgtccttctgtgtacatcccggaatttattgccgctaaccagtctgctagggctgacaatctgatccctggatccagggcccagcagctggagcagatccgaagggacataagggactttcggtcaagcgctggcctcgacaaagtgatcgtgctgtggacggcaaacacggagaggttttgcgaggtgattccgggactaaacgatacagccgagaatctgctgcgtacaatagaacttggtctggaggttagcccatcaactctctttgctgtggcttcgattttggagggttgtgcgttccttaacggcagtcctcaaaatactttggttcctggcgcattagagctggcctggcagcatcgtgttttcgtggggggtgacgattttaaaagtggccagaccaaggtgaaaagtgtcctggttgactttctgattggctccggattaaagacgatgtcaatcgtcagctataatcacctcgggaacaatgatggtgagaacttgagcgctcccctgcagttccgctctaaggaggtcagcaagagcaacgtagtcgacgatatggtgcaaagcaacccagtgttgtacactccaggagaggagccggaccattgtgttgtcatcaaatacgtcccttacgtcggagattctaagcgggctctggacgagtatacgtcggagctcatgctggggggaaccaatactctggtgttgcataacacgtgcgaggactcactgctggccgcacctattatgctagatttggctctgctgaccgagctgtgtcagagagtgagtttttgtaccgacatggatcctgaacctcagacgttccatccagttctttcccttctgtcctttcttttcaaggcaccactagtgccgccaggatccccagttgtaaatgcactgtttcgtcagagatcatgcatagagaacattctgagagcttgcgttggcctgcctcctcagaaccacatgctgctagagcataaaatggaacgtcccggaccaagcctcaaacgggtcggccctgtggcggctacttaccccatgttgaataagaagggccctgtccctgccgctaccaacggctgtactggcgatgccaacggccaccttcaggaggagccacccatgcctaccacttag

SEQ ID NO: 226876 - DNA, 1227 bp, synthetic construct
  misc_feature 1..1227: note = Description of Artificial Sequence: Synthetic coding sequence
  source 1..1227: mol_type = other DNA
atgaggcgagccaaagtgctggattgggggttgcaggaacaactctggccccatatggaagcactgcgcccacgcccatctgtttatatccccgaattcattgcagctaatcagtctgcccgtgccgataatctcatcccaggaagtcgagcacagcagcttgagcagatacggcgtgatatccgagatttccgttctagtgccggattggacaaggtcatcgttctgtggaccgcaaatactgagcgcttttgcgaggtgatcccaggtttaaacgacaccgccgagaatctgctacgaaccattgagctaggactggaagtctctccgtccaccctcttcgcggtcgcctccatcctcgagggctgcgcctttcttaacggtagtcctcaaaatactcttgtgcctggggctctagaattggcgtggcaacatcgagtatttgtcgggggagatgattttaaaagcgggcagactaaggtcaagagtgtactggttgactttctgatagggagtgggttgaaaaccatgtctattgtatcttataaccatctgggcaacaacgatggcgagaacctttccgcgccactgcaattcagatcaaaggaggtgagcaagtctaacgtggtagatgacatggtacaatctaatcccgtgctctatacaccgggagaggagccagatcattgcgtagtaattaaatatgtcccctacgtgggagattcaaagcgtgcattggacgagtacaccagcgagctgatgctgggcggaaccaacaccttggtgctgcacaacacctgtgaagatagtctactcgccgcacctataatgttggatcttgccttactgacggagctttgtcaacgggtgtccttctgtacagatatggatcctgagccacagacgtttcaccccgttctctccctcctgtccttcctgtttaaggctcctttggttcctccaggcagtcccgtcgtgaatgcgctttttcgccaacgcagctgcattgaaaatatactcagagcttgcgttggactgccccctcaaaatcacatgctcctggaacacaagatggagcgccctggcccttctctcaaacgtgttggcccagtggcagccacataccccatgttgaataaaaaagggccagtacccgcagccaccaacggttgcacaggcgacgccaacgggcatctacaggaggagccgccaatgccaacgacttag

SEQ ID NO: 226877 - DNA, 1386 bp, synthetic construct
  misc_feature 1..1386: note = Description of Artificial Sequence: Synthetic coding sequence
  source 1..1386: mol_type = other DNA
atgactctgccgggtggccctacggggatggcacgacctggcggtgcaagaccctgcagccccggattggaacgggcaccccgaaggtcggtgggggagctacgcctgctgttcgaagctaggtgtgccgcagttgcagcagctgccgcagcaggcgagcctagggctcggggagctaaacggcgaggcggtcaggtacctaatggactgcccagagcacccccagcgccagttatccctcaattaaccgtaacggccgaagagccagacgttccccctacctcccctgggcctcctgagagagagagagattgcctgcctgccgctggaagttcacacctgcagcagccgaggcgccttagcacttcgtccgtctcctcaacaggctcatcttcactgctggaggatagcgaagacgacttgcttagcgattccgagtcccgttcacggggtaacgttcaattggaagccggagaggatgttggccaaaaaaaccactggcagaaaatccggacgatggtgaacctcccggttatctctccttttaaaaaaagatatgcctgggtccaactggcagggcacactgggagctttaaagcagctggaacatctggcttgatcttgaagagatgctccgagccagagcgctactgcctcgcaaggctgatggcagacgctctgcgtggttgcgtcccggcttttcacggggtggttgaaagggacggtgaatcctatctccagctacaagacctgttggatggttttgacgggccttgcgtgctggactgtaagatgggagtcagaacatatctggaggaggagttaaccaaagcacgagagaggccgaaactgcggaaggatatgtacaagaagatgctcgcagtggacccagaggcaccaactgaggaggaacacgcacagcgagccgtgaccaagcctaggtatatgcaatggcgggaggggatctccagctccactaccttgggctttcgaatcgagggtataaaaaaggcagacggcagttgctctactgattttaagactactcgcagcagggagcaagtactgcgcgtgttcgaggagtttgtccaaggcgatgaggaggtgctgcggaggtatctgaacagactccagcagatccgtgacaccttagaagtgagtgagttttttcgtaggcacgaagtgatcggctcctccctcctgttcgttcatgatcactgccaccgcgcaggggtctggttgatcgacttcgggaaaaccacgcctctgccagacggtcaaatcctggaccaccgcagaccatgggaggaggggaaccgagaggacgggtacttgcttggtctcgacaatctcatagggattctagcgagcttggcagagcggtag

SEQ ID NO: 226878 - DNA, 2841 bp, synthetic construct
  misc_feature 1..2841: note = Description of Artificial Sequence: Synthetic coding sequence
  source 1..2841: mol_type = other DNA
atggccgtgtattgctacgcccttaactcgcttgtcatcatgaatagcgccaatgaaatgaaaagcggaggaggtcccggaccttccggaagcgagactccccctcctccacggagagcagtactgagtcccggtagcgtgttctcacctggtaggggagccagcttcctgtttccaccggcagagtctttgtctcccgaggaacctcgcagccccggtggatggaggagcggccgaagaagattaaatagctcctccggcagcgggtctggtagcagcgggtctagtgtgagcagtccatcatgggccggtaggcttcgcggagatcggcagcaggtcgtcgctgccggaaccctaagtccgcctgggcctgaagaagcaaaaagaaagctccggattctgcagagggagctacaaaatgttcaggttaatcaaaaggttgggatgttcgaggctcatattcaggctcagagttcagcaatccaggcgcctaggagccccaggctggggagggcacgcagccccagtccgtgtcccttccggtcaagtagccaaccccctggaagagttttggtgcagggtgctagatcggaagaaagacgcacaaaaagctggggggaacagtgccctgaaaccagcggcactgactctggcagaaagggcggtccttcgctgtgttccagccaggtaaagaaagggatgccccctctgccgggtcgggctgccccaaccggttctgaggcacaaggtcctagcgcatttgttcgtatggaaaaggggatccctgcttccccgaggtgtggaagtccgacggccatggaaattgataagcgcggttctccaacaccgggaacacgcagttgtttggcaccttccctgggcttattcggtgcctcactgacgatggccaccgaagtggccgctagagtgacatctactggaccgcatcggccacaggatttggctttaacggaaccatccggcagagctagagaactggaagatctgcagcctccagaggccctcgtcgagaggcaggggcaattccttggatctgagacttcccctgccccagagcgtggtggccctagagacggcgagccccctgggaaaatgggaaaagggtaccttccatgcgggatgcctggttccggtgaacctgaagtggggaagagaccagaggagaccacagtgagtgtccagtcagcggagagctccgactcgctgagttggtcacggctgccacgggcattggccagcgtcggtcctgaggaggcgcgaagcggcgctcctgtgggagggggaagatggcaactcagtgatcgagtggaaggcggatctcccacccttggtcttctagggggtagcccctccgcccagccgggaacaggtaacgtcgaagctggaattccaagcggcaggatgctggagcctttgccttgttgggatgctgccaaggacctgaaagagccacagtgcccgccaggagacagagtaggagtacaacctggaaattcccgcgtgtggcaaggcactatggagaaggcaggcctcgcttggacccgcggaaccggggtacaatccgaggggacatgggaatcccagaggcaggactctgatgctctgccctcaccagagctgcttccccaggaccccgataaaccatttctgcgtaaagcatgttccccttcgaacattccggcagtgatcattacagacatgggtactcaggaagatggtgcactggaggaaacacagggatctccgcgaggaaatttgcccctccgaaagctgtcaagtagctccgcctcttccacaggcttcagtagctcctatgaggacagcgaggaggatatttcgagcgaccctgagaggactcttgatcctaacagcgctttcctgcacacactggatcagcagaagccccgtgttagtaagtcatggcgcaaaatcaaaaacatggttcattggtctccattcgtgatgtcattcaagaagaagtacccctggatccagcttgctggccacgctgggagcttcaaggctgcagccaacggacgcatcctgaaaaagcactgtgagagcgagcaacggtgtcttgacaggttgatggtggacgtgctcaggccattcgtacccgcttatcacggcgatgtagtgaaggacggggagagatacaatcaaatggacgatctactcgcggattttgactccccttgcgtgatggactgcaaaatgggaattcggacctacctggaggaggagctcactaaagccaggaaaaaacccagtcttcgaaaggatatgtatcagaagatgatcgaagtggacccagaagctcccacagaggaggagaaggctcagcgggcagtgaccaagccacggtatatgcagtggcgggagacgatcagttccactgccacacttggatttaggattgaggggattaagaaagaggatggaacggtcaatagagacttcaagaaaaccaagacacgcgagcaggtgacagaggcgttcagggaatttaccaaaggtaaccataacatcctgattgcctatcgagacaggcttaaagcgatcaggacgacccttgaagtatcaccttttttcaagtgccacgaagtgataggttccagtctgctgtttatccatgacaagaaggagcaggccaaggtgtggatgattgattttggaaaaacgactccattacccgagggtcagaccctgcagcacgacgttccctggcaagaagggaacagagaggatggctacttatccgggctgaacaacttggtggatatactgaccgaaatgtcccaggacgctccattagcctag

SEQ ID NO: 226879 - DNA, 1935 bp, synthetic construct
  misc_feature 1..1935: note = Description of Artificial Sequence: Synthetic coding sequence
  source 1..1935: mol_type = other DNA
atggcagtttactgctacgccctgaacagccttgtgataatgaatagcgcaaatgagatgaagtccggcggaggcccaggccctagtggctcagagactcctccgcctcccaggagggctgtccttagcccaggatcggtttttagcccgggaaggggggcatcattcctgttccctccggcagaaagcctaagccccgaggagcctaggtcgcctggaggctggaggtccggccgacggagactgaactccagcagtggctccggtagcggcagctccgggagctctgtctccagtccatcctgggcaggacgactacgcggagatcgccagcaggtggttgccgctgggacccttagcccacccggtcccgaagaggccaagcgaaagcttaggatactgcagagagaactgcagaatgtgcaggtgaaccagaaggtgggaatgttcgaggctcacatccaagctcaatccagcgcaatccaagcgcctcgctcacccagactgggtagggccagatctccctccccatgtccattcaggtcaagcagccagcctccgggtcgcgtcctggtccaaggcgcaaggagtgaggaacgccgtaccaaaagctggggggagcaatgtcctgaaacctcgggcacagactcaggccgtaagggcggtccctctctgtgtagttcacaggtgaagaagggtatgccaccgttgcctgggagagcggctcccacaggctccgaagcacaaggcccaagtgcctttgtgcgcatggagaaaggtattcccgcttcacccaggtgtggatcaccaacagctatggaaatcgataaaagaggaagtcctaccccaggcactcgcagctgcctggctcctagtctgggtctgttcggcgctagtctgactatggccaccgaagtggccgcacgcgtcacaagtacgggacctcacagaccacaggatctggccctgactgaacccagcgggagagccagagagttggaagatctccaaccacccgaggccctggtggagaggcagggccagtttctgggtagtgagacatcccccgctcctgaacgcggaggcccacgcgacggggagccgcctgggaagatggggaaggggtacttaccttgcggcatgcccggtagcggggaacctgaagtggggaagagacctgaggaaacgactgtcagtgtgcagagcgccgagagttccgactccctgagttggtctaggttgccgagggctctggcctctgtgggacctgaggaggcacgctctggcgcacccgtgggcggaggtaggtggcaactgtctgaccgtgttgaaggtggatcgcccactctgggactcctcggagggtctccttccgctcagcccggaacgggcaacgttgaggcaggtattccttcaggtaggatgctagagccccttccctgttgggatgcagccaaagatctgaaggagccacaatgcccaccaggcgatcgcgtgggcgtccaaccagggaactccagagtgtggcagggcacaatggagaaggcgggactggcttggacaagggggacaggagttcagagtgaggggacatgggagtcccagagacaggactcagatgcactgccctcccccgagttactgccgcaggatcccgataaacccttcctcagaaaggcttgttctccatctaatattcccgctgtgatcatcacggacatgggcacgcaagaagatggcgctctggaagagactcagggcagccctcggggtaatctccccctgcggaagttgtctagttccagcgcatcatccacgggatttagttcaagctatgaggattccgaggaggatatctccagtgaccctgagcggaccctagacccgaacagcgcatttctccatacattggaccagcagaagcctcgcgtatag

SEQ ID NO: 226880 - DNA, 2841 bp, synthetic construct
  misc_feature 1..2841: note = Description of Artificial Sequence: Synthetic coding sequence
  source 1..2841: mol_type = other DNA
atggccgtttactgttacgctttaaacagtctggtcatcatgaactcagccaacgagatgaaaagcgggggaggacctggcccttcaggctccgaaacacccccacccccacgtcgcgctgtactttcaccgggatctgtttttagcccaggtcgaggagcttcttttctctttccaccagccgagagcctaagccccgaggaaccccgtagtcccggaggttggagatctggcaggcgccgtctgaatagttctagtgggtccggatctggatcctccggctcatccgtgtccagcccaagttgggcaggccgactacgcggtgatcggcaacaggtggtggccgcaggcactcttagccctccaggccctgaagaagctaaacggaaattgcggatcctgcagcgggagttacagaacgttcaggtaaaccaaaaagtaggtatgttcgaggcccacattcaagcacagtctagcgccatccaggcccctaggagccccagactaggaagagcccgttctccaagtccttgcccattccggtcatcctctcagccgcctggtcgtgtactggtgcaaggtgcccgaagtgaggaacgccgaacaaagtcctggggggagcagtgccccgaaacctccggtaccgactcggggaggaagggcggtccctcgttatgtagctcacaagtgaagaaagggatgccgcctctgcccggtcgggcagccccaactggctcagaagctcagggtccaagcgccttcgttcgcatggagaaagggatccctgcgtcacccaggtgcggatcgccaaccgctatggaaattgacaagcgcggtagccctacacctggcactcgctcatgcttggccccatctctgggccttttcggggcatccctgaccatggccactgaagtggctgctcgggtgacctctacaggccctcacaggccccaggacctcgctctgacagaaccgagcggtcgcgctcgggaattggaagacctgcagcctccagaagctctggtggaacgccaagggcagttcctagggtctgagacctcccccgctcctgagagagggggacccagagacggagaacctcctggaaaaatgggcaagggttaccttccatgtggcatgcccggttccggcgagcctgaggtgggcaagcggccagaagagactacggtctcagtccagagtgcggagtccagtgattctctgagttggtctaggcttccaagggccctcgcctccgttggcccagaggaagccagatctggagccccagtgggcggaggcagatggcagctctccgaccgcgtggagggcggttcccccacgctcggattgctggggggttccccttccgcccagccgggaaccggcaatgtggaagcgggaataccctccgggaggatgcttgagccactcccttgttgggacgccgctaaagacttaaaggaacctcagtgcccccctggggacagagtgggagtgcagcccggaaattcccgtgtctggcaaggaacgatggagaaggctgggttggcatggactcggggtacaggcgtgcagtccgaaggtacctgggaaagccagagacaagacagtgacgccttgccttcacccgaattgctgccacaggatcctgataagccattcctccgaaaagcttgttccccaagtaacatacctgctgttattatcaccgacatgggcacccaggaagatggggcacttgaagagacacagggctcacccagaggtaacctcccacttcgcaagttatcaagcagttcagctagttcaaccggttttagctcgtcatatgaggacagtgaggaagatatcagctctgacccagaacgtactcttgacccaaacagtgcctttctgcatacactggaccaacagaagccgagggtgtctaaaagctggcgaaagattaagaacatggttcattggagtccttttgtaatgagtttcaagaaaaaatatccctggattcagttggccggtcacgcgggatccttcaaagccgcagccaatggcagaattctaaagaaacactgtgagtccgagcaaaggtgtctggacagactcatggttgatgttctccgcccatttgtgccagcataccacggagacgtcgtcaaagacggcgagaggtacaatcagatggatgatctgcttgctgacttcgactcgccctgcgtgatggattgtaagatgggaatcaggacttacctcgaagaagaattaacaaaagccaggaaaaaaccctcactccgcaaggatatgtatcagaagatgatcgaagttgaccccgaggcgccaaccgaggaggagaaggcccaacgggctgtaaccaagccccgttacatgcaatggagggagactatctcttcaaccgcgacacttggattcagaatcgaggggataaaaaaagaggacggcacagtgaatagagactttaagaagactaaaacacgcgagcaggtgacagaggccttccgggagttcacgaaggggaaccataacatcctcatcgcttaccgggaccgcctgaaggctatcaggacaacgctcgaagtctcaccctttttcaagtgccacgaggtgatcgggtcatctttactattcatccatgacaagaaggaacaagcgaaagtctggatgatcgacttcgggaaaactaccccgttgccggaaggccagacgctccagcatgacgtcccttggcaggagggtaaccgcgaggacggctatctctcggggctgaataacctggttgatattctgaccgagatgtctcaagacgctccactggcctag

SEQ ID NO: 226881 - DNA, 2052 bp, synthetic construct
  misc_feature 1..2052: note = Description of Artificial Sequence: Synthetic coding sequence
  source 1..2052: mol_type = other DNA
atgcgcaggtgcccatgccgaggatccctgaatgaggcagaggccggagccctgccagctgccgctcgcatgggattagaggccccaagagggggacgcagacgccagcccggtcagcaacgccctggacccggtgcaggagctcctgcgggtcgaccagagggcggaggcccatgggccaggacggaaggaagcagcttgcactccgagccagagcgggcaggcttgggacccgctcccggaaccgagtcaccccaggccgagttctggactgatgggcagaccgagccagcggcagcgggactcggggttgaaactgagcgtcctaagcagaagaccgaaccggacaggagctctctgagaacccacctcgaatggtcctggtctgagctcgaaacaacctgtctttggaccgaaactggcaccgatgggctgtggactgaccctcatcgtagtgatctccagttccagcccgaggaagcgtctccttggactcagccaggcgtgcacggcccatggactgagctggagacacacggcagtcaaacacaaccagagcgcgtgaagtcttgggccgataatttatggacgcaccaaaacagctccagcctgcaaacacatcccgagggggcatgtccgtctaaggaacccagtgcagacggctcctggaaagaactgtacaccgatggctctaggacccagcaggatatagaaggaccctggacagagccctataccgatggcagccagaagaagcaggatacagaagccgcaaggaagcaacctgggacaggtgggtttcaaattcaacaggacaccgatgggtcctggactcagccctctacagatggatcacagacagctcctgggaccgattgtctgctcggcgaaccagaagacgggccattggaagagcccgaacccggagagctcctgactcatctttactcacatctaaaatgcagcccactgtgtcctgtgccaagactgatcattacccccgagactccagagcctgaagctcaaccagtggggcctccatcaagagtcgaaggaggatctggcggattcagttccgcgtccagctttgatgagagcgaggacgatgtggtggctggaggcggtggtgcatctgaccctgaagacaggtctggtagtaagccatggaaaaaattgaaaaccgtcttaaaatacagtccctttgtggttagctttcgtaaacactatccttgggtgcagcttagtggccacgccggtaactttcaagccggtgaagacggcagaattcttaaacgattctgccagtgtgagcagcgaagtctggaacaactgatgaaagacccgctcagaccttttgtgcctgcatattatggtatggtattacaggatggtcaaacgtttaaccagatggaagatttgcttgcagacttcgaggggccttctatcatggactgtaaaatgggctcaaggacttatctggaagaagagttggtgaaagctagggagaggcctcgaccgagaaaagacatgtatgaaaaaatggtagccgtggatccaggtgcccctactcccgaagagcacgcccagggggcagttacaaagcccaggtacatgcagtggcgcgaaaccatgagcagcacatcaacactcggattcagaattgaagggataaagaaagcagatggtacgtgtaatactaatttcaagaaaactcaggctcttgagcaggtgaccaaagtgcttgaggacttcgtggatggcgatcacgtaattctccaaaaatacgtagcgtgtctggaggagcttcgcgaagcattggaaatttctcccttttttaagactcatgaagttgtgggcagctctttgcttttcgtccacgaccataccggactggctaaggtctggatgattgattttgggaagactgttgcacttccagatcaccagactctgtctcacagattgccttgggcagaaggtaatcgagaggacggctacctctggggcctggataacatgatctgcctcttgcagggtctggcacagagttag

SEQ ID NO: 226882 - DNA, 1740 bp, synthetic construct
  misc_feature 1..1740: note = Description of Artificial Sequence: Synthetic coding sequence
  source 1..1740: mol_type = other DNA
atgagaaggcccccaggcaacggcgaagctgcaagcgaaggccctggagggtggggcctatggggggtgcaagagtcccgccgactctgctgtgccggacacgaccgctgtaaacaggctttactccaaattggcatcaacatgatggcgctgcccggaggtcgccacttggactctgtgacactcccaggtcagcgcttacacctgatgcaggtggactcagtgcagcggtggatggaagatctcaagctgatgaccgagtgcgagtgcatgtgtgtgctgcaggctaaaccaatcagcttagaagaagacgctcagggcgatttgattttagcaggcggaccagggcctggcgaccccttacaactgttattgaaacgtgggtgggtgataagtacagaactgcgcagaatcgggcagaaactcgctcaggacagatgggccagagtgcactcaatgtcggttcgcttgacctgtcatgcgcgaagcatggtgtctgaatactcagccgtctctcggaactcacttaaggagatgggagagattgaaaagctgctgatggaaaaatgtagcgagctgtccgcagtcaccgagagatgcttgcaagtggagaatgaacatgtcctgaagagcatgaaagcttgcgtgtcggagactttgagcatgctgggtcagcattttggacagctcctggagttggcacttaccagagaggtgcaagcgctggtgcggaagatcgacgcatccgataacatttataccacagagagtaccaccggtaatctcttctccttaactcaagaaggggctcccctctgtagaattatagcaaaggaagggggagtcgttgccctgttcaaggtgtgtcgccaggattcttttaggtgcctttaccctcaggccctgcgaacgcttgcttcaatctgctgcgttgaggagggggtgcatcaattagagaaagtggacggcgtgctgtgtctcgccgacatcctgactgataacagtcacagcgaggctacaagggccgaagcagccgcagtcgtggcgcaggtgactagccctcacctgcccgtcactcaacacctctcatcttttctggaatctatggaagagatcgtgacagctctggtgaagctttgccaagaagcgtcttccggcgaagttttcctcctggccagtgccgcactggctaacatcacgttcttcgacactatggcttgcgaaatgttgttgcaattgaacgccatccgagtcctgttagaggcttgcagcgataagcagcgggttgacaccccctatacaagagaccaaatcgtcaccattctggcaaacatgtcggtgttagaacagtgcgcctccgacataatccaggagaacggcgtccagctgataatggggatgctaagcgagaaaccaaggtctggaactccagcagaagttgctgcctgcgaacgggtgcaacagaaggcggcagtgaccctcgcccgtctctctagagatccagacgttgcgagggaagccgtccgattgtcctgtatgtccagattaatcgagctctgtcgtagcccatctgaaagaaattccagcgatgcagtgcttgtcgcttgcctggcagccctgcgacgtcttgccggagtctgcccagagggattacaggactcagattttcagcagttggtgcagcccaggctagtcgacagcttcctcctctgctcaaacatggaggaatccttcgtgtag

SEQ ID NO: 226883 - DNA, 1599 bp, synthetic construct
  misc_feature 1..1599: note = Description of Artificial Sequence: Synthetic coding sequence
  source 1..1599: mol_type = other DNA
atgatggcactgcctggagggcgtcaccttgatagcgtgactctgcctgggcagcgtctgcaccttatgcaggtagatagtgttcagcgctggatggaagatctcaaactgatgactgagtgcgagtgcatgtgcgtgctgcaggccaagccaatttctctagaggaggatgcgcaaggggacctgatactggcaggaggcccaggcccaggagacccacttcaactacttctaaagagaggctgggtgatctccacagaactcaggcggatcgggcagaagctcgcccaggatcggtgggctcgggtacactccatgagcgtgagattgacatgtcacgccagaagcatggtttccgagtacagtgctgttagccgtaattccctaaaggagatgggtgagatcgaaaagctcctgatggaaaagtgttctgagttgtccgccgtcacagagagatgcctgcaggtggagaacgagcacgtcctcaagagcatgaaagcctgtgtttctgagaccttgtccatgcttggacagcatttcgggcagctgcttgaactagcgttgacccgcgaggtacaggccctggtgcggaagatcgacgccagcgacaacatttacacgactgagtccacaacaggaaacctgttttccttgacccaggagggggctccgctgtgtcgcatcatcgcaaaggagggtggagtggtggcactctttaaagtttgtcgtcaggacagcttccggtgcctctacccccaagccctccgaaccctagcctccatctgctgcgttgaagaaggggttcatcagttagagaaggtggacggcgtcctctgtctggctgatattcttacagacaattcccacagcgaggcaactagagccgaagctgccgctgtcgtggctcaggtgactagcccgcacttgcccgtcacacagcatctgagcagctttctcgaaagcatggaggagattgtgaccgctctggtcaaactgtgtcaggaggcctcttcaggagaagtgtttctgctggccagcgcggcactggcaaatattacattttttgatactatggcctgtgagatgcttcttcagctgaacgccattagggtcctccttgaagcatgcagtgacaagcagagagtggacaccccgtacacacgggatcagatcgtgactatcctggccaatatgtctgtgctggagcagtgcgccagcgacattattcaggaaaatggggtgcagctcattatgggaatgctcagcgagaaacctcggtccgggacacctgccgaggtagcagcctgcgagcgggtacagcaaaaagcagccgtcacattggctcggctcagccgcgatccagatgtcgcacgcgaagcggtgagacttagttgcatgtctcgcttgatcgaattgtgccgctctcctagtgaacgaaatagtagcgacgcagtgctagtggcatgcctcgctgcgttgcggagattagccggtgtgtgccctgaagggctgcaagattctgactttcagcagcttgttcagcctcgcctggtggactcttttctcctgtgctctaacatggaggaaagctttgtgtag

SEQ ID NO: 226884 - DNA, 927 bp, synthetic construct
  misc_feature 1..927: note = Description of Artificial Sequence: Synthetic coding sequence
  source 1..927: mol_type = other DNA
atgatggccctgcccggaggaagacaccttgattctgtgaccttgccaggccagagactccacctgatgcaggtggattctgttcaacgctggatggaagatttaaaactaatgacagagtgcgagtgcatgtgcgtactacaggctaagcccataagccttgaggaggacgcccaaggtgatctgattctggccggaggccctggtccaggggaccctttgcagctcctgctaaagcgtggctgggtgatctcgaccgagcttagacggattgggcagaagctcgcgcaggaccgttgggctagggtgcatagcatgtccgttcgcctgacctgccatgcccgttccatggtgagcgaatactccgcagtgtcgcggaacagcctcaaagagatgggagaaatcgagaaactgctgatggagaaatgtagtgagctgtcagcagtcaccgaacggtgtctgcaggtagagaatgaacacgtgctgaaaagcatgaaagcgtgcgtctccgagacactgagcatgctgggccagcacttcgggcagctgctggagctggccttgactagggaggtgcaagttgagagccattccgtgactagactcgagtgttctggagccatcagcgcacagtgtaatctccgtctgctagggagtagtgatagtcccgcttctgcaagtcaggcccttgtgagaaaaatcgacgctagcgacaacatatacactaccgagtcaaccactggaaaccttttcagtctgacacaggagggtgcacctctatgtaggattattgccaaagaggggggtgtggttgctctgtttaaagtctgccggcaggacagcttccgctgtctgtacccccaggctctgcggaccctagcttcaatctgttgtgtggaggagggcgtgcaccagctcgagaagtag

SEQ ID NO: 226885 - DNA, 1473 bp, synthetic construct
  misc_feature 1..1473: note = Description of Artificial Sequence: Synthetic coding sequence
  source 1..1473: mol_type = other DNA
atgatggcgttgccaggtggaagacacctcgactcggtgaccctcccagggcagaggctgcacctcatgcaggtggattccgtccagaggtggatggaggatctgaagcttatgacagaatgcgaatgcatgtgcgtgcttcaggccaaacccatcagtctggaggaagatgcccagggggacttaatcttagcagggggtcctggaccgggagatccactgcagctcttactgaaaaggggctgggtaattagcaccgagctgagaaggattggccaaaagctggcccaggatcggtgggctcgggtccacagcatgagtgtgcggctgacttgccacgctcgctctatggtaagcgagtactccgctgtgtccagaaattccctcaaagagatgggagaaatagaaaagctgctgatggagaagtgtagtgaactctctgcggtgaccgaacgctgcctgcaggttgaaaatgaacacgtcctgaagagcatgaaggcatgtgtcagcgagacactgtcaatgttagggcagcatttcggtcaactgctcgagctcgctttgactagagaagtgcaggcccttgtacgtaagattgatgcttctgataatatttacacaactgagtctacgaccggcaacctcttttcactgacacaagagggagctccgctgtgccgaattatcgcgaaggtcgatggagtactctgcctcgccgatattctcacagataactcccactctgaagccacgagagctgaagctgccgctgttgtggcgcaggttacctcacctcatctccccgtgacacagcacctttcctctttccttgagagcatggaagaaatcgtgactgccttagtaaagctctgtcaggaggctagctctggagaggtgttcttattggcttcggctgccctggccaatatcaccttcttcgacactatggcttgcgaaatgctcttgcaactgaacgctataagggtactacttgaggcatgttcagacaagcagcgagtggacaccccctacacccgcgatcagattgtaactattcttgcaaacatgagcgttctggaacagtgcgcatccgatataatccaggagaatggagtccaactcatcatgggcatgctctctgagaagccaagatcaggaacacccgctgaggtggccgcatgcgagcgggtacaacagaaggccgctgtgaccctggccaggctgtccagggacccagatgtggctcgagaggctgtgcgcttgagctgcatgtctaggctgattgaactgtgcagaagtccttccgagagaaactcctccgatgccgtccttgtcgcctgtctggcggcactgagacgcctggcaggggtgtgtcctgaaggtttgcaagacagcgacttccagcaactggtccagccacggttagtggactccttcctactgtgttccaatatggaggaaagcttcgtgtag

SEQ ID NO: 226886 - DNA, 1473 bp, synthetic construct
  misc_feature 1..1473: note = Description of Artificial Sequence: Synthetic coding sequence
  source 1..1473: mol_type = other DNA
atgatggccctgcctggaggacgtcaccttgatagcgtgacccttccagggcagcggttgcacctgatgcaggttgatagcgtccagagatggatggaagacctgaaactaatgaccgaatgcgaatgtatgtgcgtgctgcaggcaaaaccaatctcccttgaggaagatgcccagggagatctaattctggccggaggtcctgggcctggagaccctttacaactgctgctgaagcggggttgggtcatcagcactgagctccggagaatcgggcaaaagcttgcccaggatcgctgggccagagtccactccatgtccgttcggctcacatgccacgccaggagcatggttagcgaatactctgctgtgtcaagaaactccctgaaagagatgggcgaaatagagaaacttctcatggaaaagtgtagcgaactaagcgcagtaacagagcggtgtctccaagttgagaatgaacacgtcctcaaaagcatgaaagcgtgcgttagcgagaccctgagcatgcttgggcaacacttcggccaactgctcgagctggcgctcacacgcgaggtacaggccctggtgcgaaagattgacgctagtgataatatttacaccacagaatctactacgggcaatctgttctccctgacccaagagggtgcccctctgtgtagaatcatcgctaaggttgatggcgtgctatgcctggctgacatcctgactgacaactctcactctgaggccacccgcgcagaggccgctgctgtcgtggctcaggtcactagtcctcacctgcccgtgactcagcatctgtctagttttctcgagtctatggaggaaatcgtcacagcattggtcaaattatgtcaagaagcatcctcgggagaggtgtttttgctagcctccgccgcactcgccaatattacattctttgacaccatggcttgcgaaatgctgttgcagctgaacgcaatcagagtgctgctcgaggcgtgcagtgataagcagcgagtcgatactccatacacacgggaccaaattgtgactattctggcaaacatgtctgtgcttgaacagtgcgcctctgacataatccaggagaacggagtgcagcttattatgggaatgctcagcgagaaaccacgctctggaaccccagccgaggtggccgcttgcgaaagggtgcaacagaaggccgctgtaactcttgcaagattatcacgagaccctgatgttgcacgggaagcagtccgactgagctgtatgagccgtctgatagagctgtgccggtctccctctgagaggaattcaagtgacgcagttttagtcgcctgtcttgccgctctacggagactggccggagtctgtcccgagggactgcaagactccgacttccaacagctggttcagcctcgtcttgtggactccttcctgttgtgctccaatatggaagaatcctttgtgtag

SEQ ID NO: 226887 - DNA, 1599 bp, synthetic construct
  misc_feature 1..1599: note = Description of Artificial Sequence: Synthetic coding sequence
  source 1..1599: mol_type = other DNA
atgatggctctgcccggagggcgacacctggattcggttacactcccaggccagaggttacacctcatgcaggtggactccgtgcagcgctggatggaagacttgaaactgatgacagaatgcgaatgtatgtgcgttttgcaggccaagcctatctccttagaggaggacgcccagggcgatctgattctggcaggtggtccaggtcccggagatcctctgcaactattgctcaagaggggttgggtgatctccacagaacttagacggattggccagaagcttgcccaggacagatgggctcgggtgcatagcatgtcagttcggctcacatgtcatgcaaggagcatggtgtccgagtactccgcggtttcaaggaattctctcaaagaaatgggggaaatcgagaagctcctgatggaaaaatgttccgaactgagcgcagtgacagaaaggtgcttgcaggtcgagaatgagcatgtcttgaagtcaatgaaagcttgtgtctcagaaactttgtctatgctagggcagcattttggacaacttctggagttagccctcaccagagaagtgcaagctttggtgaggaagatcgatgcatccgataatatctatacgaccgagagcactaccggaaacttattttcattaacccaggaaggagctcccttgtgcaggatcattgccaaggaaggcggtgtggtggccctttttaaagtatgccgccaagacagcttccgttgtctttacccccaggctctgagaaccctggcatccatctgctgcgtggaagagggagtgcaccaactcgagaaggtggatggagtgttgtgcctcgctgacattctaaccgacaattcacattctgaggccactcgggctgaggccgctgccgtcgtggcccaggtcactagccctcacctgcctgtgacccaacacctaagctcctttctggagagtatggaagaaatcgtgacagccctggtcaagctgtgccaggaagcgtcgtctggcgaggttttcctgctggcctcagccgctctggctaatattacgttctttgatacaatggcctgtgaaatgttattacagctaaatgccattcgggtcctcctagaagcttgcagtgataagcagagagtcgacacaccctatacccgcgaccaaatcgttaccatcctggctaatatgtccgttctcgaacagtgtgcttcagacataatacaggagaacggagtgcagctgataatggggatgctgagcgagaagccgaggtctggaacccctgctgaggtcgccgcatgcgagagggtacagcaaaaggcagcagttacactcgccagactctcccgagacccagacgttgcacgggaggccgtcagattgagctgcatgtctcgtttgatcgagttgtgtagatcccctagcgagaggaacagttccgatgccgtgttggtggcctgtcttgccgcactgcgcaggctagcgggagtatgcccggagggactgcaagattctgatttccaacagctggttcagccacgactcgtagactccttcttgctttgttcaaatatggaagagtcttttgtctag

SEQ ID NO: 226888 - DNA, 834 bp, synthetic construct
  misc_feature 1..834: note = Description of Artificial Sequence: Synthetic coding sequence
  source 1..834: mol_type = other DNA
atgcccagattgcatgaccacttctggagctgctcatgtgcccacagtgctcgcaggcgcggtccccctcgcgcttctgccgcagggcttgcagctaaggtgggcgagatgatcaatgtatccgttagcggtccctctcttctggccgctcacggagcccctgacgctgatccagcccctcgcggaaggagcgctgccatgagcgggccagaacctggaagcccatacccgaatacctggcaccatcgtctgttgcagagaagcctcgttctcttcagcgttggcgtggtccttgccctggttctcaacctgctgcaaatacaaaggaacgtcacgctgttcccagaggaggtgatcgctacaatcttttcttccgcgtggtgggtcccaccatgctgtgggacggccgcagctgtggtgggcctcctctacccatgcatcgattcacatctcggggagccacataaattcaagagagaatgggcatccgttatgcgttgtatcgctgtcttcgtgggcatcaaccacgcctcagccaaactggactttgctaataatgtccagctgagcttaactctggcggctctaagcctcggcttatggtggacctttgacagaagtcgcagtgggcttggactcggcattaccatcgcgtttttggcaaccctcattactcagttcctcgtttacaacggagtttaccagtatacctccccagattttctatacattcgaagctggctcccttgcatcttcttctctggtggagtgacagttggtaatattgggagacagctggctatgggcgtcccagagaaaccacattcggattag

SEQ ID NO: 226889 - DNA, 537 bp, synthetic construct
  misc_feature 1..537: note = Description of Artificial Sequence: Synthetic coding sequence
  source 1..537: mol_type = other DNA
atgccgcgtctccatgatcacttttggtcatgctcctgtgcacatagcgcacggaggaggggcccacctagagcctctgccaaactggacttcgctaacaacgtgcagttgtccctgactctcgcagctctatctctggggctatggtggacatttgacagaagtcgttctggtctagggctcgggattacaatcgccttccttgccacccttatcactcagtttctggtgtataacggagtgtatcagtacacatccccggattttctctacatacggtcctggctcccttgtattttcttctcagggggagtgacagtgggcaatattgggcgtcaactcgctatgttaataccattttgcgaagaattaaaccttaaaaccacatggctgtttcacaagacccggtctaactatagggtgtttctcaaatcaccgatcgtaatcgaatcctctaagcccccaattctccgcgcacggaaaatcctggaagaaaaccttacagtggattacgacaaggattatctgttctcatag

SEQ ID NO: 226890 - DNA, 372 bp, synthetic construct
  misc_feature 1..372: note = Description of Artificial Sequence: Synthetic coding sequence
  source 1..372: mol_type = other DNA
atgccccgtctacatgaccacttttggtcgtgtagctgtgcccacagcgcacgtcggaggggtccacctcgcgcaagcgccgcaggattagctgctaaagtcggtgagatgatcaacgtgtcagtgagcggcccatcactgctcgcagcccacggcgctccggacgccgacccagcacccagggggaggtcggctgctatgagtggccctgagccaggcagcccctaccctaatacttggcatcaccgcctgctccagcggtcactggtcctcttcagtgtaggggtcgtgcttgctctggtattgaatctgcttcagatccagcgtaacgtcaccttgttccctgaggaagtgattgccaccatcttttag

SEQ ID NO: 226891 - DNA, 495 bp, synthetic construct
  misc_feature 1..495: note = Description of Artificial Sequence: Synthetic coding sequence
  source 1..495: mol_type = other DNA
atgccacgcctgcatgatcacttttggtcttgttcatgcgcccattctgccaggcggcgtggacctccacgcgcttcagccgcaggactcgccgcaaaggtcggcgagatgattaacgtgagtgtgagtggaccttcgctcttggccgcacacggggctccggacgctgaccctgctccacggggacgttccgctgccatgagcggacctgagcccggtagtccttatccgaacacttggcaccataggctgctgcagcgtagtctagtcctgttctcggtgggtgtggttttggctctcgttcttaaccttctccaaatccagcggaatgttactttgttcccagaagaagtcattgcaaccattttcagcagcgcctggtgggtaccaccgtgctgtggtacagccgctggcattcacccacagatttcttctatctttgttttaggatccctggtgtactttagccaggaggcaagtaggtggggtacctag

SEQ ID NO: 226892 - DNA, 678 bp, synthetic construct
  misc_feature 1..678: note = Description of Artificial Sequence: Synthetic coding sequence
  source 1..678: mol_type = other DNA
atggctgagggagaaactgagagtccaggacccaagaaatgtggcccatacatcagcagtgtgacaagccagtctgtgaacttgatgattcgcggagtagtcctcttcttcataggggtcttcttggcactcgtacttaacttgttgcaaattcaacgcaatgtgactctcttccccccagacgtgattgccagtatcttttcctctgcatggtgggtgcctccttgttgcgggacagctagcgccgtgattggtctactttatccatgtatagaccgtcacttgggcgagccccataaattcaagagggagtggagctcagtcatgaggtgtgttgctgtgtttgtgggcataaaccacgccagcgccaaagtggactttgacaataacattcagctgtccctgacactggccgcactgagcatcggtttgtggtggacctttgatagatcgcggagcggctttggcttgggcgtcggtattgcttttctggctacggtggtgacccagttgctggtatataatggggtatatcagtatacatctccagattttttgtatgtgcggagttggctgccatgcatttttttcgcgggaggaattacgatgggcaacataggacgccagctggctatgtatgagtgcaaagtaattgctgaaaagtctcatcaggagtag

SEQ ID NO: 226893 - DNA, 4149 bp, synthetic construct
  misc_feature 1..4149: note = Description of Artificial Sequence: Synthetic coding sequence
  source 1..4149: mol_type = other DNA
atggcaactggcggaaggagaggcgcagctgctgcccctctgctcgtggctgtggccgctctgctgctcggagctgccggacacctctacccaggtgaagtgtgcccagggatggacatccgcaataacctcacaaggttgcacgagttagagaactgtagtgtcattgaaggacatctgcagatattgctcatgtttaaaacaaggccagaggacttccgcgacctaagtttccctaagctgatcatgatcacggactacctgttgttgttcagggtgtacggcctcgagagcttaaaagatctcttccccaatctgaccgttattaggggttctagattattctttaattacgcactggtcatctttgagatggtccacttgaaagagttaggtctctataacctgatgaatattactcggggaagcgtccggattgagaaaaacaacgagctgtgctacctggccaccatagattggagccggatactggactcagtcgaagataactacatcgtgttgaataaggacgataatgaggagtgcggtgacatatgtcctggcaccgcgaaggggaagaccaactgtcccgcaactgtgatcaatggtcaattcgtggagcgatgctggacccactctcactgtcagaaagtgtgccctaccatttgcaaatcccacggatgtacagcggagggcctgtgttgccatagcgagtgcctcggaaattgcagccagcccgatgatccgaccaagtgtgtagcatgcaggaacttttatttggacggcaggtgcgtcgagacatgcccacccccttattaccactttcaggattggaggtgcgtcaacttctcattctgccaggatcttcatcacaagtgtaagaacagtcggaggcaggggtgtcatcaatacgtgatccacaataacaagtgtatacccgagtgccccagcgggtacactatgaactcgagcaatctcctttgtacaccatgcctgggtccctgccccaaggtgtgccacctgctcgaaggggaaaagacgatcgacagcgttactagtgctcaagaattgcgtggctgcacagtaattaacgggtcattgataattaatattcggggaggcaataacctcgccgctgagttggaggcaaacctgggactcatagaggagatatcaggctatctcaagatcagacggagctacgccttagtcagtctatctttttttcgcaagctgcgccttatcaggggagaaaccctcgaaattgggaactattccttttacgccctggacaaccagaaccttagacagctgtgggattggtccaagcataaccttaccatcactcaagggaagctctttttccattataatcccaagttatgcttatctgaaatacataaaatggaagaggtaagcggaaccaagggaagacaggaacggaatgatatagcccttaagacaaacggagaccaggccagctgtgagaatgaattgctgaaattttcctatattcgaacgagttttgacaaaatcctcttgcggtgggaaccctactggcctccggatttccgagatctcctgggattcatgctgttctacaaagaagcgccatatcagaacgttaccgaattcgatggccaggacgcctgcgggagtaacagctggactgtggtcgacattgacccgcctttgcggagcaacgatccaaagtctcagaaccatcctgggtggcttatgcgtggactgaagccctggacacaatacgccatctttgtcaagacgttggtgactttctccgacgagagaaggacatacggcgcaaagagcgacataatttatgttcagacagacgccaccaacccgtcagtgccactggatccaatttccgttagcaatagcagcagccaaattatcctgaaatggaaaccccctagtgatcccaacggaaacataacacactatctggtgttttgggaaagacaggccgaggacagcgaattattcgagttggattactgtctgaaaggattaaaactgccatcgcggacatggtcacccccattcgaatccgaagatagtcagaaacacaatcagagcgaatacgaagactctgcaggggaatgttgtagctgtccaaagacagattcccagatattgaaggagctggaagagtcgtcatttcgaaaaacctttgaagattatttacacaatgtcgtgttcgttcccagaaagacgtcttcagggaccggcgctgaagatcctcgtccttctcggaaaagacgaagtctcggggatgtcggcaacgttacggtggcagtcccaaccgtggcagctttccctaacacctcaagcactagcgtgccaacttcaccggaggaacatagacctttcgaaaaggtagtgaacaaagaatcattggtgatttctggtctccggcacttcacaggctacaggatcgagctgcaagcatgcaatcaggatactcccgaggagcgttgtagcgtggctgcctacgtgtctgcgcgaacgatgcccgaggccaaggccgatgacatcgtgggccctgtcacacatgagatcttcgagaacaacgtagttcacctgatgtggcaagagcctaaggagcctaatggactcatagtgctgtacgaggtgtcctacagacggtacggcgatgaggaactacatctttgtgtatcccgtaagcacttcgccctggagcgtgggtgtagattacggggactgagcccaggaaactacagcgttagaatccgcgcaacaagccttgccggtaatggttcctggacggagcctacctacttttatgtgacagactacttagacgtcccaagcaacatcgctaaaattattattggacccctgatatttgtctttctgttcagcgtggtgatcggatctatatacctgttcctgagaaaacgccagcctgacggcccactgggaccgctctacgcgagctccaatcctgaatacctctccgctagtgacgtgtttccgtgctccgtctacgtccctgatgaatgggaagtgtccagggaaaaaataacactgctaagggagctggggcagggatcctttggaatggtgtacgagggaaatgcacgggacatcatcaagggcgaggccgagacacgcgtggcggtgaagacagtaaatgaaagcgcatcgctgcgggagcggatcgaatttctgaatgaagcttccgtaatgaaagggttcacatgccatcacgttgtgcggctgctgggcgtcgtatcgaaaggacagccaacgctggtggtgatggagctgatggcccacggggacctcaagagctacttgagatctttgagacctgaggctgaaaacaacccgggtcgcccacctcccacgctgcaggagatgattcagatggcagccgaaatcgcggacgggatggcctacctaaacgcaaaaaagtttgtgcacagggatctggcagctaggaactgtatggtagctcatgatttcacagtgaaaattggcgacttcgggatgacccgggacatctacgagacggactattatcgtaaaggagggaagggactgctgcctgtccggtggatggcgccagaatctctgaaagatggcgtgtttactacctcgtctgacatgtggtctttcggggtagttctgtgggaaatcacttccctggcagaacagccttatcaggggctgtccaatgagcaggtgcttaaatttgtcatggacggcggttatctggaccaacccgataattgccctgaacgggtcaccgatctgatgcgaatgtgctggcagtttaatcccaaaatgcgccctacgtttctggagatcgtaaatctcctgaaggacgatttgcacccctctttccccgaagtgtctttcttccatagcgaggaaaataaggcccctgaatctgaagaactggagatggagttcgaggatatggagaacgtgccccttgatagatcaagtcattgccagcgggaggaggcgggaggacgggacggaggttcatccttgggatttaagcgcagctacgaggaacatatcccttatacccacatgaatggcggtaagaagaatggtagaatcttgacattgccccgttccaatccctcgtag

SEQ ID NO: 226894 - DNA, 4113 bp, synthetic construct
  misc_feature 1..4113: note = Description of Artificial Sequence: Synthetic coding sequence
  source 1..4113: mol_type = other DNA
atggccacaggcggacgtcgcggagccgcagcagccccactgctcgtggctgtcgctgccctcctactgggagccgcaggacatttgtaccccggagaggtatgtccgggtatggatatcagaaacaatttgacccggttgcacgagctcgaaaactgttccgtgattgaagggcacctgcaaatcttgttaatgtttaagacgcgcccagaagacttccgcgacttgtcctttcctaagttaatcatgatcactgactatctattgctgtttagggtctatggattggaatccctcaaggatctgttccccaacctaacagtgatacgcggttcgaggctcttctttaactacgcccttgtcatctttgagatggtgcatctgaaggaactcgggttatacaacttgatgaatataacacgaggaagcgtgaggatcgagaaaaacaatgagctctgttacttggcaaccattgattggagccgcattttagactcagttgaggacaactatatcgtgctaaacaaagacgacaatgaggaatgcggggacatatgccctggaacagctaaggggaagactaactgcccagctaccgtgataaacgggcagttcgtggaacggtgctggactcacagccattgtcaaaaggtttgtcctacaatatgtaaatctcacggatgtactgcagagggcctgtgctgccacagtgaatgcttaggcaactgcagtcagccagacgaccctaccaagtgtgtggcatgccgaaacttctacttggacggaagatgtgtggaaacctgtccacctccttactatcacttccaagattggcggtgtgtcaatttcagcttttgtcaagacctgcaccacaagtgcaaaaactccaggagacaaggatgccaccaatatgtgatccacaataataaatgtatacccgaatgccccagcgggtataccatgaattcctcgaaccttttgtgcacaccctgcctggggccatgtcccaaggtttgtcatcttctcgaaggtgagaagactatcgattctgtgactagtgctcaggaactccgcggatgcactgtgattaatggatctctaattataaacataagagggggtaacaacttggctgccgagctggaggccaacctcggactaattgaggagatctctggctatctgaaaataaggagatcttatgctctggtgagcttgagcttttttaggaaattacgcctgataaggggcgaaactctggagattggaaactactccttctacgccctggacaatcagaatctccgccagctctgggactggagtaaacacaacctaacaatcacgcaaggtaaacttttttttcactataatcctaagctgtgcttatccgaaattcataagatggaagaggtgtccggtacaaagggacgtcaggagaggaatgacattgccctgaagaccaacggagatcaagccagttgcgagaatgaactcttaaagttcagctatattaggactagcttcgataaaatactattaagatgggagccctactggcctccagactttagggatttactcggtttcatgcttttttataaggaagcaccctatcagaacgttaccgagtttgacggccaagatgcctgcggatctaatagctggaccgtcgtggacattgacccaccgctccgaagtaacgatcccaaatcccaaaaccatcctggctggcttatgcgcggattgaagccttggactcagtacgccatcttcgtgaagaccctggtgactttctccgacgagaggaggacctatggggcaaagagcgacataatttatgtccagaccgacgccaccaatccaagcgtccccttagaccctatatcagtctcaaatagttccagtcagattattctgaaatggaagccaccctctgatccgaacggaaatattacacactacctggtcttctgggagcgtcaggccgaggacagcgaacttttcgaactggattactgcctgaaagggctgaagctgcccagcagaacttggtcccctcctttcgagagcgaggattctcaaaagcataatcaaagcgagtacgaagacagtgccggagagtgttgcagctgccctaaaaccgattcgcaaattctgaaggaacttgaagagagctctttccgaaagactttcgaggattaccttcacaatgtcgtttttgtacccagaccctctagaaagagacgctcccttggtgacgttggtaacgtgaccgtggccgtgcccacggtcgctgcattccccaacacatcttccacgtctgtgccaacgtcacccgaggaacataggccctttgaaaaagtggttaataaggaatctctcgtgatatcgggactgcgccacttcaccggttacaggattgaactccaggcctgtaaccaggatacaccagaggaacgttgttccgtagcagcctacgtgtcagctcggaccatgccagaggctaaagctgatgacattgtggggccagtgacccacgagatatttgagaacaatgtcgtccatcttatgtggcaggagcccaaggagcccaatggactcattgtgctttatgaggtttcttaccgcagatacggagatgaggagttgcatctctgcgttagtaggaaacacttcgctctggaacgaggctgccggctgcgcggtctgtctccagggaattactctgtgcggattcgggctactagcctggccggaaacggatcatggacagaacctacatatttttacgtcacagactatctggatgtgccctcaaacatcgctaaaataatcatcggccctctcatattcgtctttttattctccgtagtgatcggtagcatttatctatttctcaggaaaagacagcccgatggcccacttggccctctctatgcatcttcaaatcccgaatacctcagtgcttccgacgtgtttccgtgcagcgtatatgtccctgatgaatgggaggtttccagggaaaagatcacactacttcgcgagctaggccaagggtctttcggcatggtctatgagggcaatgcgagagacatcatcaagggagaagcggagacgcgcgtggctgtgaagaccgtgaacgaaagtgcatcattgagagaaagaatcgagttccttaacgaggcatccgtaatgaaagggttcacgtgtcaccatgtggtacgcctgttgggcgtagtgagtaagggccagcccactctggtagtgatggagttgatggcgcacggagatctcaagtcataccttcgaagtcttcggccagaggccgaaaacaatcctggcagaccccctcccacactgcaagaaatgatccagatggccgcagagatcgcagatggtatggcttacctcaacgccaagaagtttgttcatagggatcttgctgccagaaactgtatggtggctcatgatttcaccgtcaagattggagactttggcatgacacgcgacatttatgaaactgattattacaggaaaggaggaaagggactgctacccgttcgctggatggcacccgaatctctgaaggacggggtgtttaccacttcatctgatatgtggtcttttggggtagtgctctgggaaatcactagcctggcggaacaaccctatcagggattatccaatgagcaggtgttgaagttcgttatggatggaggatatttagaccaaccagacaactgccctgagcgagtgactgacctgatgagaatgtgttggcagttcaaccccaagatgcgaccgacatttctggaaatcgttaacctacttaaggacgacctacacccatctttcccggaagtgtcatttttccactctgaggagaacaaggcccctgaaagcgaagaactcgaaatggagttcgaagacatggaaaacgtacctctggacaggtccagtcattgccagcgggaggaggccggtggaagagatggtggcagttcactggggtttaagcgctcctatgaagagcatatcccctatacccacatgaacggaggcaagaagaacgggagaatcttaactctccctaggtcaaatccatcatag

SEQ ID NO: 226895 - DNA, 252 bp, synthetic construct
  misc_feature 1..252: note = Description of Artificial Sequence: Synthetic coding sequence
  source 1..252: mol_type = other DNA
ccatatcagaatgtcactgaatttgatggacaggatgcatgcgggagtaatagctggaccgtcgtggatattgacccacccttgcgcagtaacgatccaaaaagtcagaatcaccctggatggctaatgcgaggactgaaaccctggacccagtacgctattttcgttaaaacgttggtcacattttctgacgagagacgtacgtacggcgcaaaaagcgatattatttacgtacaaacagacgccacctag

SEQ ID NO: 226896 - DNA, 4017 bp, synthetic construct
  misc_feature 1..4017: note = Description of Artificial Sequence: Synthetic coding sequence
  source 1..4017: mol_type = other DNA
atggccagcccgccacgccacggaccaccaggcccagcatcaggcgacgggcctaatctcaataataataacaacaataataaccacagcgtccgcaaatgcggatacctgagaaaacagaaacacggtcataaaagattttttgttctccgtggccctggcgctggcggagatgaggccacggccggaggtgggagtgctcctcaaccccctcgattagaatactatgagagtgagaagaagtggcggtctaaggcgggagcacctaaaagagtgatcgcattagattgttgccttaatatcaacaaacgagcggatgcaaaacacaaatacctgattgccctgtatacaaaagatgaatactttgctgtcgcggctgagaatgagcaggagcaagaaggctggtatcgagcgcttacagatttagtgagcgaagggagggcagccgctggggacgccccacccgcagctgcccctgccgctagttgttcagcatcgttgcccggagcgctgggtgggtctgcgggagctgccggagccgaggacagctatggactagtggctccagccaccgctgcatatagagaggtctggcaagtcaatctgaaacctaaggggctgggacagtctaagaatctgacaggggtctaccggctgtgcctgtccgccaggaccatcggttttgtgaagctgaattgtgaacagcctagcgtgaccctccagctcatgaatattcgtcgatgcggacattccgattcattcttcttcattgaagtcggaaggagtgctgtcacgggtcccggagaactctggatgcaagcggatgactccgtggtggcccagaacatccatgaaacgatcttggaggcaatgaaagctctaaaggagctgttcgagttccgacccaggagtaaatctcagtcatctgggtcctctgctacacacccaatctccgtccccggagctaggcgacaccatcatttggttaacttacccccaagccaaacgggcttggttcgacgatcccgtactgactctttagccgcaaccccccctgcagcaaagtgctccagttgcagagtgaggactgcctccgaaggagatgggggagccgctgccggtgccgcagctgctggggcacgccctgtgtccgtggccggatcaccactgagtcccggaccggtgcgggcacctctgtcacgatcacacaccttgtcaggcggatgtggagggaggggttccaaagtggccttgttgcctgccggtggggcactccagcattctcgctcaatgtctatgccagttgcccactcacccccagcagctacaagcccgggatcactcagctcgagcagcgggcatgggtcaggtagctacccgccaccacctgggccacaccccccactgcctcacccattacaccacggtcctggccagcgcccttctagcggcagcgcttctgccagcggttcaccttccgacccaggattcatgtctctggatgagtatgggagctccccaggagacctgcgcgcattttgcagtcatcgatcgaatactcctgaaagtattgcagaaacccctcctgctcgcgatgggggtggcggaggagaattctatggatacatgaccatggatcgaccgcttagtcattgtggcaggtcttatcggagggttagcggagacgccgctcaagacctggacagaggcctgcgcaagaggacttactctcttactacccccgctagacaaaggccggtcccccagccatcatcggcctccctggacgagtataccttgatgagagctacctttagcggcagtgctggtcgcctgtgcccttcatgccccgcaagcagtccaaaagtagcctaccatccttatcctgaagactatggagatatcgaaattggtagccacaggtcctcttcatcgaaccttggagcggatgatggctacatgccaatgacccccggtgcggcactggccggatcgggctcaggcagctgtcgctccgacgactatatgcctatgagtccagcaagcgtgagcgcaccaaaacaaattctgcagccacgcgcagctgctgctgcggctgccgctgtgccatccgcgggaccagctggacctgcccctacgagtgcagcgggtagaaccttcccggcatccggcggaggatacaaagccagcagcccagcagagagcagccccgaggattctggatatatgcgcatgtggtgtggctctaagctttcgatggagcacgccgatggaaagctgctacccaacggggactatctaaatgtttctcctagtgacgctgtgacaacagggactccacccgattttttctctgccgctttgcatcccggaggggaaccactgcggggagtgcctggctgctgttactctagtttaccaaggtcctacaaggctccttatacatgtggcggtgacagcgaccagtatgttttgatgagctcccctgtcggcagaatcctggaagaagaacggctcgaaccccaggcgacccctggaccttcccaggctgccagtgcattcggtgccggaccaacccagccccctcacccagtcgttccatccccggtgagaccctctggcggacggccagagggcttcctcggtcagagggggagggcagtaagacctactaggttgtcccttgaaggcctgccaagcctcccctccatgcacgaatacccgcttcctcccgaacctaagagccccggtgagtatatcaatattgatttcggggaacccggagctcggttgagccccccagcaccaccgttgctggcaagtgctgcctcatcttcgagcctgctctctgcaagctcccctgcttcctcgctgggatccggaaccccgggtactagctctgactcacgccagcgctctccattgagtgactatatgaacctggacttcagcagccccaaaagccccaagccaggtgcgccatctggacaccctgtgggatcgctggatggcttactgagccccgaggccagctcaccctacccccctctgcctccaagaccttcagcctccccctcctcttcactccagccccctcccccacctcctgctcccggtgaactctatcggctcccgcctgcttccgctgtggccactgcccaagggcctggggcagcaagctcgttgtcaagcgacactggggataacggcgattacactgaaatggcctttggggtggcagcaactcctccacagcctattgctgcaccaccgaaaccagaggccgctagggtcgcctctcctactagcggggtgaaacggctctctctcatggagcaggtttcgggtgtagaagccttcctccaagcaagccaaccaccagacccccatagaggggctaaggtcattagggctgacccccagggcggacggagacggcatagctctgagacgtttagctcaacgaccactgtgactccagtgtcaccttctttcgcccataatcccaagcgccataacagtgccagtgtggaaaacgttagcctgcgtaagtccagcgagggcggagtgggcgtggggccaggcggtggagacgagccccctacttcgcctagacagctgcagcctgctccgcctttagctccgcagggccgtccctggacacctggacagccaggtggcctggtaggctgccctggaagcggcggatcgcctatgaggcgggagacttctgccggatttcagaatgggctgaactatattgctatagacgtgagggaggaacctggtctaccccctcaaccccaaccccctcccccacccttgccccagcccggtgacaagagttcgtggggtaggaccagatccttgggcggactgatctccgctgtgggggtgggttctacagggggagggtgcggcggtcccggtccaggagctttgccaccagcaaacacctatgcctccattgacttcttgagccaccatctcaaagaagcaacaatcgtcaaggaatag

SEQ ID NO: 226897 - DNA, 3894 bp, synthetic construct
  misc_feature 1..3894: note = Description of Artificial Sequence: Synthetic coding sequence
  source 1..3894: mol_type = other DNA
atggctgtaccgtccctgtggccttggggtgcctgtctgccggttatcttcttaagcctcggattcggtctcgacaccgtcgaggtctgcccctctctcgacattcggagcgaagtagcagaactgcggcagcttgagaattgctcagtcgttgagggacacctgcagatcctgcttatgtttacagcaacaggggaagatttccgtggactaagttttccaaggcttacgcaggtgaccgactacctgctgctgttcagggtgtacggactcgagtcactccgagatctatttcctaacttagcagtgatcaggggaacccgtctctttctgggatacgccttagtgatttttgaaatgccccacttgcgagacgtggcactccccgctctaggcgctgtgctgcggggtgctgtgagggtggagaaaaaccaggaactctgccacctctccacaatcgactggggtctcctacagccggctcctggcgctaatcacattgttgggaacaagctcggcgaggagtgcgcggatgtgtgtccaggagtgcttggggcagccggtgaaccctgtgcgaagacaaccttttccggacatacagattaccgctgctggactagttcccattgccagagggtttgcccatgcccacacggcatggcatgcacggcgcgaggggaatgttgccacactgagtgcctgggcggttgttcccagcctgaggacccaagggcctgtgtggcctgcaggcatctttactttcagggcgcatgcctatgggcttgccctcctggcacataccagtacgagagttggaggtgcgtaaccgctgaaagatgtgcatccctacacagcgtcccgggacgcgctagcacctttgggatacatcagggaagctgccttgcccagtgtccgagcggattcacccggaactctagctccatattttgccacaagtgtgaggggttatgtccgaaagaatgtaaggttgggaccaaaacgatcgacagcatccaagctgctcaggacctggttgggtgcacccatgtggagggttcgttgatcctgaacctgcgccaaggctataacctggaacctcagctccaacatagtctgggactggttgaaactattacgggctttttaaagattaaacattcttttgccctggtgtcactcggattcttcaagaacctgaaactaatccggggagacgctatggttgacggaaactatactttgtatgtgttggataatcagaaccttcagcagctggggagctgggtggcagcgggactgacaattcccgtggggaaaatttactttgcctttaatcctaggctttgtctcgaacatatctacagacttgaggaggtgacaggcactaggggcaggcagaataaggcggagatcaaccccagaactaatggcgatcgggctgcctgtcagactcgcacactccggtttgtttccaacgtgacagaagctgatcggatcttactcagatgggagcgttacgagcctttggaggccagagaccttttgtcctttatcgtctactacaaggagtcacctttccaaaacgctactgaacacgtgggccctgatgcttgcggcactcaaagctggaatctgctggatgtcgaactgcctctctcaaggacacaggagccaggcgttactttggcctccttgaagccctggacccagtacgcagtctttgtacgggctatcactttaacaacggaggaggatagcccccaccaaggagcccaatctcccatagtgtacctacggaccctgcctgctgccccaaccgtgccacaggacgttatttccacttctaatagttccagccatctgctagttcgatggaagccccctacccaacgcaacggaaatctcacatactatcttgtgttgtggcaacggctggctgaggatggggacctgtaccttaatgactactgtcacaggggattacgtctgcccacatcaaataatgaccctaggtttgatggtgaagacggcgacccggaggccgagatggagagtgactgctgcccctgccagcatccaccccctgggcaggtattgccccctttggaggctcaggaagcttctttccagaaaaagtttgagaacttcctccacaacgcgattacaatccccatcagtccatggaaagtcacatctatcaataaatcccctcaacgcgatagtgggaggcacagacgcgcagccggtcctcttaggcttggaggcaactcctctgacttcgaaatacaggaagataaagtgcccagggagagagcagtcctgagtggactccgccattttacagaatataggatagacatccacgcctgcaaccatgctgcgcacacagtgggctgctcagcagctacttttgtcttcgctcgcacaatgccacaccgggaggccgacggcatcccaggcaaggtggcctgggaggcctcctcaaaaaactcagtgctccttaggtggctggagcctcctgaccctaatgggctaatcctcaagtacgaaattaaataccgtagactgggggaagaggccacggtgctgtgtgttagtcgactgcggtatgcaaaattcgggggtgtgcacctagctctacttcctcctgggaactattctgcgagagtcagggctacatcgctggctgggaatgggtcctggacagattctgttgcattctatatcctgggtcccgaggaagaggatgctggcggactccacgtgctgctaaccgccacccctgtaggcctgaccttgttgatcgtgcttgctgcattgggctttttctacggcaagaagaggaatcgcaccctttatgcgtcagtgaacccagagtatttttcagcctccgacatgtatgtcccagatgagtgggaagtgcccagagagcagatttctattatcagggaactggggcagggatcattcggaatggtgtacgaaggtttggccagggggttggaagcgggtgaagagtcaacaccagtggctcttaagacagttaatgaactggctagtccaagagagtgtatcgagttcctgaaggaagcttccgtcatgaaggcctttaaatgtcatcacgtggtccggcttcttggagtggtttcccagggacagcccacacttgtcatcatggagctgatgacccgtggagatctgaagtctcacctgagaagcttaaggccggaggccgagaacaaccctggcctgccccagcctgcactaggggaaatgattcagatggcgggagagatcgccgatggcatggcctacctggctgccaataagttcgtgcatcgcgacctggcggcacggaactgcatggtaagccaggactttacagtgaaaatcggagatttcgggatgacccgggacgtgtacgagactgactattacagaaagggcggtaaagggcttctgcccgtgagatggatggcccctgagtctctgaaagacggaatctttacaacacacagtgacgtgtggtcttttggcgtcgtgctgtgggagatcgtgacactggctgagcagccgtatcagggcttaagcaacgaacaggtgctcaaatttgttatggacggtggagtcctcgaagaactggaaggctgcccacttcagctgcaagaactgatgagccgctgttggcagcctaatcccagactccggccatccttcactcatattttagattccatccaggaggagctgcgcccttccttcagactgctttccttttattattctcctgagtgccgcggtgcccgaggcagcctaccaactactgacgcggagcctgatagcagcccgaccccgagagactgttccccacagaacggagggccagggcattag

SEQ ID NO: 226898 - DNA, 3060 bp, synthetic construct
  misc_feature 1..3060: note = Description of Artificial Sequence: Synthetic coding sequence
  source 1..3060: mol_type = other DNA
atgcgctaccgcctggcttggctgctgcatcctgccctgccatccactttcaggtcagtgctcggggctcgactccctccccctgagcgattgtgcggatttcagaagaaaacatattccaagatgaacaatcccgcaatcaaaagaattggcaaccacattactaagtcacccgaagacaagcgcgaatacagaggcctcgagcttgccaatggaattaaagtgctcttaattagtgaccccacaaccgataaatctagcgcggcactcgacgtccatataggatcgcttagcgatcctcccaacattgctggactcagtcacttttgcgaacacatgctgttcctggggaccaaaaaatatcctaaagagaacgaatactcccagttcctgtcagaacatgcaggcagcagtaacgcattcacgtccggggagcacaccaactattattttgatgtttcccatgagcacctcgaaggcgcattagatcgattcgctcagttttttctgtgcccgttgttcgatgagagctgcaaagacagggaggtaaatgccgtggatagcgagcatgaaaaaaacgtgatgaatgatgcctggcgtctcttccagttggagaaagctactggcaacccgaaacatccattttcaaagttcggcaccggaaacaaatatactctcgaaacacgcccaaatcaggagggcatcgatgtgagacaggagctgctgaaattccattccgcttactactccagtaatctgatggccgtgtgtgtgttggggagggaatcgctcgacgatctgacaaatctggtcgtcaagcttttttccgaggttgagaacaaaaatgtgcccttgcctgagttcccagagcatccctttcaggaagagcacctgaagcaattgtacaagattgttccaatcaaggatatcagaaatctgtatgtcaccttccccattccggacctccagaaatactacaaaagcaacccaggccattacctcggtcacttgatcgggcacgagggtcctggtagtctcctgtcagaacttaagagtaaaggttgggttaatactctcgtcggaggtcaaaaagaaggggcaaggggtttcatgttttttattattaatgtggacctcaccgaggaaggcttactccacgtggaggacattatcttacacatgttccaatacatccagaagcttagggccgagggacctcaggaatgggtgttccaggagtgtaaggatttaaacgccgtggccttccgtttcaaggacaaagagcgtcctcgcggttacacaagcaagatcgctggcatccttcattattacccactcgaagaggtcctgaccgccgagtacctgctggaagaatttcgcccagacctaattgagatggtgctcgataagttaagacccgaaaacgtgcgtgtggcaattgtgtctaaatcttttgagggaaagacagaccgaactgaagagtggtacggcacccaatataagcaggaagccatccctgacgaggtcattaaaaagtggcaaaatgccgatctaaatggcaaatttaaactgcccactaaaaatgagtttatccctaccaactttgaaattctgcctctggagaaagaggctacaccctaccctgcactaatcaaagacaccgcaatgtcaaaactctggttcaagcaggacgacaagttttttctccccaaggcttgcctaaatttcgaattctttagccctttcgcttacgtggatcctctgcattgcaacatggcctacctgtatctagaactcctcaaggattcactgaatgaatatgcatatgcagccgaactggccggactgagctatgatctgcaaaatacgatctatgggatgtaccttagcgtgaagggctacaatgacaaacaacctatactgttaaaaaagataatcgagaaaatggctacgttcgaaatcgacgagaaacgcttcgagataatcaaggaagcatacatgcggtctctgaacaattttagggccgaacaaccccatcaacacgccatgtattacctacggctgctgatgacggaggttgcttggacaaaggatgagttgaaggaggccctggatgacgtgacccttccaagattaaaagctttcatcccccaactgctgagccggttgcatatcgaagccctgctgcatggtaacatcacaaagcaagctgcgctcgggatcatgcaaatggtggaagatacccttatcgaacacgctcatactaaacctctcttgcctagccagctggtgagatatcgcgaagtccagttaccagatagggggtggttcgtttatcaacagaggaacgaggttcacaacaactgtggcatagagatttactaccagacagatatgcagtccactagcgagaatatgttcttggagctcttctgtcagatcatctccgagccctgtttcaacactctgaggacgaaggagcaactgggatatatcgtgttctcagggccaagacgtgctaatgggatccaaggccttaggttcattatccagtctgagaagccccctcattatctggaatcgagggtggaggccttcctgattacgatggaaaagagcatcgaagatatgacggaagaggcttttcagaagcacatccaggctctcgctatccgtaggctggacaaaccaaaaaagctgtccgctgaatgcgctaagtattggggtgaaattattagccaacaatacaattttgatagggacaacaccgaagtggcatatctgaaaacactgacaaaggaggatataatcaagttctacaaagaaatgcttgcagtcgacgccccacgaaggcacaaagtttcagtccacgtgctggccagagaaatggattcctgtccggtggtgggcgagtttccatgtcagaatgacatcaacctcagccaagcacccgcactccctcaacctgaggtgatccagaacatgacagagttcaaacgcggtctgccgttgttccccctcgttaaaccacatattaactttatggctgcaaaactatag

SEQ ID NO: 226899 - DNA, 1395 bp, synthetic construct
  misc_feature 1..1395: note = Description of Artificial Sequence: Synthetic coding sequence
  source 1..1395: mol_type = other DNA
atgtctaagctgtggttcaagcaggatgacaagttctttttgcccaaagcctgtctcaactttgaatttttctcaccttttgcctatgtggaccctctacactgtaatatggcgtacttgtatcttgaactcctcaaagattccctgaatgagtatgcatatgccgctgaattggcaggcctatcctatgatctgcagaacaccatctatggtatgtatctcagtgttaaaggatacaatgataaacagcctattctgctgaagaaaataattgagaagatggcaactttcgaaatcgatgagaaacgattcgaaataattaaagaagcctacatgcgctctctgaacaacttccgagccgagcagccacatcagcacgctatgtattacttgaggctgctcatgacggaggtggcgtggaccaaggacgaactgaaggaggcactggacgacgttacattgcctcgccttaaggcatttatcccccagcttttatctcgccttcacattgaggcactcctgcacggcaacatcaccaagcaggcggcactgggcatcatgcagatggttgaagacactctgattgaacacgcgcataccaagcccttgctcccctctcagttagtgaggtaccgcgaggtgcagctgcctgatcgcggatggttcgtgtaccaacaaagaaatgaggtgcacaataactgcggaatcgaaatttactatcaaacagatatgcagagcacgagcgagaacatgtttctggagctgttttgtcagataatctccgagccttgtttcaatactctccgcactaaagagcagctcgggtacattgtgttttccggacccaggcgggctaatggcatccaaggtcttcggtttattatccagagcgaaaagccaccacattacctggagagccgtgttgaggcgttcctcattaccatggagaaatctattgaagacatgacagaggaggcgtttcagaaacatatccaggcgctcgccatccgaaggcttgataaaccgaagaagctttcagctgaatgcgccaagtactggggagaaattatttctcaacaatacaacttcgaccgagacaacactgaggtggcctacctgaagactcttacgaaagaagatattatcaagttctacaaggagatgctggccgtagacgcccctcggaggcataaagtgtccgtgcacgtgctcgccagggagatggattcttgccctgtagtgggagaattcccctgccagaatgacatcaacttgagccaggcgcctgccttgccccagcctgaagtcattcagaacatgaccgaattcaaacgtggcttgcctctattcccacttgtgaagccacatataaactttatggcagccaagttatag

SEQ ID NO: 226900 - DNA, 774 bp, synthetic construct
  misc_feature 1..774: note = Description of Artificial Sequence: Synthetic coding sequence
  source 1..774: mol_type = other DNA
gagttcattatacgtgggggtcgcgtgccctctcactgtttgcatttcagccggagctttcagaagaagacatattccaaaatgaataaccccgctatcaagcggataggtaatcacattacaaagtctcccgaagacaaacgcgagtatcggggacttgaacttgccaacgggattaaggtgctgttaataagcgatcctactactgacaagtcatccgccgcactggacgtccatatcggatctttgtccgacccccctaatattgctggcttatcccatttctgtgaacacatgttgttcctgggaacgaagaaataccctaaagagaatgaatactcacagttcctatccgaacatgccggaagtagcaacgcgtttactagcggtgagcacacaaattactacttcgatgtctcacatgagcatctggaaggcgcacttgataggtttgcccagttcttcctgtgccccctcttcgacgaaagttgcaaagacagagaagtgaatgccgttgattctgagcatgagaaaaatgtcatgaatgacgcatggcgattgtttcagctcgagaaagccacagggaacccaaaacaccccttcagcaagttcggaactgggaacaaatataccctcgagacccgccctaaccaggagggcattgacgtgcggcaggagctattaaaattccactccgcatattacagcagtaatcttatggccgtgtgtgtcctaggccgagaatcactggatgatttgacgaacctcgtgtag

SEQ ID NO: 226901 - DNA, 396 bp, synthetic construct
  misc_feature 1..396: note = Description of Artificial Sequence: Synthetic coding sequence
  source 1..396: mol_type = other DNA
atggaccccaggttgcccgcatgggcactggtccttctgggtcccgcattggtgttcgcactggggcctgctccgaccccagagatgagagaaaagctgtgtggacaccattttgtacgggctctggttcgggtctgtgggggtccccgatggagtacagaggcacgacgccctgcgactggcggagacagggagctgctccagtggctcgagcgaaggcacctgctgcacgggttggtggcagactccaatttgacccttggtcctgggttgcaaccacttccccagacctctcatcaccaccgccaccaccgagctgcagccactaaccccgcacggtactgctgtctgtccgggtgcactcaacaggatctgctgactctgtgtccctattag

SEQ ID NO: 226902 - DNA, 474 bp, synthetic construct
  misc_feature 1..474: note = Description of Artificial Sequence: Synthetic coding sequence
  source 1..474: mol_type = other DNA
atggatccgaggctgcctgcttgggcattagtcctgctgggcccagcgctagtgttcgccttgggacccgcacctactcctgagatgagggagaaactgtgtggacatcattttgtgcgcgcactcgtcagggtctgtggcggacccaggtggtcgactgaagcaaggcgcccagcaactggaggtgatcagagagagagtcacagcgtgtcccaagcagggctcaagctgctgtcatcttccaatcctcctacgctcacatttcaaagcgttggaatctccgatgtatcctgttactctgggtggcgggatgacatctgctccatgggctggtggcccacagtcatatcccgctgggatctggcctgcagcccatgccctcgtccactgaccatcactgcaactacggtacagctgcccccaacactgcacgccaccgccgcttccgttgccgtccccaataaaacttgttag

SEQ ID NO: 226903 - DNA, 420 bp, synthetic construct
  misc_feature 1..420: note = Description of Artificial Sequence: Synthetic coding sequence
  source 1..420: mol_type = other DNA
atggctagtttgtttaggtcctaccttccagcaatatggctccttctgtctcagttgctgcgcgagagcctagccgcagaactcagagggtgcgggccaagatttgggaagcacctgttgtcctattgtccaatgcctgagaaaactttcaccaccacacctgggggatggttattggagagtggccgacctaaagagatggtgtccacctccaacaataaagatggacaggctttgggcacgacctccgaattcatcccgaatcttagccccgaactcaaaaagccgctgtcagaaggacagcccagccttaaaaaaattatcctcagccgcaagaagcggtctgggaggcacaggttcgaccctttctgctgtgaggtaatctgcgacgatggcaccagcgtgaagctgtgcacctag

SEQ ID NO: 226904 - DNA, 408 bp, synthetic construct
  misc_feature 1..408: note = Description of Artificial Sequence: Synthetic coding sequence
  source 1..408: mol_type = other DNA
atgaaaggcagtatctttacactcttcttgttttcggtgctcttcgccattagtgaggttcggtcgaaggagagcgtcagactgtgtggcctcgagtacatccgtacagtgatttacatatgcgccagttcgcggtggagaaggcaccaagaaggcatcccccaggctcagcaggccgaaaccggcaattccttccagcttcctcataaacgggagtttagcgaggaaaacccagcgcagaacctcccaaaggtggatgcgagcggtgaagatcgtctttggggtggtcagatgccaaccgaggagttgtggaaaagcaagaaacactctgtaatgagcagacaggacctgcaaacactatgctgtactgatgggtgcagcatgacagatctgtccgctctgtgttag

SEQ ID NO: 226905 - DNA, 642 bp, synthetic construct
  misc_feature 1..642: note = Description of Artificial Sequence: Synthetic coding sequence
  source 1..642: mol_type = other DNA
atgccacggctactcaggctttcgttactgtggctgggccttttgctagtccggttttctagggagctgagtgacatcagttctgcccgaaagttgtgcgggaggtatctggtgaaggaaattgaaaaactttgcgggcacgctaattggtctcagttcagattcgaggaggagacgcccttctcgcgcctgattgcccaggcctcagagaaggtagaagcctattcaccgtatcagtttgagtctccccaaaccgcctccccggctcgcggacgcggaacaaatccagtctccacctcctgggaagaagcagttaactcttgggagatgcagagtttgcccgaatacaaagataagaaaggctactcacccttgggcaagactcgagagttcagctccagtcacaatatcaacgtgtacattcacgagaatgcaaagttccaaaagaaacgacgaaataaaattaagactcttagcaatctcttctgggggcaccatcctcaacgaaagagacggggttattcagagaagtgttgcctgaccgggtgtacaaaggaggaactttcgatcgcatgcctaccgtacatcgacttcaagcgattgaaggagaaaaggtctagcctggtcaccaagatctactag

SEQ ID NO: 226906 - DNA, 1734 bp, synthetic construct
  misc_feature 1..1734: note = Description of Artificial Sequence: Synthetic coding sequence
  source 1..1734: mol_type = other DNA
atgaataagctatatatcggaaacctgaatgaatctgtcactccggctgatctagaaaaagtgttcgcagaacataaaattagttacagcgggcagtttctcgtcaagtctggatatgcgtttgtggattgcccagatgaacactgggcaatgaaagctattgagacattcagtggcaaggtcgagctccagggtaaacgcttagagatagaacatagtgttcccaagaagcagcggagccgcaagatacagattcggaacatacccccacagcttcgatgggaggtgctggatagcctcctcgcgcagtacgggacagtggagaattgtgaacaggttaacaccgagagcgaaacagctgtggttaatgtgacatatagcaaccgagagcagacacgccaggcaattatgaagcttaacggacatcagctggaaaatcacgctctgaaagtctcctacatcccagacgagcagattgctcaaggcccagaaaacggtagacggggaggctttggcagtcgcggacagcctagacaagggagcccagtggccgcaggtgcgcctgcaaaacaacagcaagtcgatattcctctgcggctgcttgtccctactcagtacgtgggggctatcataggcaaggagggcgcaacaatcagaaatatcaccaaacagacgcagagcaaaattgacgtacaccgcaaggagaacgccggtgcagccgaaaaggccattagcgtgcactctacgcccgagggttgttcttctgcatgcaagatgattctagagataatgcacaaagaggcaaaggacacaaaaacagccgacgaagttcctctgaaaatcctggcacacaacaactttgtaggacgacttatcggaaaggagggcagaaatctaaaaaaagtggagcaggatactgaaaccaaaatcaccatttcctctctgcaggacctcaccctctacaaccctgagcggaccattacggtaaaaggtgccattgagaactgttgccgagccgaacaggaaattatgaaaaaggtgcgcgaggcatacgaaaacgacgttgcggctatgagtctgcagagccatttgattcctggtctgaacctcgctgccgtcggactgttccctgcaagcagctccgccgtgcctcctcctccttcgagcgttactggggcagccccttactcatctttcatgcaggcacctgaacaggagatggtccaggtcttcatccccgcacaggccgtcggtgctatcataggcaagaagggccagcacattaagcagctgtcacggtttgccagcgcttcaatcaagattgccccacctgagacgcccgactccaaggtgcgcatggttattatcacggggcctccagaagctcagtttaaagcacagggcagaatttatgggaaactgaaagaagaaaattttttcgggccaaaggaagaggtgaagctggagacgcacatcagggtgcccgcttccgcagcaggcagggtgattggaaagggagggaagaccgtgaacgaactccagaacctcacggcagccgaagtggtcgtcccacgggaccaaactccagacgagaacgatcaggtgattgtcaagattattggccacttttacgcttcccagatggcacagcgtaagattcgcgatatcctcgcacaggtcaaacagcagcaccagaagggtcagagtaaccaggctcaagcacgtcgaaaatag

SEQ ID NO: 226907 - DNA, 1317 bp, synthetic construct
  misc_feature 1..1317: note = Description of Artificial Sequence: Synthetic coding sequence
  source 1..1317: mol_type = other DNA
atgaacaagctctacatcggaaacctgaatgagtcagtcaccccagccgatttggagaaggtttttgcagagcacaaaatttcttatagcggtcagttcctggttaaatcaggctacgcctttgtggattgccccgatgagcattgggcaatgaaagcaatagagacgttttctggaaaggtggagcttcagggaaaaagactggagattgagcacagtgtccccaagaagcagcgctcgcgaaaaatccagattagaaatattccaccacaattgagatgggaggtgctcgactcattgctcgctcaatatggcacagttgaaaactgcgagcaggtgaatactgaatctgagacagcagttgttaatgtaacctacagtaatcgggagcagacgaggcaggcggacgaagtacctttgaaaattctggcccataacaactttgtcgggaggctgattggcaaagagggaaggaacctgaagaaggtggaacaggacaccgagaccaaaataaccatctctagtctgcaggatcttactctgtataacccggagcggaccattacagtcaaaggcgcaatcgaaaattgctgccgcgcagagcaagaaatcatgaaaaaggttagagaggcctacgagaatgacgtagccgctatgtccctgcagtcacacttgatcccagggctcaaccttgctgcagtggggctgttcccagcaagttcctctgccgttcctccccctccaagctcagtaacgggcgcagccccatacagttcctttatgcaggccccagaacaagaaatggtccaggtgttcatacctgcccaggcagtaggtgctataatcggtaaaaaggggcagcacattaagcagctctccagatttgcgtctgcctccatcaagatcgcccctccagagacaccggactctaaggtccgcatggtcatcattaccggaccccctgaagcccaattcaaggcccagggacgaatctacggaaagcttaaggaagaaaacttttttggccctaaggaggaggttaagttagagactcacatccgggtcccggcatcagccgcaggaagggtcatcgggaaagggggtaaaaccgtgaatgagctacaaaacttgactgcggcagaagtggtcgtgccacgcgaccagacacccgatgaaaatgaccaggtcatcgtgaagatcattggccatttctatgccagtcagatggcacagagaaaaataagagacattctggctcaggtgaaacagcagcaccagaagggccagagcaaccaggctcaggccagaagaaaatag

SEQ ID NO: 226908 - DNA, 1671 bp, synthetic construct
  misc_feature 1..1671: note = Description of Artificial Sequence: Synthetic coding sequence
  source 1..1671: mol_type = other DNA
atgatgaacaagctgtatatcgggaacctgagccctgctgtgactgcagacgatcttcgccagctgtttggggatagaaaactgcctctggccggacaagtgttgctaaaatctggctacgcatttgtagactaccccgaccagaactgggctattagggccatcgagaccttgtcggggaaagtggaactgcatggcaagattatggaggtcgactattcagtctccaaaaagctccgtagccgaaagatacagatccgcaacattcctccccatttacagtgggaagtgctggacggcttgctggcacagtacggcacagtggaaaatgtggagcaggttaacaccgacaccgagacagcggtggtcaatgtgacgtatgcaacacgcgaggaggccaagatagccatggagaaattgtcaggccatcagttcgaaaactattctttcaagatttcgtacatcccagacgaggaggtgtcttcaccatctccaccccagcgggcacaaaggggcgatcattccagccgagagcagggccacgctccgggagggaccagtcaggctcgccagatcgatttccccctgcgtattttggtccctactcagtttgtaggcgctatcataggtaaggaaggtcttactataaagaatatcactaagcagacccaatctcgcgtagatatacatcggaaggagaacagcggcgctgctgagaaaccagttactattcacgctacacccgaaggcacttcagaagcctgtcgtatgatcctggaaataatgcaaaaggaggctgatgaaacgaaactagcagaagagattcccctgaaaatcctagctcacaacggtctggtcgggagattgatcggaaaagagggcaggaatctcaagaaaattgaacatgagaccggcactaaaatcactataagctcgctccaagacctgtccatctataatcctgagcggacaatcacagtgaagggaacagtcgaggcgtgtgcctctgctgaaatcgagatcatgaaaaagctgagagaggcttttgagaacgacatgctggccgtcaatacacatagcggctacttttcaagtctttatccacaccaccaattcgggccattcccccatcatcacagttatcccgaacaggagatagtgaacctgttcattccgacccaggctgtgggtgcgatcatagggaagaaaggggcacacatcaagcagctggctaggttcgccggagctagcatcaaaatcgcacccgcagaggggccagatgtgagcgagcggatggttatcattaccggacctcccgaggctcagtttaaagcacaggggagaattttcggcaagcttaaggaagagaactttttcaatcctaaggaagaggtgaaactcgaagctcacatcagagtgccctccagtaccgcaggacgggtgatcggcaagggtggtaagacagttaatgagcttcagaacctgaccagtgcagaagtgatcgtgcctcgggaccagacccctgatgaaaacgaggaggtgatagtgcggatcattgggcatttttttgcaagccaaacagctcaaaggaagatccgtgaaatcgtgcagcaagtgaagcagcaggaacagaagtaccctcagggagtggcttcccaaagatcaaagtag

SEQ ID NO: 226909 - DNA, 1800 bp, synthetic construct
  misc_feature 1..1800: note = Description of Artificial Sequence: Synthetic coding sequence
  source 1..1800: mol_type = other DNA
atgatgaataagctctacatcgggaacctgtcacccgcagtgacagcagatgatttgcggcagctgtttggagacaggaaacttccgctggccggacaggtactgctcaaatctggttacgcctttgtggattacccagatcaaaactgggctatacgagcaatagaaactctatccgggaaggtggaactgcacgggaagatcatggaggtggactattcagtgtctaagaaattacggagtcggaagatccagatccggaatataccaccccaccttcaatgggaagtactggacggcctgcttgcccaatacggaaccgtggagaacgttgagcaggtgaatacggataccgaaaccgctgtcgttaacgtcacctacgcaacccgcgaagaggctaaaatcgccatggagaagcttagtggacaccaattcgaaaattatagtttcaagatttcctacatacctgacgaggaggtgagtagtcctagcccaccacagcgagcacagcgtggcgatcattcttcgagagagcagggacatgctcccggtggtacctcacaggccaggcaaatagacttccccctgcggattctggtacctactcagtttgtgggggcaatcattgggaaagaaggcctgacaattaagaatatcaccaagcagactcagtctcgtgtggacatacatcggaaggagaacagcggcgctgccgagaagccagtgactattcatgctacccccgaagggactagcgaagcctgtcgtatgattctagaaatcatgcaaaaggaagctgatgagacgaagctggcagaggaaatcccactgaaaattctggcacacaacggtctggtcggacgcctgatcgggaaagagggccgaaacctgaagaagattgagcacgaaacgggaactaaaatcacaattagcagtctccaagatctatcaatctataacccagagcggacaattactgtgaaggggaccgtcgaagcatgtgcttccgccgagattgaaatcatgaagaagctcagggaggcttttgagaatgacatgctcgccgtgaatcaacaagccaacttgattccgggtcttaacctgtcggccctcgggattttctctacaggactcagcgtcctctcaccccctgcgggaccacgcggagcacctccagcagcgccttaccatccctttacaacgcactccggctacttctcatcactttaccctcaccatcagttcgggcctttcccacatcatcattcttatcctgagcaagagattgtgaatctctttatccctacacaggccgtgggcgctattatcggcaaaaagggggctcacatcaaacagttggccagatttgcaggcgcatcaattaagattgcacctgctgagggcccagatgtatccgagcggatggtaatcattactggacccccagaggcacagtttaaggctcagggtaggatcttcggaaaattgaaagaggaaaatttctttaatcccaaagaagaagtgaagctggaggcacatatcagggtacccagctctacagctgggagagtgattggtaagggaggcaagactgttaacgaattgcagaatctgacctcagctgaggtgattgttccgagggaccagacccctgacgaaaatgaagaggtcattgtccggattataggacacttttttgcctcgcaaaccgctcaaagaaaaatacgtgaaatagttcagcaggtcaagcagcaggaacagaaatacccacagggtgtagcaagtcaacgtagcaagtag

SEQ ID NO: 226910 - DNA, 1629 bp, synthetic construct
  misc_feature 1..1629: note = Description of Artificial Sequence: Synthetic coding sequence
  source 1..1629: mol_type = other DNA
atgtttagttgtcctggacactatcatgtggatgggttcctgaatcctggcagtcggaagatccagattcgcaacattcctccccacctgcaatgggaggtgctcgatggcctcctggcccagtacggcacagtggagaatgttgaacaggttttcgcctttagcctggtgaataccgataccgaaacagctgtcgtgaatgtcacctatgctacccgggaggaagctaaaattgccatggagaaactgtcggggcatcagtttgaaaactacagctttaagatctcatatatcccagatgaggaggtgtcgagcccaagccctccacagcgtgctcagagaggcgaccactcatcccgtgaacaggggcatgcccctgggggtacgagccaggcacgccagattgacttccccttgaggatcttggttcccactcaattcgtgggcgcaatcatcggcaaggaggggcttacgatcaaaaacattacaaaacaaacacaatccagagtagacattcaccggaaggaaaatagtggagcagccgagaagcccgttactattcacgccaccccagaaggcacgtctgaggcttgccgtatgatcctcgagattatgcaaaaggaggccgatgagactaagctggccgaggagatccccctgaaaattctggcgcataacggcttggttggtcggctgatcggcaaggaagggagaaacctgaagaaaatcgagcatgaaacaggcactaagattactatttcctctcttcaggatctcagtatttacaatccagaaagaactatcactgtgaaagggaccgtggaggcctgtgcatccgccgagattgagatcatgaaaaaactcagggaggccttcgagaacgacatgcttgctgtcaatcagcaagctaacctcattcctggcctgaatctgagcgcgctggggatattctctacaggcctttctgtcttgagcccacctgcaggcccaagaggcgcacccccagccgcaccctatcaccctttcacaacacattcaggctacttctcatctctgtacccccaccatcagtttggaccgttcccgcaccatcattcttacccagaacaggaaatcgtgaatctcttcattcccacccaggctgtcggagctataattggcaagaagggcgctcacattaagcagctggcacgctttgcgggtgccagtattaagatcgctcctgcagagggaccagacgtctccgaaaggatggtgatcatcaccgggccaccagaggctcagtttaaggctcagggcaggatcttcgggaaactgaaggaagagaacttttttaatcctaaagaggaggtgaagctggaagcacatatcagagttccatcttccaccgccggacgtgtgattggcaagggtggtaagaccgtgaacgaacttcagaatttgactagtgctgaggtgatcgtccccagagaccagacaccagatgagaatgaggaggtgatcgttaggattataggtcatttttttgcctcccaaactgcccaacgtaaaattagggaaatcgtgcagcaggttaagcagcaagagcagaaatacccgcagggtgtggccagccaaaggagcaagtag

SEQ ID NO: 226911 - DNA, 1740 bp, synthetic construct
  misc_feature 1..1740: note = Description of Artificial Sequence: Synthetic coding sequence
  source 1..1740: mol_type = other DNA
atgaacaagctgtacatagggaatctttcagaaaacgccgctcctagcgatctggagagcattttcaaggacgcgaagattccggtttcagggccatttttggtcaaaacaggatatgctttcgtggattgtcccgatgaaagctgggccctgaaggcaatagaagccctttctggcaaaatagaactgcatgggaaacctattgaagtcgaacacagtgtgcccaaacgacaacgcatccggaaactgcaaataagaaatatcccccctcaccttcagtgggaagtcctggacagcctgctggtgcaatacggggtcgtggagtcgtgcgagcaggttaatacagactccgaaacagctgtcgttaatgtgacatattcatcaaaagaccaggcacgccaggcactggacaaactgaatggattccagcttgaaaatttcactctgaaagtggcttatatacccgatgagatggcggcacagcagaatccgctgcagcaaccgagggggagacgaggtctggggcagcggggaagcagtcggcaggggtcccctggcagtgtaagcaagcagaagccctgtgatcttcccctgcggctactcgtccccactcagtttgtcggagccataatcggcaaagagggggctacaataagaaatataactaaacagactcagagcaagattgatgtacaccggaaagaaaacgccggagcagccgaaaagtcaattactatcctaagcacacccgaggggaccagcgcagcatgtaagtctatcttggagattatgcacaaggaagctcaagatataaaatttacggaagagatcccactcaagatcttggctcacaacaatttcgtaggccgtcttatcggaaaagagggtcggaatctcaagaagatcgaacaggacactgatacgaagattacgatctctcccctgcaggaactgactctttacaaccccgagcgtaccatcactgtaaagggtaatgtggagacttgcgctaaggctgaggaggagattatgaagaaaatcagagaatcctacgagaacgacatcgccagcatgaacctccaagcacacctaatcccaggcctaaatctgaacgcactgggcctgttcccaccaacctcaggcatgccgccaccaactagtgggccacccagtgctatgacgcccccttatcctcagtttgagcaaagcgaaaccgagaccgtgcaccttttcatcccggcactgtctgtaggcgctatcatcggaaagcagggccagcacatcaagcaactctctcgatttgccggtgcgagtataaagatcgcccctgccgaggcacccgacgctaaagtcaggatggtaatcattactgggcctccggaagcccagtttaaagcccagggacggatctatgggaaaatcaaggaggaaaatttcgtatcacctaaagaggaggtcaaactcgaggctcatattagggtacccagcttcgcagcaggcagggtcatcggaaaaggcggaaagactgttaacgagcttcagaatctatctagcgctgaagtggtggtccctcgagatcagacacccgacgagaatgatcaggtggtcgtgaagatcacagggcatttctacgcctgtcaagtcgctcagaggaagatacaagagatcctgacacaggtgaaacaacaccagcaacaaaaggcccttcaatccggtcctcctcagtcgagacggaagtag

SEQ ID NO: 226912 - DNA, 7475 bp, synthetic construct
  misc_feature 1..7475: note = Description of Artificial Sequence: Synthetic coding sequence
  source 1..7475: mol_type = other DNA
atgggtgccgctgccggacgttccccacacctggggcctgcaccagctaggaggccccaacgtagtctgttactgctacaattactgctgttggtcgccgcaccgggtagtacacaggcccaggcagccccatttcccgagctgtgtagttatacctgggaggccgtggacactaaaaacaatgttctgtacaagattaatatctgcggatccgttgacattgtccaatgcggaccatctagtgccgtttgcatgcacgacctgaagacacgcacttaccacagcgtcggtgactccgtcctgagaagtgccacacgctctctgctggagtttaatactaccgttagttgtgatcagcaggggacaaaccacagagtccagtcttctatcgctttcctgtgcggcaaaaccctgggaacacctgagttcgtgacggctaccgaatgcgttcattacttcgaatggagaacaaccgctgcatgcaaaaaggacatctttaaggcaaataaggaagtgccctgttacgtctttgatgaggagcttcgcaaacacgacctcaaccctctgattaaacttagcggcgcatacctggtcgatgatagtgatccggatacaagcctttttatcaatgtctgccgagatattgacacacttcgcgacccgggaagtcaactgcgggcatgtcccccagggaccgccgcatgtctggtcagggggcaccaggcctttgacgtcggacagccacgcgatgggttgaagctggtcagaaaggatagactggtgctctcatatgtccgtgaagaggctggtaagttggacttctgcgacgggcactcccccgcagtgactattacttttgtctgccctagcgagcgtcgagaaggtaccattcccaagctaacagcaaagagtaactgccggtacgagatcgaatggattacagagtacgcctgtcacagggactaccttgaatcgaagacgtgctctctgtcaggcgagcagcaagacgtttcaattgatcttacaccccttgcacagagtggcggttcttcctacatctccgacggcaaggagtatttattttacttaaacgtgtgtggggagaccgaaatacagttttgtaacaagaaacaagccgctgtgtgccaggtgaagaagtcagatactagccaggtaaaggccgcaggtagatatcacaaccagaccctgaggtacagtgatggggaccttaccctgatttatttcggaggtgatgaatgtagcagcgggtttcagagaatgagcgtgatcaatttcgagtgcaacaaaacagcaggcaatgacggcaagggcacaccagtttttaccggcgaggtcgactgcacatatttttttacgtgggatacggaatatgcatgcgtgaaggagaaggaagatcttctctgcggcgctaccgacggaaagaagcgctacgatctcagtgccctggtgcgccacgcggagccagagcagaactgggaagccgtcgatggcagtcaaaccgaaaccgagaaaaagcactttttcatcaatatctgtcaccgagttctccaggaaggcaaggcacgcggatgccctgaagacgccgcagtttgtgcggtggacaaaaatggttcgaagaacctgggcaagttcattagtagccctatgaaggagaagggaaacatccagctgtcatatagcgacggtgacgattgcggtcacggtaagaagataaagacaaacatcactctggtgtgtaagccaggtgatctggagtctgcaccagtgttgcgcactagtggggaaggtggatgcttttatgagttcgaatggcataccgcagccgcatgcgtgctatccaagacggaaggcgaaaattgcaccgtgtttgacagccaggccggtttctcatttgacctgagccccctgacaaaaaagaacggggcatataaggtagagacaaaaaagtatgatttttacatcaatgtttgcgggcctgtgtctgtcagcccatgtcaaccggattcgggagcctgtcaagtggcgaagtccgatgaaaaaacatggaatcttggtctctccaatgccaagctgtcatactacgacggtatgatccagttaaactatagggggggaacaccatacaacaacgaacggcacaccccacgcgctacgctgataacattcttgtgcgaccgggacgcgggagtggggtttccagagtaccaagaggaggataactccacctacaactttcgttggtatacttcgtacgcatgcccagaagaacctttggagtgtgttgtgactgacccctccacacttgaacagtacgatctctcatcgctggctaaaagcgagggagggctgggaggcaactggtacgccatggataacagcggcgagcacgtgacttggcggaagtactacattaatgtctgtagacctctgaatcccgtccccggttgtaaccggtacgcctctgcctgccaaatgaaatacgaaaaagaccagggatcttttaccgaggtggtgagcatctcaaatctgggcatggctaaaactgggcctgttgtagaagactccggtagtctgcttcttgaatatgtgaatggaagcgcgtgcaccacaagtgacggacgacaaactacatatacaacaagaatacacctggtgtgcagccgcggacgacttaattcccaccccatcttttctctgaactgggagtgcgtcgtgtccttcctgtggaatacggaagcggcttgccctatccaaactaccaccgatacagaccaagcttgtagcataagagatcctaatagtggcttcgtgttcaacctgaatcccctcaatagtagtcagggctacaacgtcagcggtataggtaagatcttcatgttcaacgtgtgtggcaccatgccagtgtgcgggacaatcctcggcaagcccgcatccgggtgcgaagctgagacacaaaccgaagaactcaagaattggaagcctgccaggcctgtgggaatcgaaaaaagtctacagctgtcaacagaaggttttataacgctgacatacaagggaccccttagcgctaagggcacagctgacgccttcatcgtgcgcttcgtgtgcaacgacgatgtttattccgggcctctgaaattcttgcatcaagatattgatagtggacagggaatccggaatacgtacttcgaatttgaaaccgcattggcttgtgtcccctctcctgtggattgccaagtgaccgatctggccggtaacgagtatgatttaaccgggcttagcactgtcaggaagccctggactgccgtcgatacatccgtcgacggacgcaaacgcactttctatctgagtgtctgcaatcctctaccttacatccccggatgccaaggaagtgctgtcggcagctgcctggtgagcgagggcaactcatggaacctgggtgtcgtgcagatgagcccacaggcagccgcaaacggatcattgtccatcatgtatgtgaacggcgataaatgtggcaatcagcgcttctccacccggattacgttcgagtgtgctcagatttcaggatccccggcttttcagctacaggacggctgcgagtacgttttcatttggcgcactgtagaagcatgtccagtggttagagtggagggagataactgtgaggtgaaggatcccaggcatggcaacctctatgatcttaagcccctggggctcaacgataccattgtctccgccggtgaatacacctactatttccgcgtgtgtggaaagctgtcaagtgatgtgtgtcctacatctgacaaaagcaaggtcgtgagctcatgtcaggaaaaaagagagcctcagggattccacaaagttgcaggattgctcactcagaaattgacgtatgagaatgggctgctgaaaatgaacttcaccggtggagatacgtgccataaggtctaccaacggtccacagcaatattcttttattgcgaccgaggcacccaacgtccggtctttctcaaagaaaccagtgactgtagctacctcttcgagtggcgaacccaatacgcttgccccccatttgacctgacagaatgttcttttaaggatggagcagggaacagcttcgatctgtccagcttgtcaaggtattctgacaactgggaagctatcaccggtaccggcgatcctgaacactacttaatcaatgtctgtaagtccctggccccacaggccggtactgaaccttgcccaccagaagccgcagcttgcctgcttgggggatcaaagccagtcaacctgggccgagtacgcgatggtccgcagtggcgtgatggtattattgtgcttaagtacgttgacggtgatctctgtcccgatggcatccgcaaaaagagtaccaccattcgtttcacatgtagcgaaagccaggtgaattcccgtcccatgtttatatctgccgtcgaggattgtgaatacactttcgcttggcctacagccaccgcctgcccaatgaagagcaacgaacacgatgattgccaagttaccaatcccagtaccggacacttattcgacctgtcatcacttagcggcagagccggattcacagctgcttacagcgagaaagggctggtttatatgtctatctgtggcgaaaacgagaattgcccccctggggtcggcgcatgttttggccaaacccggatttctgtcggcaaggcaaacaagaggcttagatacgtcgaccaggtgctacagcttgtgtacaaggacggctcaccatgtccttccaaaagcgggctgtcttataaatctgtgatctcgtttgtctgtaggccagaagctcgcccaacaaaccggccaatgttaatctccctcgataagcaaacttgtaccttgttcttcagctggcacactccattggcctgtgaacaggccacggaatgttcagtgaggaatggctcttccattgtggacctgagcccactgattcacagaactggtgggtacgaagcttatgacgagtcagaagacgatgcctctgacacaaaccctgacttttatattaatatctgccagcccctgaatcccatgcatggcgttccctgtcccgcaggtgcagctgtgtgcaaggtgcctattgacggcccacctatcgatattgggcgtgtcgccggacccccaattctcaacccgatcgctaatgaaatctatctgaattttgagtcctccacaccttgtcttgccgacaaacactttaactacacctctctcattgctttccattgtaagcgtggtgttagcatgggtacccccaagctgctgaggacctcagaatgcgattttgtgtttgaatgggaaactcccgtcgtctgtccagacgaggtccgcatggacggttgtacccttacagatgagcagctgttgtatagcttcaacctctcctcactctccacaagcacttttaaggtgacacgtgactcaaggacctatagcgtgggcgtctgcaccttcgcggtgggaccggagcaaggagggtgtaaagatggcggagtctgcctattgagcgggacaaaaggggcttctttcggaagactgcagtcaatgaaactcgattaccgccaccaagacgaagcagtggttctctcttacgttaatggcgataggtgtcccccagaaaccgatgatggggttccctgcgtctttccattcattttcaatggaaaatcatacgaggagtgtattatcgaaagcagggctaagctctggtgtagcaccacagccgactatgacagagatcacgagtggggattctgcagacactcgaactcatatcgtacgtcctcgataatcttcaagtgtgacgaggacgaagacattggcaggcctcaagtgttctccgaagtccgcggttgcgatgtgacctttgaatggaaaactaaagttgtgtgcccgcctaagaaactcgagtgtaaattcgttcagaagcataaaacttacgatcttcggcttctctcaagcctgacaggctcctggagcctggttcataacggcgtcagttactacatcaatctgtgtcagaaaatttataaggggcctctgggatgttccgaaagggcgtcgatctgccgcaggaccacaacgggagatgtccaagtacttggtcttgtgcacacccagaaattgggtgtcatcggagacaaggtggtggtaacctattcaaagggatacccctgtggtggcaacaaaactgcctcttcagtcatcgaactgacgtgtacaaaaacagtgggccgacccgcttttaagcgctttgacatcgatagttgtacttactacttttcatgggattcccgggctgcatgtgccgtcaagccccaggaagtacaaatggttaacgggacaatcactaaccccatcaatggaaagtctttctctcttggtgatatatactttaagctattccgggcttcaggtgacatgcgcaccaacggggacaattatctttacgagatccaacttagcagcataacctcatctcggaacccagcatgctcaggagccaatatttgccaggtgaagccaaatgatcaacatttcagccggaaagtaggcacttctgataagactaagtactacctgcaggacggagacctggacgttgtgtttgcatcatcgagtaaatgcggtaaagataaaactaaatccgtttcttctacaatctttttccactgcgacccgctggtcgaggacggtattccggagttcagtcacgagactgcagattgtcagtacttgttcagctggtacacatcagccgtttgtcccttaggcgttggtttcgacagcgaaaatcctggagacgacgggcaaatgcacaagggactctcggagcgcagccaggctgtaggtgccgtgctgtcattacttctggtcgccctgacttgttgcttgcttgctcttctgctctacaagaaggagcgcagggagacagtcatttcaaaacttaccacatgttgccgccgaagtagcaacgtgtcctataagtattcaaaggtgaacaaggaagaggaaaccgatgagaatgagaccgagtggctgatggaggagattcaactgccaccacccaggcaggggaaggaaggacaagagaacggacatatcacaaccaaaagtgtgaaagccttatctagcctccacggcgacgaccaggactccgaggacgaggttttgacaattcccgaagtaaaggtacattcagggcgtggagccggtgccgagtcttctcaccccgttcggaatgcacagagtaacgctctgcaagagcgcgaagacgaccgtgtaggtctggtgcgcggtgagaaggcgcgtaagggcaaatcatcaagcgctcagcagaagacagtgagctccaccaaattggtctcctttcatgatgattcagacgaggatctgttacatatcta

SEQ ID NO: 226913 - DNA, 780 bp, synthetic construct
  misc_feature 1..780: note = Description of Artificial Sequence: Synthetic coding sequence
  source 1..780: mol_type = other DNA
atgagtgaagtgcctgtggcaagagtatggctggtcttgttattgctaacagtccaggtcggagtcaccgctggagccccatggcagtgcgctccatgttcggccgaaaagttggccttatgcccacccgtgagcgcttcgtgcagcgaggtgacacgtagtgccggttgcgggtgctgccccatgtgcgccctgcctctgggtgccgcatgcggtgtggctacagcaaggtgcgctagaggactctcttgtagggccctgcccggtgaacagcaaccactgcacgctctgactcggggacagggcgcttgtgtacaggagtctgatgcgtccgccccacacgccgctgaagccggaagccccgagtctcccgagagcactgagattacagaggaggagttgctggataactttcacctcatggccccatcagaggaggatcattcaatactttgggacgcaatatcgacatacgacggttcaaaggccctgcacgttaccaatatcaagaagtggaaggaaccctgccgcattgaactttacagagtggtagaatcacttgcaaaggctcaggagacaagtggggaggaaattagcaagttttacttgcctaattgtaataagaatggattctatcattcccgccagtgcgaaacaagcatggacggcgaagccggtctgtgctggtgcgtctatccgtggaatgggaaacgaatcccaggatctccagaaattcggggtgatccaaactgccagatatatttcaacgttcaaaattag

SEQ ID NO: 226914 - DNA, 777 bp, synthetic construct
  misc_feature 1..777: note = Description of Artificial Sequence: Synthetic coding sequence
  source 1..777: mol_type = other DNA
atgttaccgttatgcctcgtggccgctcttttgcttgctgccggtcccggtcccagtcttggggacgaagccatccactgtccgccttgctctgaagagaagcttgcccgttgtcgtccgccagtgggttgtgaagaactcgtgagggaacccggatgtgggtgctgcgccacctgcgcccttgggctgggaatgccatgcggcgtatacactcctagatgtggttccggcctgcgctgctatcctcctcgtggtgtcgaaaagccccttcatactctgatgcacggtcaaggcgtgtgcatggagttagcagagattgaggcgattcaggagtcactgcagcctagtgacaaagacgagggagatcatcctaacaacagtttctcaccctgcagtgcgcatgatcgtcggtgtcttcaaaaacatttcgccaagatacgggatagatccacctccggtgggaaaatgaaggtcaacggcgctccacgggaggacgcacgacctgtgcctcaagggagctgccagagcgagctgcaccgggctcttgagagacttgccgcaagtcagtctaggacgcatgaggatctctatattattcccatacctaattgcgaccgtaacggcaacttccacccgaaacaatgtcatcctgcgctagatggacaaaggggtaagtgctggtgcgtggacaggaagaccggagtcaaactgccaggcggactcgaaccaaagggtgagttggactgccaccagcttgcagatagtttccgagagtag

SEQ ID NO: 226915 - DNA, 477 bp, synthetic construct
  misc_feature 1..477: note = Description of Artificial Sequence: Synthetic coding sequence
  source 1..477: mol_type = other DNA
atggagctggccgaaatagaagcaatacaggagtctttgcagccttccgacaaagacgagggcgaccacccgaataatagcttctccccttgcagcgcccacgaccggcgatgcctccaaaaacattttgcaaagatacgggataggagtacatcaggtggcaaaatgaaggtgaatggagcccctagagaagatgccaggccagttccacagggaagctgccagagtgaactccacagggctttggagagacttgcagcctctcagtcacggacccatgaagacctctacatcatacccatcccaaactgcgaccgcaacggcaattttcaccccaagcagtgccatccagctttggatggacagcgtggcaagtgctggtgtgtggaccgcaagacaggtgtgaaacttcccggaggcctcgaaccgaagggcgagctggattgtcatcaactcgccgatagcttcagggagtag

SEQ ID NO: 226916 - DNA, 849 bp, synthetic construct
  misc_feature 1..849: note = Description of Artificial Sequence: Synthetic coding sequence
  source 1..849: mol_type = other DNA
atggagagaccatccctccgagccctcttgctgggtgccgctggcttactcctgctgcttttacccctctcaagcagtagcagttctgacacctgcgggccatgcgagccggcatcttgccctccccttccaccactcggttgcttgctgggcgagacgagagacgcctgcggatgctgtcccatgtgtgcccgtggtgaaggcgagccctgcgggggtggtggagccggaaggggatattgcgctccaggtatggagtgcgtgaaaagcaggaaaaggcggaaaggcaaagccggagctgccgcaggcggtccgggagtgagcggggtatgcgtatgcaagtcacggtatccagtatgtgggtctgacggaacaacgtacccttccggatgccaattacgcgctgcgtcccaaagagccgaatcccgcggagaaaaggcaatcactcaggtaagtaaggggacctgcgagcagggcccatccattgttacacctcctaaggatatttggaatgtaaccggggcacaggtgtatctaagttgcgaggtaattgggattcctacacccgtgctgatctggaataaagttaaacgaggccactacggtgtccaacgcacagaactgctcccaggcgacagggacaacctggcgattcaaaccagagggggaccagaaaaacatgaagttacagggtgggtgttagtgtctccgctgtcaaaggaggatgcgggtgagtacgaatgccacgcgtcgaattctcaggggcaggccagcgcatccgccaaaataaccgtggtcgacgcactgcacgagatcccggtcaaaaagggggagggcgcagagctatag

SEQ ID NO: 226917 - DNA, 840 bp, synthetic construct
  misc_feature 1..840: note = Description of Artificial Sequence: Synthetic coding sequence
  source 1..840: mol_type = other DNA
atggaacggccatctctccgcgctctgcttttgggtgccgctggcttgctccttttgctgctgcctctctctagctccagcagctcggatacctgcggcccatgcgaacccgcttcttgccctcccctcccacccctgggctgcctcctgggtgaaactagagacgcttgtggctgttgcccaatgtgcgccaggggcgaaggagagccatgcgggggagggggtgccggtcgaggctattgcgctccagggatggagtgcgttaagtcaaggaagcgtaggaagggcaaggccggagcggctgctggtggacctggggtctcgggagtgtgcgtgtgtaagtctaggtacccggtgtgcggatccgacggcactacctatccctcaggctgccaactgcgagcagcttcacagcgagccgaatctcgtggcgagaaagccatcacacaggtgtcaaaaggtacctgcgagcagggtccctctattgtaaccccgcctaaggatatctggaacgtgacaggagcccaggtgtacctgtcgtgtgaggttatcggaattcctactcctgtgctaatatggaacaaggtgaaaagggggcactatggggtccagaggactgaactgcttccaggagacagagacaaccttgccatccagacaaggggaggcccagaaaagcacgaagtgacaggctgggttcttgtgagccctctctccaaagaagacgccggagagtacgagtgtcatgcatctaactcccaagggcaagcaagtgctagtgccaagatcacggtcgttgatgccctgcacgagatacccgtcaaaaagggcacccaatag

SEQ ID NO: 226918 - DNA, 393 bp, synthetic construct
  misc_feature 1..393: note = Description of Artificial Sequence: Synthetic coding sequence
  source 1..393: mol_type = other DNA
atggagacacttggtgcactgctcgtactggaattcctgctgctctcccccgtcgaagctcagcaagccaccgagcacagactgaaaccatggttggtaggcctggcggcagtggtgggatttctgttcattgtctaccttgtgttactagctaacaggctctggtgctctaaggcacgcgctgaggacgaagaagagaccaccttccgcatggaaagcaacttatatcaggatcagagtgaagacaagcgcgaaaaaaaagaagcgaaggagaaggaggaaaaacgaaaaaaggaaaagaagaccgcaaaggagggagaatccaacctaggactggaccttgaggagaaggaaccgggtgatcacgagagggcaaagagtactgtgatgtag

SEQ ID NO: 226919 - DNA, 1932 bp, synthetic construct
  misc_feature 1..1932: note = Description of Artificial Sequence: Synthetic coding sequence
  source 1..1932: mol_type = other DNA
atggccctgcgaaaagccggagatctggagcctcaatttactccggagagaagattcagactgtgttggtatcaggcccattcaggaagagctcttttgggcccacccccacaggccagccccccagccggtgggctcgcgctggccctcttgctgctgagctgggtcgccctgggaccacgatcattggaaggagctgatccgggtacccctggggaagctgagggaccagcctgtcccgctgcctgcgtctgtagctacgacgatgacgccgacgagctgagcgttttttgcagcagccgaaatctgacccggcttccagacggtgtgccgggtggaacacaggctctttggttggacgggaataatctctctagcgttcctcccgctgctttccagaatctttcctcactgggttttttgaacctccaggggggtcagctgggctctttggagccccaagcactcttgggtttagagaatctatgccacctccatctagaacgcaatcagctgcgaagccttgcattaggaacctttgcgcacacaccagcccttgctagtctggggctctccaacaaccggctctctcggttagaagacggattgtttgaaggactcggctctctgtgggacctgaatctcggttggaacagccttgcagtgctgccggacgctgcttttaggggactgggctctctcagggagctcgtcctcgccggtaacagactggcttacctccaaccagccctgtttagcggacttgccgagctccgcgaactcgacctctcgaggaatgccctacgtgccataaaagcgaacgtcttcgtgcagctgccaaggctacagaagctctatctggaccgcaacttgatcgctgccgtggcacccggagccttcctgggcctcaaggcactccgctggctagacctcagccacaatcgggtggccggacttttggaggacacattccctggactgctaggtctcagggtgctacggttgtcccacaacgctattgcgtctctgcgcccacggacatttaaagaccttcacttccttgaggagctccaacttggccacaataggatcaggcagctggcagagaggagcttcgagggtctagggcagctcgaagtgctaaccttggaccacaatcagctgcaggaagtcaaagcgggtgccttccttgggctaaccaacgtcgcggtgatgaacctgtccggtaattgtctgagaaacctgcccgagcaggtcttccgtgggctgggaaaattgcatagccttcatctggaaggtagctgcctaggccgaatacgtccccacacattcaccgggttgtctggcctgaggcggctgtttcttaaggataatggcctcgttggaatagaagaacagtctctgtggggtcttgcagaactcctagagctggatctgactagcaatcagttaacccacctgcctcaccgtctctttcaaggcctgggcaagttagaatatttactgctctctcggaatagattggctgagctccccgctgatgccctgggaccactgcagcgcgctttttggctggatgtttcacataataggctcgaagccctcccaaattccttgctggctccgctgggccgactcagatacttgtctctgcggaacaactcgctgcggaccttcaccccccagcctcccggtctggaacgtctgtggctcgagggcaatccctgggattgtggatgtccgctcaaggcccttcgggactttgcccttcagaacccatctgctgtcccgcgtttcgtgcaggctatctgtgaaggagatgattgtcaacccccagcgtacacctataataacatcacttgtgcaagtccacctgaagtcgttggactggatttgagagatttaagtgaggcccatttcgccccatgctag

SEQ ID NO: 226920 - DNA, 1533 bp, synthetic construct
  misc_feature 1..1533: note = Description of Artificial Sequence: Synthetic coding sequence
  source 1..1533: mol_type = other DNA
atgcctcgcggtttcttagttaagcgaagtaagaagtcaacccccgtctcctatagggtgcgaggtggtgaggacggggatcgcgctcttttgttatcacccagttgcggcggagccagggctgagcccccagctccatcacccgttcctggccctctgcctcccccaccccctgctgagcgagcccacgcagccctcgctgctgccctcgcttgcgcacccggtccacagcctccgcctcaagggccacgagctgcgcacttcggtaaccccgaagcggcacaccccgctccactgtatagtccgacccgtcccgtatcacgcgaacatgagaagcataagtattttgaacggagttttaacctgggatcccctgtgagtgcagagagcttcccgacacctgctgcgttgctgggaggaggcggagggggtggcgcttctggcgctggaggcggaggtacatgcggaggagatcccctgctctttgcaccagctgaattgaagatgggcacagcattctccgccggagctgaggctgccagagggccagggccagggccacctctgccccctgctgcggctctaagaccaccaggaaagcgccctccccctccaacggctgctgagccccctgccaaggcggtcaaggccccaggcgcaaagaagcccaaggccatcaggaagctgcatttcgaagatgaggtgactacttctcccgtgctcggacttaaaatcaaagaaggtcctgtagaagcacctagagggagagctggcggagccgcaaggccactgggcgagttcatctgccagttgtgcaaggaggaatacgccgacccgtttgcccttgcacagcacaagtgttcaagaatagttagggtggaatacaggtgccccgaatgtgcaaaagtgttttcttgtcctgccaaccttgcgtctcatagacgctggcacaaaccacgacccgctccagccgctgcccgtgcccctgagccggaggccgctgccagagcagaagcacgtgaggctcccggaggcggaagcgacagggatacaccttcccctggcggtgtgtctgagtcgggctctgaggatggtctctacgagtgccatcactgcgctaaaaagtttagaaggcaggcctatctgaggaagcacctgctcgctcaccaccaggccctgcaggccaagggggcacccctggccccacctgccgaggacctgttagccctctatcctggtcccgacgaaaaggctccccaggaggctgcgggtgatggcgagggagccggagtccttgggttatcagcttctgcagagtgtcacttgtgcccggtgtgtggggagtcttttgcaagtaaaggggctcaggaaagacacctcagactgcttcatgctgctcaggtatttccgtgcaagtattgccccgcaactttttactcttcaccgggactcacccgccacattaacaaatgtcatccttctgaaaatcgccaagtaatactactccaggtccccgtgagacccgcatgttag

SEQ ID NO: 226921 - DNA, 1701 bp, synthetic construct
  misc_feature 1..1701: note = Description of Artificial Sequence: Synthetic coding sequence
  source 1..1701: mol_type = other DNA
atgccacgagggtttttggttaaacgtacaaaaaggacaggtggtctgtatagggtgaggcttgccgaaagggttttccccctcctcgggccacagggagctcccccattccttgaggaagccccaagtgcctctctgccaggcgcagaacgggcaacgccgccaactcgtgaggaacctggcaaaggactcactgccgaagcagcccgagaacagagtggctctccctgcagggctgctggtgtgagtccaggaactggcggaagggagggtgccgagtggcgcgctggcggtcgagaaggacccggtccatctccatccccgagcccctcgccagccaagccagctggggcagaactgcgccgtgcctttctcgaaagatgtctgtcaagccccgtgtccgccgagtcgttcccaggtggcgctgctgccgtggctgctttctcctgctctgtggcccctgccgctgcacccacccctggggaacagtttcttctgcctttgcgggctccattccccgaacctgccctgcagcccgaccccgcacctctgagcgcggcactgcaaagccttaagcgagcagccggaggcgagcgcagaggcaaagcacctacagattgcgcctcaggacccgcagctgcaggtattaagaagccgaaggcaatgcgcaagctctcctttgccgacgaagtcaccacatccccagtgctcggactcaagatcaaagaggaagaaccaggtgccccatctcgtgggttaggaggcagtcgaacacccctgggcgagttcatctgccaactgtgcaaagaacagtacgctgacccctttgctctagcccagcaccgatgtagcaggatcgttagggtcgagtacaggtgcccagagtgcgacaaagtcttttcatgcccggctaacttagcctctcaccgtcgatggcacaaaccaaggcccgcagctgccaatgccgctaccgtgtcgagcgcagacggtaagccaccctcttccagctcctcttcctccagagactcgggagccatcgcctccttcttggcagaggggaaagagaattcccgcattgaaagaacggcagaccaacatccacaggctcgcgacagctctggggctgaccaacatcctgatagcgcaccccgacagggactccaggtccttactcatccggaacccccactcccacagggaccatacacggaaggtgttctcggcaggcgagttccagtcccgggatctaccagtgggggtcgcggatcagagatctttgtctgcccttactgccataaaaagttcaggcgacaggcttacctgaggaagcatcttagcactcacgaagccggatcagcaagggccttagcccctgggtttggctccgaacgcggagcacccctggccttcgcctgtcctctctgcggagcccattttccaacagctgatattcgggagaaacacagactgtggcacgctgtgagagaggaactgctccttccggctttagctggcgctccacctgagaccagcggacctagtgggccaagtgatggaagtgctcaacagattttttcctgcaagcattgcccttccacttttttcagctctccgggtctaactcgccacataaacaaatgtcatccctccgagtccagacaggtcttgctgcttcagatgcccctgcgccctggatgttag

SEQ ID NO: 226922 - DNA, 792 bp, synthetic construct
  misc_feature 1..792: note = Description of Artificial Sequence: Synthetic coding sequence
  source 1..792: mol_type = other DNA
atggtcaagatagcttttaacacccctacagctgtgcagaaggaagaagcgcgtcaggacgtggaggcgctgctctcccggaccgttagaacccagatactgactggcaaagagttgagggtggccacacaggagaaggagggatcttccggcaggtgtatgcttacgcttctcggcctgagctttatcctggctgggctcattgtcggcggagcttgtatttacaagtattttatgccaaagagcaccatttatcgcggagagatgtgcttcttcgatagcgaggacccagccaatagcttaaggggcggtgaacctaatttcctgccagtgaccgaagaagcagacatccgcgaagacgacaacattgccatcattgatgtgcccgtaccttccttttccgactctgatccagccgcaattattcacgactttgaaaagggaatgacagcctacctggatcttctactggggaattgctatctgatgccattaaacacgagcatagtaatgcctcccaaaaatttagtagaactgttcggcaagctggcgtccgggaggtatctgccacagacctatgtagtgagggaagatcttgtcgctgtggaggagattagagatgtgtcaaatttgggcatcttcatctatcagctgtgcaacaatcgtaagtcttttcggctgagaagacgggatctgttattgggcttcaacaaacgcgctattgataaatgttggaagatcaggcacttccccaacgagttcatcgtggagaccaagatatgtcaggagtag

SEQ ID NO: 226923 - DNA, 660 bp, synthetic construct
  misc_feature 1..660: note = Description of Artificial Sequence: Synthetic coding sequence
  source 1..660: mol_type = other DNA
atggtaaagatcgctttcaacacacccactgccgtgcagaaggaagaggcccgacaggatgtcgaggcactgctgagccggactgtgcggacacagattctaaccggcaagagcacgatctatcgaggcgaaatgtgtttcttcgattctgaggacccagccaactctctgcggggaggcgaacccaactttctcccagtgactgaggaggcagacattagagaagacgacaatatagccattattgacgtgcccgtgccctccttctccgatagtgacccggctgcaatcattcacgacttcgagaaaggaatgaccgcctatctggatctgctcctggggaattgctacctgatgcctctgaatacctcaattgtgatgcctcctaagaatctggttgagctattcggcaaactcgcctctggcagatatctgcctcagacatacgtggttcgcgaagacctagtagctgtcgaggaaatcagggatgtctccaacttgggtatattcatttatcaactctgtaacaacaggaaaagctttaggctgaggaggcgtgaccttttattagggttcaataaacgcgctatcgataaatgctggaaaatcaggcactttcctaatgagttcattgtggaaaccaagatttgccaggaatag

SEQ ID NO: 226924 - DNA, 801 bp, synthetic construct
  misc_feature 1..801: note = Description of Artificial Sequence: Synthetic coding sequence
  source 1..801: mol_type = other DNA
atggttaaggtcacttttaattctgcattggcacaaaaggaggccaagaaggacgaacccaagagtggcgaagaagccctgataattccacctgatgccgtggcggttgattgcaaggatccagatgatgtagtgcctgttgggcagcggagagcctggtgttggtgcatgtgtttcggacttgcgttcatgcttgctggtgttatcctgggtggagcctacctgtataagtatttcgccctgcagcccgatgacgtatattattgtggcatcaaatatattaaggacgatgtgattcttaacgagcccagcgcagatgcccctgccgcactgtaccagactatagaggagaatattaaaatttttgaagaggaagaggtggaatttatcagcgttcccgtacccgaatttgccgattccgatcccgcaaacatagttcacgatttcaacaagaagctgaccgcttacctggatctgaatttagataaatgctatgttatcccactgaacacatccattgtcatgcctcccagaaacctgttagaacttcttataaacataaaagctggcacctatcttccccagtcctatctgatccacgagcatatggtgataacagacagaattgaaaacattgatcatctggggttcttcatctaccgtctgtgccatgacaaggagacttataaactccagaggagagaaaccattaaagggatccagaagagggaggcttccaattgctttgctatcagacattttgaaaacaagtttgcagtcgagaccctaatctgctcctag

SEQ ID NO: 226925 - DNA, 693 bp, synthetic construct
  misc_feature 1..693: note = Description of Artificial Sequence: Synthetic coding sequence
  source 1..693: mol_type = other DNA
atggtgaaaatcagtttccagcctgctgtcgcaggcattaagggggataaggctgacaaggctagtgcctccgctccagctcctgcctcagccactgaaatccttctcacacctgcacgggaagaacagccccctcagcatagatcaaaacggggaggctctgtgggtggagtgtgctacctgtctatgggtatggtcgtgttgctgatggggctggtgtttgcgtcggtgtacatttacaggtacttcttcctcgcacagctggctcgtgataactttttccggtgtggcgtactgtacgaagactcactcagttcccaggtccggacccagatggaactcgaggaagacgtgaaaatctacctggatgaaaactacgaacggattaacgttcctgtgccacagttcggaggaggtgaccccgcagacatcatccacgactttcaacggcgaggaacgtacttgccacagacctacattatccaagaagaaatggtagtaacagaacacgtgtccgacaaggaagccctcggctcatttatctatcacctgtgcaacgggaaggatacctacaggttgagacgcagggccacaagaagacggattaataagcgcggtgccaaaaattgtaatgctattagacacttcgagaacacctttgtggtggagacactaatttgcggcgtcgtatag

SEQ ID NO: 226926 - DNA, 804 bp, synthetic construct
  misc_feature 1..804: note = Description of Artificial Sequence: Synthetic coding sequence
  source 1..804: mol_type = other DNA
atggtgaagatttcctttcagccagccgtggcaggaatcaaaggggacaaggcggataaagccagcgcatccgctccagcacctgcctcagctacggaaattctcctgacccctgccagagaggaacaaccaccccagcacagaagtaaacggggaggatccgtcggcggagtgtgctacctctccatgggcatggtggtcttacttatggggctggtgtttgcttcagtgtatatttacaggtatttctttctcgcacagctggccagggataattttttcaggtgtggggtcttgtatgaggatagcctatcctcccaggtacggacccagatggaacttgaggaggacgtcaagatttatctggacgagaattacgagcgaattaacgtgccagtgccccagttcgggggaggcgatccagccgatataattcatgattttcagcggggtctgacagcttaccacgacataagcctggataagtgttatgtcatagagctgaatactaccattgtcctgcccccacggaatttttgggaactcctgatgaatgtgaagcggggtacatatcttcctcagacatacattatccaagaggagatggttgtgaccgagcatgtgagtgacaaagaggcactgggctcctttatctaccatttgtgtaatggcaaggatacatatcggctaaggcgcagagcaactcgaagaagaattaataagaggggagctaaaaactgtaatgccattcggcactttgaaaacacattcgttgtggaaacgctcatttgtggcgtcgtctag

SEQ ID NO: 226927 - DNA, 663 bp, synthetic construct
  misc_feature 1..663: note = Description of Artificial Sequence: Synthetic coding sequence
  source 1..663: mol_type = other DNA
atggtcaaaatatcctttcaacccgcagttgctgggatcaagggcgacaaggccgataaagcctccgcttcagctcctgccccagctagtgccacagaaattctcctaacccccgctcggctcgcaagggataactttttcagatgtggcgttctgtatgaggattccctgtcaagccaggttcggacccagatggagctggaagaggacgttaaaatctatctagatgagaactacgaaaggatcaatgtgccagtcccacaattcggcggaggggaccccgcagatatcatccatgatttccaaagaggcctcaccgcctaccacgatatatcactagacaagtgttacgtgatcgagctgaacaccacgatagtactccccccaagaaacttctgggaattgctgatgaacgtaaagagagggacctatctgccacagacttacatcattcaggaggagatggtagtgactgagcacgtctcagacaaagaggctctcgggtcattcatctatcatctgtgcaacggtaaagacacataccgtctgagacgcagggccactcgccgtagaataaacaagaggggagccaaaaactgcaacgctatcaggcatttcgagaatacctttgtggtggagacgctcatctgcggcgtggtatag

SEQ ID NO: 226928 - DNA, 543 bp, synthetic construct
  misc_feature 1..543: note = Description of Artificial Sequence: Synthetic coding sequence
  source 1..543: mol_type = other DNA
atggttaagatttcttttcagcctgctgtcgcgggtatcaagggagacaaagcggacaaggcttcagcttctgctccggctcccgcttcggcaactgaaatcttactgaccccagcgagagaagagcaaccccctcagcataggtcaaaacgtgggggaagcgtaggcggagtgtgctacctttctatgggcatggtggttctgctgatgggcctggtcttcgcttctgtctatatttaccgatatttctttctggcacagctcgcgcgagataactttttcaggtgcggcgtgttgtacgaggattcactcagctcacaagtgcgcacccagatggagcttgaggaggatgttaagatctaccttgatgagaactacgaaaggatcaatgtacctgtgccccagtttggcggaggagacccggctgatatcatacatgactttcagcggggactcacggcttaccacgacatatctctggacaagtgttacgttatagaactgaatactacaatcgtcttgccgcctcgtaacttctggtag

SEQ ID NO: 226929 - DNA, 1839 bp, synthetic construct
  misc_feature 1..1839: note = Description of Artificial Sequence: Synthetic coding sequence
  source 1..1839: mol_type = other DNA
atggcggctgcaggaagacttccctccagttgggccttgttttcacctctgcttgcgggtttggctctgctgggcgtcggtccagtccctgccagagccctacataatgtaactgctgaactgtttggcgcagaggcatgggggactttggcagcattcggggacttgaacagcgataaacaaactgaccttttcgtgttgagagagagaaatgacctgatcgtgttcctagcggaccagaacgccccatactttaaacctaaggtcaaggtttcgtttaagaatcatagcgcactgatcacgagcgtggtccccggagactatgacggtgacagccagatggatgtgttgttaacgtatttacctaagaactatgctaaaagcgaactcggggctgtcatcttttggggacagaatcagacactggatcccaataacatgacgatcctcaatcggacttttcaggacgaacccctgatcatggactttaacggcgatctcattcccgacatatttggtattacaaatgagagcaatcagccccagattctgctcggtggtaacctgagttggcaccccgcacttaccacaacaagcaagatgcggataccacacagccacgctttcatcgacttgaccgaggactttaccgccgatctcttcttgaccacactgaacgcaactaccagtactttccagttcgaaatctgggagaatctagatggtaactttagtgtctccacgattcttgagaagccacagaacatgatggtggtagggcagtccgcctttgcggacttcgatggagacggccacatggaccacctgctccccggttgtgaagacaagaattgtcagaagtcaacaatctatctggttcgttccggaatgaaacaatgggtaccagtgttgcaggactttagcaacaaaggaacactatggggatttgttcctttcgtggacgagcagcagccaacggagatccctatacccattacgctgcatatcggggattataatatggacgggtaccctgatgctctggtcattctaaagaacacctccggcagcaatcagcaagcatttttgctggagaacgtaccatgcaataacgctagctgcgaagaagcccgacggatgtttaaagtgtattgggaactcacagatctcaaccaaataaaagacgctatggtcgccaccttcttcgacatctatgaggacgggatccttgacatcgtggttctgagcaaaggatataccaaaaacgacttcgccattcacacattgaaaaataattttgaggccgacgcatacttcgtgaaggttattgtactgagcggcctatgctctaatgattgtccacggaaaattacccccttcggcgtgaatcagccaggcccatacatcatgtatactactgttgatgcaaatggatatctcaagaatggttccgcagggcaactatctcaaagtgctcaccttgctctacagttaccttacaatgtgttaggcttggggagatccgctaacttcctcgaccacctttatgtagggatacctcgccctagcggagagaagtcaataagaaaacaagaatggacggctatcattcctaatagtcagttgattgtgatcccctatccccacaatgttccccgttcttggtccgcgaaactgtatttaaccccctccaatattgtcctcctgaccgctattgccctcattggtgtttgtgttttcatcttggctatcatcgggatcctccattggcaggagaagaaagccgatgatagagaaaagcgccaggaggcccatagatttcattttgatgcaatgtag

SEQ ID NO: 226930 - DNA, 819 bp, synthetic construct
  misc_feature 1..819: note = Description of Artificial Sequence: Synthetic coding sequence
  source 1..819: mol_type = other DNA
atggatggatacccagatgctctggtaatcctcaaaaatacctctggaagcaaccagcaggcttttctcctggagaacgtcccctgcaacaacgcttcgtgcgaagaagccagacgtatgtttaaagtgtactgggagctgaccgatttgaaccagataaaggatgccatggtagctacttttttcgatatttacgaggacgggattctagacatagtagtactcagtaaaggctatactaagaacgacttcgccatacacaccctgaaaaacaattttgaagcagatgcatacttcgtcaaggtgatcgtcttatctggactatgctccaatgattgtccaagaaagattactccattcggggtaaatcaacctggcccttacatcatgtacacgactgtggacgcgaacggatatctgaagaacggctcagccggtcagttgagtcagtccgcacacctcgctctacagctgccatacaatgtcctggggctgggtcgctcagccaactttctggatcacctgtacgtgggtatcccacgaccctcaggtgaaaaatccatcaggaaacaggagtggacggcaataatcccaaatagccagctaatagtgattccgtatccacacaacgtcccacggtcatggagtgctaagttgtacttgactccctctaatatcgtcctcctgacggctattgctctgattggggtatgtgtcttcatattagcaataataggaatcctgcactggcaggaaaaaaaggccgatgacagggagaaacgacaggaggcccatcggttccacttcgatgccatgtag

SEQ ID NO: 226931 - DNA, 1074 bp, synthetic construct
  misc_feature 1..1074: note = Description of Artificial Sequence: Synthetic coding sequence
  source 1..1074: mol_type = other DNA
atgatggtggtgggtcaatcagcttttgctgatttcgatggagacggccacatggaccacctgctcccagggtgtgaggacaagaactgtcagaagagcactatttatcttgttaggtctggaatgaagcagtgggtgcccgtgctgcaagacttttccaataaaggcacgctctggggcttcgttccctttgtggacgaacagcagccaaccgaaatcccaatccccataacccttcatattggcgattacaatatggacggataccccgacgccctggttatcctgaaaaacacttccggaagtaatcagcaagcttttctgcttgagaatgtgccatgcaacaatgcgagttgcgaagaggcgaggcgtatgtttaaagtgtattgggaactgacagatttaaaccaaattaaggatgcgatggtggccaccttcttcgacatctacgaggacggaattctcgacattgttgtcctgagcaagggttacactaagaatgacttcgccattcatacacttaagaataattttgaggccgatgcttacttcgtaaaggtgattgtcctgagtggactgtgctccaacgactgccctcggaagatcaccccatttggtgtgaatcagcccggtccatacataatgtacacaactgtggacgcaaacgggtacctgaaaaatggatctgcaggccagctttcccaaagcgcacatcttgcccttcagttgccatacaatgtgcttgggttgggtagatccgctaactttctggaccatttgtatgtgggcattccacgccctagtggagaaaaatccatacggaaacaggagtggacagccatcattcctaactcacagcttatcgtgataccttacccacataatgtacccaggtcctggtcggctaaattatatctaacgccatccaatatcgtccttctcactgcaatagccttgatcggcgtctgtgtcttcatactggccatcattggaattctgcactggcaggaaaaaaaggcagatgacagggaaaaacggcaggaagcccataggtttcacttcgacgccatgtag

SEQ ID NO: 226932 - DNA, 1395 bp, synthetic construct
  misc_feature 1..1395: note = Description of Artificial Sequence: Synthetic coding sequence
  source 1..1395: mol_type = other DNA
atggacgtcctcttaacttacctccctaaaaactacgccaaaagcgagctgggagctgttatattctgggggcaaaaccagaccctcgatccgaacaacatgacgatattgaaccggaccttccaggacgaaccactgatcatggacttcaatggtgatctgattccagatattttcgggataactaatgagagcaatcaacctcagatcctcctcggcggaaacttaagttggcaccccgctttgaccactaccagcaagatgcgaattccacatagtcacgcattcatagatctgacagaggacttcaccgccgacctgtttctcacaaccctcaacgccactactagtactttccaattcgagatttgggagaacctggatggcaacttcagcgtgtcaacaatcttggagaagcctcagaacatgatggtcgtggggcaaagcgccttcgccgattttgacggcgatgggcacatggaccacctgctgcccggatgtgaggataagaactgccaaaagtctacaatctacctggtgcggagcggaatgaagcagtgggtccccgtgctccaggacttctctaacaagggtaccctgtggggctttgtgccatttgtagatgagcagcagcctacagaaattcccataccaatcacattgcacataggcgactacaacatggatggttaccctgatgctttggtgattctgaaaaatacatctggttccaaccagcaggcctttctgctggaaaatgttccatgcaacaacgcatcatgtgaggaagcacgcagaatgttcaaggtgtactgggagctcacagacttgaatcagatcaaagacgccatggtcgcaacttttttcgacatctacgaagacggcattctggatattgtggtgctgagtaaggggtacacaaagaacgacttcgccattcatacactaaagaataacttcgaagctgatgcgtactttgtcaaggtaatcgtgctgtcgggcctatgttccaacgactgccccaggaaaattactcccttcggcgtgaaccagccgggaccttacataatgtatacaaccgtagatgccaacgggtacctaaagaatggatctgccggacaactttctcaatcagcccacttagccttacagctgccgtacaacgtactagggctgggacgcagtgctaattttctcgaccacctgtatgttggaatcccaagaccctccggagaaaaatccattcgaaagcaggagtggacagccatcatcccgaacagccagcttattgtcattccttaccctcataacgtgcctaggagttcccaccggtgcctgtgtttccatctagggaataactggcactttacgttggccggaaaagaaagccgatag

SEQ ID NO: 226933 - DNA, 1044 bp, synthetic construct
  misc_feature 1..1044: note = Description of Artificial Sequence: Synthetic coding sequence
  source 1..1044: mol_type = other DNA
atgtccctactgtgcaggaataaaggttgtgggcagcacttcgaccctaacactaaccttcctgatagctgctgccaccacccaggcgtgccgattttccacgatgccctgaaaggctggtcttgttgccgtaagcggactgtcgatttctctgaatttttaaacattaaaggatgtaccatggggcctcactgcgccgaaaaactgcccgaagcccctcagcctgagggccctgccacatcctcaagcctacaggagcagaagcctctgaacgtcattccaaaatctgcggagacactaagacgtgagcgcccaaagagcgaacttcccctcaaactgcttcccctaaatatttcgcaggccctcgagatggctttagagcagaaagagctggaccaggaacccggtgcgggtttagactccctgatccgaaccgggtcctcctgccagaatcccggatgtgacgctgtataccaggggcctgaaagtgatgctacaccctgcacatatcatcccggtgccccacgattccacgaggggatgaaatcttggtcgtgttgcgggattcaaacactagacttcggagcctttctcgcgcagcccggatgtagggtcggcagacatgattgggggaagcagctgcccgctagttgcaggcacgactggcaccagaccgattctctggtcgtcgttacggtctatggtcagatccccttacccgctttcaattgggtaaaggcttctcagacagagctgcacgtccatatagtcttcgatggcaaccgggtgttccaggcacagatgaaactctggggagtcataaacgtagagcaaagcagcgtgttcctaatgccatctcgggtagagatcagtctggtcaaagccgatccgggatcatgggctcagctggagcacccagacgctctggcaaagaaagccagagcaggcgtggtactcgaaatggacgaagaggagagcgacgatagtgatgacgatctgtcctggaccgaggaggaagaggaggaagaggccatgggcgaatag

SEQ ID NO: 226934 - DNA, 990 bp, synthetic construct
  misc_feature 1..990: note = Description of Artificial Sequence: Synthetic coding sequence
  source 1..990: mol_type = other DNA
atgtcgacggacagctgctgccaccaccctggagtgcccatcttccacgacgcgcttaaggggtggtcttgctgtcgcaagaggaccgtcgatttttccgagtttctgaatataaagggatgcactatgggaccacactgtgccgagaagttaccagaagcaccgcagccggaagggcctgcgacctctagctctcttcaggaacaaaaaccgctcaatgttatcccaaagagtgctgagacgctccgcagagagcgccctaaaagtgagttgccactgaagctactcccgttgaacatcagtcaagccctcgaaatggctttagaacaaaaggaactagatcaggaacccggtgcagggctcgatagccttatcagaactggttctagttgtcaaaatccaggatgcgacgccgtgtaccaggggcctgagtcagatgccaccccttgtacctatcatcctggtgcccctcgatttcacgagggaatgaagagctggtcctgctgcggtattcagacactggatttcggagcttttctagcacaaccaggctgtcgggttggacggcatgactggggcaagcagctgccagcatcctgtaggcacgattggcaccagacagattctctcgtggtggtcactgtgtacggccagatccctctacctgctttcaactgggtgaaagcttcccagaccgagctacatgtgcacattgtgttcgacggtaatagagtctttcaggctcaaatgaagctgtggggagtcatcaacgtggagcagtcctccgtatttctgatgcctagccgggtggaaatctccctcgtgaaagcagaccccggatcttgggctcagctcgagcatcccgacgctctggcaaaaaaagctcgggcaggggtcgtgctggaaatggatgaggaagagtccgacgacagcgatgacgaccttagctggaccgaggaggaggaggaagaagaggccatgggtgaatag

SEQ ID NO: 226935 - DNA, 603 bp, synthetic construct
  misc_feature 1..603: note = Description of Artificial Sequence: Synthetic coding sequence
  source 1..603: mol_type = other DNA
atgttccgcaaaggcaagaagagacactcgtcatcctcctcacaaagtagcgagatcagcactaaatccaagtcagtagatagctccttagggggacttagccgaagttctacagtggcgtccctggacacagattctactaaatcatcaggccaaagtaacaataattcagatacatgcgccgaattccgcattaagtatgtgggcgcaatcgagaagctgaaactcagcgaggggaaaggcctggagggccctctggatctcattaactacatagacgttgcccagcaagacggcaagctccccttcgtgccaccggaggaagaattcattatgggcgtgtcaaagtatggcatcaaggtctccacctccgatcagtacgacgtgcttcaccggcacgcactctacctgattattcggatggtctgttatgacgatgggcttggtgcaggaaaaagtctgttagctttgaagactactgacgcgtccaacgaagagtactcgttatgggtctatcaatgtaattccctggagcaagcacaggctatctgtaaagtgttgtccactgccttcgactccgtcttgacatccgaaaagccgtag

SEQ ID NO: 226936 - DNA, 603 bp, synthetic construct
  misc_feature 1..603: note = Description of Artificial Sequence: Synthetic coding sequence
  source 1..603: mol_type = other DNA
atgttccggaagggcaagaagagacattcgtcctcctctagtcagtcctctgaaatctctactaagtccaagtctgtggactccagcctgggtggacttagcaggagtagcactgttgcttccctggatacagacagcacaaaatcaagtggccagagtaataacaactccgatacatgtgcagagttcaggattaagtacgtgggtgcgatcgaaaaactcaagcttagcgaaggcaagggtttagagggacccctggaccttattaactatattgatgtggcacagcaagacggaaagcttccgttcgtgccacctgaggaggagtttataatgggcgtgtctaagtatggcatcaaggtgtcaacttccgatcaatacgatgttttacatcggcacgccttatacctgataatcagaatggtgtgctacgatgacggtttgggagccggaaagagcttgttggctctgaaaaccaccgatgctagtaacgaggagtactcgctttgggtgtatcaatgcaacagtctcgaacaggcccaggcaatctgcaaggtcctaagtacagcgtttgatagtgtactcacttcggaaaagccgtag

SEQ ID NO: 226937 - DNA, 255 bp, synthetic construct
  misc_feature 1..255: note = Description of Artificial Sequence: Synthetic coding sequence
  source 1..255: mol_type = other DNA
atgttccggaaggggaaaaaacgacacagctcatcatccagccagtcttccgaaatttcgactaaaagtaaatcagtggacagcagcctcgggggacttagtcggtcaagcacagtagcctctctcgacaccgatagcaccaaatcctcaggccagtctaataacaatagtgatacgtgtgccgagttcaggatcaaatacgtaggggctatcgagaaattgaaactttccgaggggaagggcctcgagggctag

SEQ ID NO: 226938 - DNA, 291 bp, synthetic construct
  misc_feature 1..291: note = Description of Artificial Sequence: Synthetic coding sequence
  source 1..291: mol_type = other DNA
atgttcaggaagggcaagaagcgccactcgtcatcctccagtcagagtagtgagatctctactaagtccaagagtgtcgattcaagtctggggggtctgtccaggtctagtactgtggcctctttggacaccgattctacaaaatccagcgggcagagtaataacaactcagacacttgcgctgaatttagaatcaagtacgtgggagccattgagaagcttaaactgtctgagggtaagggactcgagggtccactggacctcatcaactatattgatgttgcccagtag

SEQ ID NO: 226939 - DNA, 261 bp, synthetic construct
  misc_feature 1..261: note = Description of Artificial Sequence: Synthetic coding sequence
  source 1..261: mol_type = other DNA
atgttcagaaagggcaaaaaacggcatagttctagctccagtcagtcttctgagatatccaccaaaagtaaatctgttgactcatccctcgggggtttgtctagatcatcaaccgtggctagcttagatactgactcgactaagagttcagggcagtccaacaataactccgatacgtgcgcggaatttagaattaagtacgttggagcgatcgagaagttgaagttgtccgaggggaagggactggaaggccctttatag

SEQ ID NO: 226940 - DNA, 411 bp, synthetic construct
  misc_feature 1..411: note = Description of Artificial Sequence: Synthetic coding sequence
  source 1..411: mol_type = other DNA
atgttccgcaagggcaagaagcgtcactcatcttcatctagtcagagctccgagataagcaccaaatcaaaatccgtcgatagcagtttgggaggcctgagtcgcagcagtacagtggcctcattagatactgattctacaaagtccagcggacagtcaaacaacaactccgacacctgtgcagagtttcggattaagtatgtcggtgccatcgagaagctcaagctgtcagagggaaaaggcctggaagggccactcgacttgattaattacatcgatgtggcccagcaagacgggaaattgccctttgtgcctccggaagaagagtttattatgggagtgtccaaatacggcatcaaagttagcaccagcgaccaatatgatgtgctccaccgccacgccctgtactag

SEQ ID NO: 226941 - DNA, 345 bp, synthetic construct
  misc_feature 1..345: note = Description of Artificial Sequence: Synthetic coding sequence
  source 1..345: mol_type = other DNA
atgttccgaaaaggcaagaagaggcatagctcttctagctctcagagctcagaaatctccaccaagtctaagtccgtagactcttccctgggtggtctgtctcgctcctctacggttgcatccctggataccgacagcaccaaatcttccggtcagtctaataataacagtgacacctgcgctgaattccgaattaagtacgtgggagccatcgagaaattgaaactgtctgaagggaagggacttgaggggcctctggaccttatcaactatatcgacgtggcccagcaggatggaaagctacccttcgtgccacccgaggaagagtttatcatgggagtgtag

SEQ ID NO: 226942 - DNA, 198 bp, synthetic construct
  misc_feature 1..198: note = Description of Artificial Sequence: Synthetic coding sequence
  source 1..198: mol_type = other DNA
atgttccgcaaaggaaaaaagagacattcttccagcagctcacagagcagcgaaatttctactaagtctaaatccgtggactcttccctgggcggactctccaggtcatccaccgtggcctctctggacaccgattcgaccaagagcagtggccagtctaataacaactcggacacttgcgcggagtttaggatttag

SEQ ID NO: 226943 - DNA, 453 bp, synthetic construct
  misc_feature 1..453: note = Description of Artificial Sequence: Synthetic coding sequence
  source 1..453: mol_type = other DNA
atgttcagaaaggggaaaaagaggcactcatccagtagctctcaaagttctgaaatcagcactaagtccaaaagcgtggatagtagcctcggcggtctgagtcgaagcagcactgtcgcctcattggatactgatagcacaaagtccagcggtcagagtaacaacaattcggacacctgtgccgagttcaggattaagtacgtcggcgctattgagaagcttaagctgagcgaggggaagggcctagagggcccattagaccttattaactacattgatgtggctcagcaggacggtaaactgcccttcgtcccgccagaggaggagttcatcatgggcgtcagtaagtacggcataaaggtgagtacatctgaccagtacgaacaggcccaggcgatttgcaaggttcttagcaccgcattcgattcagtgctaaccagcgaaaagccttag

SEQ ID NO: 226944 - DNA, 534 bp, synthetic construct
  misc_feature 1..534: note = Description of Artificial Sequence: Synthetic coding sequence
  source 1..534: mol_type = other DNA
atgccagtcaagaggtctctgaagttagatggtctgcttgaggaaaacagcttcgacccatcaaaaatcacccgaaagaagagtgtgataacctacagccctacaactggcacctgccagatgtccttatttgcaagccccacatcctcggaggaacagaagcacaggaatgggctttctaatgaaaagaggaaaaagctgaatcacccttccctgaccgagagtaaagagtccaccacgaaggacaacgatgaatttatgatgctgttgtctaaggtggagaagctctctgaggaaatcatggagataatgcagaatctctctagtatccaggctttggaaggatctagggagttggagaatctcataggcatatcctgtgcttctcatttcctgaaacgcgagatgcagaagaccaaggaattaatgacaaaggtcaacaagcagaaactcttcgagaaatccaccggtttaccacacaaggcttctcgacatctggattcctacgaatttctgaaggccatcctgaattag

SEQ ID NO: 226945 - DNA, 513 bp, synthetic construct
  misc_feature 1..513: note = Description of Artificial Sequence: Synthetic coding sequence
  source 1..513: mol_type = other DNA
atgcctgtcaaaaggagtcttaagctggacggacttcttgaagaaaactcgtttgacccatccaagattacaaggaagaaaagtgtcattacatattccccaaccaccggaacctgccaaatgagcttatttgccagccctacatcttctgaggagcagaaacaccgtaacgggctgtcaaatgaaaagagaaagaagctgaatcatccgagcctgaccgagtctaaagagtctacaacaaaagataatgacgagtttatgatgctgctctctaaggtcgaaaaattatccgaggagatcatggagattatgcagaatctgtccagtatccaggccctggaaggctcgcgagaacttgaaaatctgattggaatcagttgcgcttcccacttcctcaaacgcgaaatgcagaaaactaaggagcttatgactaaggtcaacaaacagaaactgttcgagaagtcaactggcctgcctcacaaaggccaacctcaaatgagccagcccctgtag

SEQ ID NO: 226946 - DNA, 651 bp, synthetic construct
  misc_feature 1..651: note = Description of Artificial Sequence: Synthetic coding sequence
  source 1..651: mol_type = other DNA
atgcctttcgctcctgttgcccaggcccgagtccaatggcacgacttcaggtcgttgcagcatctcctaccggcattcaagcggtttagttgtctgtcactcggctcctcctgggattatagcgttaagcggagtcttaaattagacggactgcttgaggagaatagtttcgatcccagcaaaattacgagaaaaaagtccgtgatcacatacagccccaccacgggcacatgtcaaatgtctctatttgccagccctacctcctccgaggaacaaaagcacaggaatggactgtctaacgaaaaacgtaaaaaattaaaccatccaagtttgacagaaagcaaagagtcaaccacgaaagacaacgacgagtttatgatgcttctgagcaaagtcgagaagctgtcggaagaaatcatggaaattatgcagaaccttagcagcatccaagctctggaagggagtcgcgagctcgagaatctcatcggaataagctgcgccagccatttccttaaacgggaaatgcagaagacaaaagagctgatgacgaaggttaacaaacagaaattgttcgaaaagtccaccggactcccacacaaagccagccgacacctggattcttatgagtttttgaaagctatactaaactag

SEQ ID NO: 226947 - DNA, 3540 bp, synthetic construct
  misc_feature 1..3540: note = Description of Artificial Sequence: Synthetic coding sequence
  source 1..3540: mol_type = other DNA
atggccccacggccaagagccagacctggcgtcgccgtagcctgctgctggctgcttaccgtagtgctccggtgctgcgtaagctttaatgttgatgtcaagaattcaatgacttttagtggcccagtggaagacatgttcggttataccgtgcaacaatatgagaatgaggagggcaaatgggtcttgatagggagtccgctggtcggacagcccaaaaacaggaccggtgatgtttataaatgtccagtggggcgaggagagagcctgccgtgtgtcaagttggacctccctgtgaatacgagtatcccaaacgtcaccgaggtgaaggagaatatgaccttcggcagcacgctggtgaccaatcccaatgggggatttctggcctgtggcccactatacgcctatcgctgcgggcacctccattacaccaccggaatctgttcggatgtatccccaacctttcaggtcgtgaacagtattgccccagttcaagagtgcagtacccaattagatattgtaattgtgctcgatggtagtaatagcatctacccttgggacagcgtcacggcatttcttaatgaccttctggagcggatggatataggtcctaaacagacccaggtgggtatcgtgcagtacggggagaacgtgacacatgaatttaacctgaacaaatattctagcacagaagaagtattggtggctgcaaagaaaatcgtgcagcgaggcggtcgacagacaatgactgccctggggattgatactgctcgtaaagaagccttcacggaggcccgaggagcaagacggggagtcaagaaggtaatggtgattgtcactgacggtgagtcccatgataatcacaggcttaagaaggtgattcaggattgtgaggatgaaaatattcagagattctccatcgctatattggggagttacaataggggcaatctgtctaccgaaaaattcgtggaagagattaaaagcatcgctagtgagcccactgagaaacacttttttaacgtctctgacgagttggctctcgtgacaatagtgaagaccctcggagagagaatcttcgctttagaggccacagctgatcagtcagccgctagtttcgagatggagatgagccagactggtttttcagcccactactcccaggactgggtcatgctgggcgctgtgggagcttacgactggaacggcacagttgtgatgcagaaggcttcacaaatcattattccccgtaatactacgttcaacgtggagagcaccaaaaagaatgagccgttggcgtcatacctgggatacactgttaactcagccacagcatcctccggagatgtgctctatattgctggacagcccagatacaatcacaccggccaggtgatcatctacaggatggaggatggtaacattaagattcttcagactctgagcggcgagcagatcggctcgtactttggctctatcttgacaactactgacatagacaaggatagcaacaccgacatcttattagtcggcgctcccatgtatatgggaactgaaaaagaggagcagggcaaggtctacgtttatgctctgaaccaaacaaggttcgagtatcagatgagtttggagcctatcaaacaaacttgctgttcttcgcggcagcacaacagctgtaccacggagaataagaacgaaccatgtggcgctcgcttcggtacggccattgccgctgtcaaggacctgaacctggatggttttaacgacatagtcatcggggctcctttggaggacgatcacggcggagccgtctatatttatcatgggtctggcaagacgatccgtaaggaatacgcacagcggattccgagcggtggcgatggtaagactctgaagttttttggacaatccattcacggagagatggacctgaacggtgacgggctaactgatgtaacaattggcggtctcggaggcgcagccctgttctggtcgagagacgttgctgtggtcaaagtcacaatgaatttcgagcccaataaagtcaacatccagaagaaaaactgtcatatggaaggcaaggaaactgtatgcattaacgccacggtgtgtttcgacgtgaagctgaaaagcaaggaggacaccatctatgaagctgacctgcaatatcgcgttaccctcgactcgctgcggcagattagtagatcgtttttttcaggcacccaagagagaaaggtgcaacgtaatattacagtcaggaaatctgagtgcacgaagcacagcttctatatgttggacaagcacgatttccaggactcagtcaggattactctggacttcaacctcacagaccctgagaatgggccagtgctagatgacagcctgcctaattctgttcacgaatatatccccttcgctaaggactgcggaaataaagaaaagtgtatatccgacctctccctgcatgttgctaccacagagaaggatctgctgattgtgaggagtcagaatgacaagttcaacgtgagcctgacagttaaaaatactaaagattccgcgtataatactaggactattgttcattactctccgaacctggtgttcagcggaatcgaagccatacaaaaggatagttgcgagtcgaatcataacattacttgcaaagtgggataccccttcctgcggcgaggtgagatggtgacctttaaaatcttgttccaatttaacactagttatctgatggagaacgttactatctatttgtcagctacttctgatagcgaggagccacctgagacactgtcggacaacgtggttaatatttcaatacctgtgaaatatgaggtgggtctgcagttttattcctccgctagcgaataccacatctccatcgcggctaacgagactgtccccgaggttataaattcaacggaggatatagggaacgagatcaacatattttatctaatcaggaaatccgggtcctttcccatgcccgaactgaagcttagcatctcttttcccaacatgacctcgaacggttaccctgtactttatccaacaggtctgagttcaagcgaaaatgctaattgcaggccgcatatcttcgaagacccattttcaataaattccggcaaaaagatgacaacaagtaccgatcatctgaagcgtggaacgatactcgactgcaatacatgtaagtttgctactattacctgtaatcttacatcttctgacataagtcaggtcaacgtgtcactgattttgtggaaacctaccttcataaagtcctacttcagctccttgaacctgacaatacgaggtgaacttcggagtgaaaatgccagcttggttctttccagcagtaaccaaaaacgcgagcttgccatccagataagcaaagacggcctgcctggacgggtgcccctctgggtgatactgctgagcgctttcgcgggattgctgctgctgatgttactaatcctagcactgtggaaaatcggattttttaagaggcctttaaagaagaagatggaaaagtag

SEQ ID NO: 226948 - DNA, 3567 bp, synthetic construct
  misc_feature 1..3567: note = Description of Artificial Sequence: Synthetic coding sequence
  source 1..3567: mol_type = other DNA
atggacctgccccgaggcctagtggttgcatgggcactttccctttggcccggattcacggataccttcaacatggacacgcgcaagccgagggtgataccaggctcaagaaccgcctttttcggatatacagtacagcaacacgacataagcggtaacaagtggctggtggtcggcgctcccctcgagactaatggatatcagaaaaccggggacgtatataagtgccccgtgattcacggcaactgtaccaaactgaatctgggacgagtaactttgtccaatgtgtcagagcgcaaagacaatatgcggttgggtttatctcttgccaccaaccctaaggataactccttcctagcatgctcgcccctgtggtcgcacgaatgtggatcatcttattacactacaggcatgtgttcccgggtcaactcgaatttcagatttagtaagacagtggcgcctgcgctgcagaggtgccagacctatatggatatagtcattgtgcttgatggtagtaatagcatttacccgtgggtggaagtacagcacttccttatcaatatcctcaagaagttctatatcgggccaggccaaatccaagtgggcgttgtgcaatatggggaggacgttgtccacgaatttcatcttaatgactatagaagcgttaaggatgtcgttgaagccgcatctcatattgaacagagagggggaaccgagacgcgcactgccttcggcatcgagttcgcaaggtcagaagccttccaaaaaggaggacgaaagggagccaaaaaggtcatgatagtgatcacagatggggaatcacacgattctcccgatcttgagaaagtcattcagcagtctgaacgtgacaacgtcacccgctacgcggtggcggtgctggggtattataatcgcaggggaatcaatccagagacttttttgaatgaaatcaaatacatcgcctctgatccggatgacaaacactttttcaacgttactgatgaggccgctctgaaggatatcgtcgatgccttgggcgacaggattttcagcctggaggggaccaacaaaaatgagaccagcttcgggctggagatgagccaaaccggattttctagtcacgtggttgaggacggcgtgttgttaggagcggtcggtgcttacgattggaacggtgctgtgctcaaggagacctcagctggaaaagtgatccctctgcgtgaatcctacctgaaggagtttcccgaggagctaaaaaatcacggcgcataccttggatacacagttacttcagttgtctcaagtagacaaggtagggtttatgttgcaggggctcctagatttaaccacactggcaaggtcatcttgtttactatgcataataacagatctctgacaatacaccaggccatgagaggacagcaaattgggtcctattttggaagcgagatcacgagtgtagatatcgatggtgatggggtgaccgatgtcctcctcgtgggggctcccatgtactttaacgaaggaagagagcgaggtaaggtgtatgtgtatgaactcagacagaatctgtttgtgtacaacgggactttgaaagacagccactcctaccaaaacgcacgctttggcagtagtatagcctccgtcagggatctaaatcaggacagctacaacgatgtcgtggtgggggctcccctggaggataatcatgctggagcaatctacatatttcatgggttccgcggttccatcctgaaaacacctaagcagagaataaccgccagcgaactggctacaggcctacagtatttcggatgctctatccatggacagctcgatctcaatgaagacggactcatagaccttgcagtgggagcattgggcaacgcagtcattctctggtccaggcccgtggtgcagataaacgcttccctgcactttgagccctccaagattaacatcttccatagagattgtaagagatccgggcgtgacgccacctgcttagcagcatttttgtgttttacccccatcttccttgctccccacttccagacaaccacagtcggcataaggtacaacgctactatggatgaacggaggtatactcccagggcccacctggatgagggcggagacaggttcactaaccgtgccgtgttgctctcctccggtcaggagttatgcgagcgtattaacttccacgtccttgacactgccgactatgtgaaaccagtgactttcagtgtcgagtacagcctggaggacccagatcatgggccaatgctggatgacggttggcctaccaccctacgggttagcgttcccttctggaatggatgcaacgaggacgagcattgtgtgccagacctcgtgctcgacgccagaagtgacctgcctacagctatggaatactgccagcgcgtactgcggaaaccggctcaggactgcagcgcttatacgttgtccttcgacacaacggtatttattattgaatccaccaggcagagagttgccgtggaggccactcttgagaaccgaggcgaaaacgcctactccaccgtgctgaacatttcccaatctgctaatttgcagtttgcttctttaatccagaaggaggacagtgatggttctattgaatgcgtcaatgaagaacggagactccaaaagcaagtctgtaacgtctcctaccctttttttagggctaaagccaaagtggcattccgtctggattttgagttttcaaagtcaatctttctgcaccatctggagattgaactagcagccggatccgattccaatgaacgggattctaccaaggaagataacgtggctccactccgtttccacttgaagtacgaagctgacgtgctttttacccggagttcttcactgagtcattacgaagtgaaacccaattctagtctagaacgctatgatggcatcggccctcccttcagttgcatattccggatacagaatctcggcctattcccaatccatggcatgatgatgaagatcaccatccccattgccactaggagcggaaacagactgctgaagctccgcgatttcctaaccgacgaggcgaataccagctgcaacatttggggtaactcaactgagtaccgacccactcccgttgaagaggacctgaggcgcgcaccccagctgaaccattctaattcagacgtggtgagcattaattgtaatattagactggttccaaaccaggagattaacttccacttgctaggaaacctgtggctccggtcactgaaagcactcaagtataagtccatgaagattatggtgaatgccgctctgcaacgtcagtttcattctccttttatctttcgcgaagaagatcctagtagacagatcgtctttgaaatttcaaagcaagaagattggcaagtaccaatttggataattgtcggctccacacttggcggacttctcttgctggctctattggttcttgctctgtggaaactgggtttttttcggagcgctaggcgcagacgagagcccggactggaccccacacccaaagtattagaatag

SEQ ID NO: 226949 - DNA, 3570 bp, synthetic construct
  misc_feature 1..3570: note = Description of Artificial Sequence: Synthetic coding sequence
  source 1..3570: mol_type = other DNA
atggacctccctagagggctggtcgtggcatgggccctgtcactgtggccgggtttcacggatacctttaatatggacacccgcaagccacgggttattcctggctcccggacggcgttttttggttatacagtgcagcagcacgacatatccggtaacaagtggttagttgtaggggctccactggaaaccaatggctaccagaaaacaggggacgtttataagtgtccggtcatccacgggaattgcaccaagctgaaccttggaagagtgacacttagtaatgtgagcgaacgcaaggataacatgcgcttagggctcagtctcgcaacaaaccctaaagacaactcctttctggcctgttccccactgtggtctcatgagtgcggatcctcctactacacaaccgggatgtgttctagagtcaatagcaattttcgcttttctaagaccgtggcccctgcactccagcgctgccagacgtacatggacatcgttatagtattagatggatctaattcaatctacccgtgggtggaagtccagcattttctgattaacattctgaagaagttttacatcggcccaggacagattcaggtaggagtcgtccaatatggagaggacgtggtccatgagtttcacttaaacgactatagatctgtgaaggatgtggtggaggccgctagccatatcgagcagcgaggaggcacagaaacccgcactgccttcggcattgagttcgctagatcagaagccttccagaaaggtggcaggaagggcgcaaaaaaggtgatgatcgtgatcacagatggcgagagccacgatagccctgatctcgagaaggttatccaacagtccgagcgtgataacgtgacacgatatgccgtcgcagtgcttggatattacaatagacgaggaattaatccagaaaccttcctcaacgagataaagtacatcgcttctgatccagatgataagcacttttttaatgtgaccgacgaagctgcgctgaaggacattgttgatgcccttggcgaccgtatcttcagtctcgaggggacaaacaagaacgagacctcttttggtctggagatgagccaaaccggcttttctagtcacgtggtggaagacggagtcttgctcggagctgttggtgcttatgactggaacggcgctgtgttgaaagagacctctgctggtaaagtcattccactgcgcgagagctatctcaaagaatttcctgaagaacttaaaaaccatggtgcgtacctcgggtacacggtgacaagcgtggtgagctctagacagggacgagtatacgtcgctggagccccacgctttaatcacactggcaaagtgatcctgttcacaatgcacaataacaggtccttaactattcatcaggcaatgaggggccagcagattggatcttactttggttcggaaataaccagcgttgacatcgatggcgatggggtgaccgatgtcctcctggtgggtgcaccaatgtatttcaacgagggtagggaacggggaaaggtgtatgtgtacgagctgaggcagaatctgtttgtgtacaacgggaccctcaaggattctcattcctaccaaaacgcacgcttcggtagcagcatcgcctccgtccgcgatttaaatcaggacagttataatgacgtggttgttggagcaccacttgaagacaatcacgctggcgctatctacatctttcacggctttcgcggttctatcctgaaaacccctaagcagagaatcacagcttctgaactggccacaggactacagtactttgggtgcagcatacatgggcagctggatctgaacgaagacggactgatcgacctggctgtgggggctctgggcaacgccgtgattctatggagccgacccgtcgtccagataaatgcatctctgcacttcgagccttccaagattaacatcttccatcgggactgtaaaaggtcaggtcgagacgctacctgcctggctgccttcctctgcttcaccccaatttttctggctccccactttcagaccactacagtaggcatccgctataatgccactatggatgaacggagatatactccaagagcccaccttgatgaaggcggagatcgttttacgaacagagcagtattgttatcctcgggccaggagctttgcgaaaggataaattttcacgtgctggataccgcagattacgtaaagcccgtgacctttagtgtggaatacagcctggaggatccagaccacggtcccatgttagatgatggctggccgaccaccctgcgggttagtgtccctttctggaacgggtgcaatgaagatgagcactgtgtgccggacttagttctcgatgcgagaagtgatttaccaacggctatggagtattgccagcgcgtgctccgaaaaccagctcaggactgcagtgcatacaccctttcatttgatacaactgtgtttattatagagagtaccaggcagagagttgctgttgaggctactctcgagaatcgaggtgagaatgcgtacagcaccgttctcaatatttcgcagagcgccaatttgcaatttgcttcgctcatccagaaagaagactcagatggaagcatcgaatgcgtgaatgaggaacgtcggttgcaaaagcaggtgtgcaacgtaagctatcctttctttcgggcaaaggccaaagttgcatttcgtctggatttcgagttctcgaagagtatatttctgcaccatctggagatcgagctggcagcgggaagtgactctaacgaacgtgattccaccaaagaagacaacgtggcacctctgcggttccatcttaagtatgaggctgacgttctgttcacgcggtcatctagcctgtcacattatgaggtgaagccaaacagttccttagaaaggtatgatggaatcggcccacctttttcctgcatatttagaattcagaatctgggccttttccctatccacggcatgatgatgaaaataactattccaatcgctacaagatccggcaatcggttgctgaagctgcgggatttccttacagacgaagtggccaacacttcctgcaacatttgggggaactcaaccgaatacagaccgacccctgttgaggaggatctgcgacgcgcaccgcagctgaaccattccaattcagacgttgtgtcaatcaattgcaacattagactggtccctaaccaggaaattaacttccatttgctcggcaatctgtggttgcgaagtctgaaagccctcaagtataagtccatgaaaataatggttaacgctgccctgcaaaggcagttccattcaccgttcatctttcgggaggaagacccatctaggcagattgtatttgagatctctaagcaagaagactggcaggtgccgatttggatcatcgtgggttccacactcggaggtctgttgctgctggcgctgctcgtgcttgccctatggaagctcggcttctttcggtccgcaagacggcgacgggaacccggtctggatcctaccccgaaggttttggagtag

SEQ ID NO: 226950 - DNA, 2472 bp, synthetic construct
  misc_feature 1..2472: note = Description of Artificial Sequence: Synthetic coding sequence
  source 1..2472: mol_type = other DNA
atgtcacagactggattctcatctcacgtagtagaagatggggtgcttctgggcgctgtgggagcctatgactggaacggcgctgtgcttaaagagacctccgctgggaaagtgatcccattgcgggaatcttacctaaaagaatttcctgaggagctaaagaaccacggtgcctaccttggctacactgttacctcagtcgtatcgagccgtcagggcagggtgtacgttgctggagcccctcggtttaaccacacgggcaaagtaatcctcttcacgatgcacaacaaccggagtcttacaattcaccaggcaatgaggggtcagcaaattggcagttactttggcagtgaaattacttctgtggatatcgacggcgatggagtcacagacgtgttgctggtaggggctcccatgtactttaatgagggcagggagcgtggaaaagtgtacgtttacgaattgcggcagaacttatttgtctacaatggaaccctgaaagacagtcacagttaccagaatgctagattcgggagttccatagcatctgttcgggaccttaaccaggattcttacaacgatgtggtcgtgggcgcaccactagaagataatcacgccggagcaatttacatctttcacggttttaggggaagtatactgaagacccctaaacagcgcataaccgcttccgaactggcgaccggccttcagtattttgggtgcagtatccatgggcaattagatctgaacgaggatggcctgatcgacctggccgtgggggcattgggaaatgccgtaattctctggtctcggccagtggtacaaatcaacgcgtctctccacttcgaaccttcaaagatcaacatattccaccgtgactgtaagcgcagtggaagggatgctacctgtttggccgcttttctctgttttactccaatctttctggcacctcacttccagacgacaaccgtgggcattaggtacaatgcaactatggatgagcggcgttacaccccacgagcccacctggacgagggcggagacaggtttacaaatcgcgctgtcctgctgtccagcggacaggaactgtgtgagcgcattaacttccacgtccttgatacagcagattacgtgaaaccagtgacattctcagttgaatattccctcgaagatccagaccacggtccaatgctcgacgacggatggccaaccactctgagagtgagcgtgccattctggaacgggtgcaacgaggacgaacactgtgtgccggacttggtgcttgacgccaggtccgatttgcctaccgctatggagtattgtcagcgcgtgttgcgaaaacctgcacaggattgttccgcatacacactcagcttcgataccacagtcttcatcatcgagtctactcggcagagggtggccgtcgaggccactttggagaacaggggcgaaaacgcttattctaccgtcttgaacatctctcagagcgccaacctgcaatttgcctctctgatacaaaaagaagactccgacggctctatagaatgtgtgaacgaggagagaaggctgcaaaagcaggtgtgcaacgtgtcctaccctttcttccgggcaaaagcaaaggtcgctttcagactagactttgagttctctaaaagcatattcctgcaccacctcgagattgagctggcggctggcagtgattctaatgaacgcgactccactaaggaagacaacgtggcccctttgcggttccatcttaagtacgaggctgacgtactgtttacccgctcttctagtctgagccattacgaggtgaaacctaatagcagcctcgaacgctacgatggtataggtcctccattttcctgcattttcaggatccagaacttgggtctgttcccgatccacggcatgatgatgaaaattaccatccctatcgccaccagatcagggaacagactgcttaagctgagagacttcttgacagacgaggctaacacatcttgcaatatatggggaaactcgactgaataccgcccaactcccgtagaagaggacctgcgtcgggcacctcagctgaaccacagtaactcagatgttgtgtccatcaactgcaacatcagacttgtacccaatcaagagattaactttcacctgctgggaaacctgtggctgagaagtctcaaggccctgaagtataagagtatgaaaattatggtgaatgctgcgctccagcggcagttccattcacctttcatcttcagagaggaagacccatcccgtcaaatcgtcttcgagatatccaagcaagaggactggcaggtccctatatggatcattgttggaagcacactcggaggcctcctactgctcgcgctcttagtgctggcactgtggaagcttggctttttccgtagcgcaaggcggagacgggagcctggcctggatcccactccaaaggttctcgagtag

SEQ ID NO: 226951 - DNA, 1953 bp, synthetic construct
  misc_feature 1..1953: note = Description of Artificial Sequence: Synthetic coding sequence
  source 1..1953: mol_type = other DNA
atggatctaccaagaggattggtggtggcatgggcattgagcctctggcccggtttcaccgacacatttaacatggacacacggaaaccacgcgtcatcccgggatcacgtacagcgtttttcgggtatacggtgcagcagcacgacatatccggcaataagtggcttgtggtcggtgctcccttggagaccaatgggtatcagaaaactggggatgtttataagtgccccgtgattcatgggaactgtaccaagttgaacctgggccgtgtcacgctcagcaatgtgtctgagcggaaggacaacatgagactgggcttatcgctggccacaaatccaaaggataacagctttctcgcctgttctcccttgtggtcacacgagtgtggctcttcatactacacaaccggcatgtgcagccgggtgaactccaacttcaggttttccaaaacggttgccccagctctccagcggtgccaaacctacatggacattgtcatagttttagatggcagcaacagcatatatccctgggtggaagtccaacacttcctcatcaatatcctaaaaaaattctacattggacctggccagatacaggtcggagtggtccagtacggtgaagacgtggttcacgagttccacttaaacgactaccgctctgtgaaagacgtggtggaggccgcaagccacattgagcaaaggggcggaacagaaacgaggaccgccttcggcatagagttcgcacgttctgaggcctttcagaagggtggcagaaagggcgcaaagaaggtgatgatcgtcattactgatggtgagtcccatgatagtcctgacctggagaaagttatccagcagagcgaacgggacaatgtcaccagatacgcagtagccgtgctcggctattacaaccgacgaggcatcaaccctgaaacattcctgaatgaaatcaagtacattgccagtgaccctgatgataaacatttttttaatgtgacggacgaggctgctttgaaggacattgtcgatgcccttggagaccgcattttctcactagagggcaccaacaagaacgaaacctcctttggcttagagatgagccagaccgggttttccagccatgttgttgaggacggtgtcttactcggggctgtgggcgcttatgactggaacggagccgtgctgaaggaaacaagcgctgggaaggtcattcccttacgggaatcctatctcaaagagtttccagaagagctaaagaaccacggagcatacctgggatataccgtgaccagcgtggtgtctagccggcaaggtcgcgtgtatgttgcaggggctcccaggtttaatcacacgggcaaggttatcctgttcactatgcacaacaatcgtagcctcaccattcaccaggccatgcgaggccagcaaataggatcctacttcggttccgagattacatcagtggatatagacggtgacggagtgaccgacgttcttttagtcggggctcccatgtacttcaacgagggaagggagcgcggaaaggtgtatgtgtacgaactgcgtcagaacctcttcgtgtacaatggaacactcaaggattcccacagctaccagaacgctagatttgggtcttcaattgcctcggtgcgcgaccttaaccaagactcctataatgacgtggttgtcggcgctcctctggaggataaccacgccggagcgatctatatcttccacggatttagaggcagcattcttaagactcctaaacaacgaatcacagcaagcgaacttgcaactggactccagtattttgggtgttccatccatggtcaactggacctaaacgaggacggcctcatcgacttagccgtgggcgcactcggcaatgcagtgattttatggaccccaccccctaaatgctggtcagaggctcccgaggaaaccctgtcatag

SEQ ID NO: 226952 - DNA, 3546 bp, synthetic construct
  misc_feature 1..3546: note = Description of Artificial Sequence: Synthetic coding sequence
  source 1..3546: mol_type = other DNA
atggggcctgaaagaaccggcgctgcccctctcccactcttactggttctggctctgagtcagggcattctgaactgctgcctggcttacaatgtgggcctgccagaggctaagattttcagcggtcccagcagcgagcaattcggatacgccgttcagcagtttattaacccaaaagggaattggttacttgtgggctctccatggtccggctttcctgagaaccggatgggtgacgtttataaatgtccagtggacctttctacagccacttgtgagaagttgaacctgcagacgtccacctctatacccaacgttaccgagatgaagacaaacatgagcctgggtctgatcttaaccaggaacatgggaaccggcggattcctgacgtgtggccctctgtgggcacagcagtgtgggaaccaatattatacgacaggcgtgtgcagcgacatcagcccagacttccagctctcagcctctttttcgcctgcaactcagccctgcccttcgctgatcgacgtcgtggtagtgtgcgacgaaagcaatagtatctatccatgggacgccgtaaaaaactttctggaaaaatttgtccagggactagacatcggcccaacaaaaacccaagtgggcctgatccagtacgctaataacccacgggttgtgtttaacctaaacacttacaagactaaggaagaaatgattgttgctacttctcagactagccagtatggcggtgacctgactaataccttcggggcaatccagtacgcgcgaaagtacgcgtacagtgcggcatccggcggaagacggagtgccaccaaagttatggtggtcgtcaccgacggtgagtcccatgatggatcgatgctgaaggcagtgattgatcaatgcaatcacgataacattttaaggtttggcatcgccgtccttggctatttgaatagaaacgcactggatactaaaaacttaatcaaagaaataaaggcaattgcatcaattccgaccgagaggtattttttcaatgtatctgatgaggccgctcttctggaaaaagctggaactttgggcgagcagatcttttctattgaggggacggtgcaagggggagacaattttcagatggagatgagtcaggtgggcttctcagccgattattcttcccagaacgacatcctcatgctgggcgcagtcggcgcatttgggtggtccgggaccatcgtgcagaagacctctcacggccatttaatcttccccaaacaggcattcgaccaaatccttcaggataggaaccactcttcatatctaggatactctgtagctgctatctcgaccggagaaagcacacattttgtggctggcgctcccagagctaattatacagggcagattgtcctttactctgtgaacgaaaatggcaatattacggtgattcaggcacacagaggcgatcagattggaagttacttcgggagcgtgctatgtagcgtcgatgtggacaaagataccataacagacgtcctgctagttggcgcacctatgtatatgagcgacctgaagaaagaggaaggacgcgtgtatctgttcactatcaaagaaggaatattggggcaacatcagttcttggagggtcctgagggtatcgaaaatacccgttttggcagcgcgatcgccgctctgtccgacatcaatatggatggttttaatgatgtaatagtcgggtcacctctggaaaatcagaactcgggcgcagtgtacatttacaatgggcatcaggggaccataaggactaagtatagccaaaagatactgggttcagacggtgccttcagaagccacttgcagtactttggccgttctctggatggctatggcgatttgaatggcgactccattaccgacgtatccatcggcgctttcgggcaagtggttcagttatggagtcagtcaatcgccgatgtggctatcgaagcatcatttacaccagaaaagatcacattggtgaataagaacgcccagatcattctgaagctgtgtttctctgcaaaatttagacctacgaagcaaaataaccaggtggctatagtttataacatcaccttggacgccgacggcttttctagtcgggtgacctcgcgcggtctgttcaaagagaacaacgagcgctgtctgcagaagaacatggtggtgaaccaagcccagtcttgtcccgaacatatcatctacatccaggaacctagcgatgttgtgaattccttggacctaagggtcgacatatcattggagaatccaggaacctctcctgccttagaggcttactctgaaacggcaaaagtgttctctatacctttccacaaggattgcggggaagacggtttgtgcatttcagatctcgtgttagatgttcgtcagattcccgcagcgcaggagcagcctttcattgtcagcaatcagaacaagagactcaccttctctgtgacacttaaaaacaaacgcgagtcggcttacaatacaggaatagtggttgacttcagtgagaacttgttttttgctagcttttccctgcctgtcgacggaaccgaagtgacatgccaagtagcagcaagccagaagtccgtagcctgcgacgtagggtatccggcactcaagcgtgagcaacaagtgacgtttactattaatttcgatttcaatcttcaaaatttacagaatcaggctagcttaagctttcaggcactgtccgagagccaagaagagaacaaggcggacaatttggtgaatctgaaaatccccctgttgtacgatgccgaaatacacctgacccgctccacaaacatcaatttctacgaaatttcaagcgacggcaatgtgccaagtatcgtccactcgtttgaagatgtgggtcctaagttcatattctcccttaaggtcaccacagggagcgtcccggttagcatggcaacggtgatcattcacatcccccaatacacaaaagagaaaaacccactgatgtaccttaccggggtgcagaccgataaggcaggcgatatttcgtgcaatgcggatattaaccccctgaaaatcggacagacgagctctagtgtatctttcaaaagcgaaaattttcgacataccaaggagttgaactgtagaaccgctagctgctccaacgtgacttgctggttgaaggacgtgcatatgaagggcgaatacttcgtgaatgtgaccacccgaatctggaacgggacatttgcaagcagcacttttcagacggtgcagctcacggctgccgctgagattaacacctacaatccagagatctacgtgattgaggacaacacagttacaattccactcatgattatgaaacctgatgagaaagccgaagtgccaacgggggttatcatcggatcgattatcgctgggatattactgctgttggctctagtggcaatcttgtggaagcttggctttttcaagcgtaagtacgaaaagatgaccaaaaaccctgacgagatagatgagacaactgagctctccagttag

SEQ ID NO: 226953 - DNA, 2448 bp, synthetic construct
  misc_feature 1..2448: note = Description of Artificial Sequence: Synthetic coding sequence
  source 1..2448: mol_type = other DNA
atggggccagaacgaactggcgctgctccactgcctctccttctggtgttggctttatctcagggcatactcaactgttgcttagcctataacgtgggtttgcccgaagccaagattttctccggcccatcctcggaacaatttggttacgcagtgcaacagttcatcaaccctaaaggaaactggttgctcgtaggtagcccttggtcaggcttccctgaaaaccgcatgggcgatgtctacaagtgtcctgtggatctgagtacggccacatgcgaaaagctgaacttgcaaacaagcacatccattcctaacgttaccgagatgaagactaatatgagcctcggcttgatcttgaccagaaatatggggactggcggatttttgacttgcggcccactttgggcgcagcagtgcggcaaccaatattacacaactggggtgtgttctgacatttccccagacttccaactcagtgcttccttctcccccgctacccagccctgcccaagtttgattgacgtagtagtggtctgcgacgagagtaattcaatttacccctgggacgccgtcaaaaattttttggagaaatttgtgcaaggcctcgatatcgggccaaccaaaacacaggtgggacttattcagtatgctaataaccctcgggtcgtattcaatttaaatacctataaaaccaaagaggagatgattgtcgcaacctctcaaacctcccagtatggaggggacttgacaaatacttttggcgcaatacagtacgccaggaaatatgcctactctgccgctagtgggggtaggcgatccgctactaaggttatggtcgtggtaaccgacggggaaagccatgatggtagtatgctcaaggccgtgatcgatcagtgtaaccatgataatattctgagattcgggattgccgtgcttgggtacctaaaccgaaacgcgttagacactaagaatcttatcaaagagattaaagctatagcctccatccctacagagagatattttttcaatgtcagcgacgaagccgctctccttgagaaagctgggacactaggcgagcaaatcttttcgatcgaaggcaccgtccagggcggagacaacttccagatggaaatgagccaggtcgggttctctgccgactactcctcccagaatgacatcctaatgctgggagcggttggggcatttgggtggtctggcacgatcgttcaaaagacaagtcacgggcatctcatctttcccaagcaggcttttgaccaaatcttgcaggaccgcaatcactcctcctaccttggctattctgtggccgctatcagcacaggcgaaagcactcatttcgtggccggtgcccctcgggctaactacaccggtcaaattgttctatactccgtcaatgaaaacgggaatatcaccgtgattcaggcccatcggggtgaccagattgggtcatatttcggcagcgtgttatgtagcgttgacgtagacaaggacactattaccgatgtgcttctcgtgggagcaccaatgtacatgtctgaccttaagaaagaggagggaagggtttacttgtttactataaaggagggaatacttggacagcaccagtttctcgaaggcccagaagggatcgaaaacaccagattcggcagcgccattgccgctctttcggacataaatatggatgggtttaacgatgtgattgttggtagccctcttgaaaatcaaaattctggtgctgtatacatttacaacggacaccagggcactataagaacaaagtactcccaaaagatcctgggctccgatggtgcatttaggagccacctgcagtatttcgggaggtcactggacggatatggcgatctgaacggcgattcaataacagacgtgagtatcggcgcattcggccaggtggtgcagttgtggtcccagagtatagccgacgtggcgattgaggcctctttcactccagagaagatcacccttgtgaataagaacgcccaaatcattctgaagctctgtttttccgcgaagtttaggcctactaaacagaataatcaggttgcaattgtgtataacattacactggatgcggacggtttttctagccgagtgaccagtaggggcttgttcaaggaaaacaatgagcgctgtttgcagaaaaatatggtagtgaaccaagcacagagctgtccagaacatatcatatatattcaggaaccttcagatgttgtgaatagcctggacttaagagtcgatatcagcttggagaaccctggaacgagtccagcactcgaggcttatagcgagacagctaaagtgttttctattccattccataaagattgtggagaggatgggctgtgtattagcgatttagtcctcgacgtcaggcagatcccagcagcacaactcatgggccagaagtag

SEQ ID NO: 226954 - DNA, 1926 bp, synthetic construct
  misc_feature 1..1926: note = Description of Artificial Sequence: Synthetic coding sequence
  source 1..1926: mol_type = other DNA
atggggcctgaacggacaggggctgcccctctcccgttgcttctcgtgttggctctgtcccaaggtattcttaactgttgccttgcatacaatgtggggctccccgaggccaagatcttttcaggtccctctagtgagcagtttggatatgctgtgcaacagttcataaatcccaagggcaactggctactggtgggatctccttggtccggctttccggagaaccggatgggagatgtgtataagtgccccgtggatctgagtaccgccacctgcgaaaagctgaatctccaaacatctacctcgattcccaacgtaactgaaatgaaaaccaatatgagtctgggtctgatactgacacgcaatatgggcactgggggatttttaacatgtggtccgctttgggctcagcagtgcggcaatcagtattatactacaggcgtgtgctctgacatcagtcccgatttccagctgtccgcatcattctccccggctactcagccctgtccctccctgattgatgtggtggtggtctgtgacgaatccaacagcatctatccctgggacgcagttaagaactttctagagaagttcgtgcagggcctggacataggacccacgaagactcaggtcggtctaattcagtatgcgaataacccaagagttgtctttaacctgaacacctataaaactaaggaggagatgatcgtggcaacatcgcagacctcacagtacggcggagatctgaccaacactttcggcgctatacaatatgctcgcaagtacgcttactccgcggcttcaggtggtcggcgatcagcaactaaagttatggtagtcgtcacagacggcgagagtcacgatggcagcatgttgaaggcggtcatcgatcagtgtaatcacgacaacattcttcgctttggcattgcagttctcgggtacctgaacaggaatgctttggacacaaagaacctgattaaggaaatcaaggcaatcgcctccatccctacggagcggtactttttcaacgtctccgacgaagcagcactgttggagaaggctggaacactgggcgaacaaatctttagcatcgagggcaccgtgcaggggggtgacaattttcaaatggagatgtcccaggtgggcttctcagccgactactcgagccagaatgatatcctgatgctaggtgcggttggggctttcggatggagtggcacaattgtgcagaaaacttcgcacggtcatttgatttttccaaaacaggcttttgatcagatcctgcaggaccgtaatcactcctcttacttgggctacagtgtcgcagcaatctcaaccggcgaaagcacccattttgttgctggtgcgcctcgcgcaaattacaccggccagatagttctgtacagtgtcaatgagaatggtaacattacggttatacaagctcaccggggtgatcagatcgggtcatacttcggtagtgttctttgtagcgtggacgtcgataaagataccatcacagacgtcttgctcgtgggggctcccatgtacatgtctgatttgaaaaaggaggagggtagggtttatctttttacaatcaaggagggcatccttggccagcaccaatttctcgaaggtcctgagggcatcgaaaacaccagatttggatctgctattgccgctctctcagacatcaacatggacgggttcaatgatgtaattgtcgggtcaccgctagagaatcaaaactcaggagccgtgtatatctacaatggacaccagggcaccatcagaacgaagtatagccaactcctctgcacgatcattagctgccagacctgctctttccgcaagagctgggatccgatggagcccctcggcgctattagctcaactcttgggggaccctggatggccatggagatctag

SEQ ID NO: 226955 - DNA, 2829 bp, synthetic construct
  misc_feature 1..2829: note = Description of Artificial Sequence: Synthetic coding sequence
  source 1..2829: mol_type = other DNA
atggggccagaacgtacaggggcagcacccctgccgttgctgctggtgttggcactgagccagggaattctaaactgttgcctagcatataatgttgggctgccggaggcaaaaattttctctggtccttctagcgagcaatttggctatgctgtgcagcaatttatcaatcctaaaggaaattggcttttggtaggctctccctggtctgggtttcctgagaacaggatgggagacgtgtacaaatgcccagtggatctcagcaccgccacatgcgaaaaattaaaccttcaaacctcgacatccatccctaatgtaaccgaaatgaaaacaaacatgagcctgggcctcattctaacacggaacatgggcacagggggatttctgacgtgcggacccctgtgggcacaacagtgtggtaatcaatactacacaacgggcgtatgttccgacatctctcctgatttccagctgtcagcatcttttagtccagccacccagccttgtccatctttgatagatgtggtggtggtctgcgacgagtctaatagtatctatccttgggacgcagtgaagaacttcctcgagaagttcgttcagggactggacattggcccaaccaagacacaggtgggactgatccagtacgctaataacccaagagttgtatttaacttgaatacctataagactaaggaggagatgatcgtggccactagccagacaagccagtatgggggtgacctcacgaacactttcggggcaatacagtatgcacggaagtatgcttacagcgcagcgtcaggcggacggcgatcggctactaaagtaatggtggttgtgaccgatggggagtcccatgatggaagcatgttaaaggcagtaatcgatcaatgcaatcacgataatatcctccggtttggaatagctgtgctcggatacctcaatcggaatgccctggacaccaaaaatctgatcaaggaaatcaaggcaatcgcctcaatacccacggaacggtattttttcaatgtgtcagatgaagctgcccttctagaaaaggcaggcactctcggggaacaaatcttttctatcgaagggactgtgcagggaggggacaactttcagatggagatgtcccaggttggattctccgctgattactcctcccagaacgatatcctgatgctgggcgctgtgggtgcatttggctggtcgggaacaatcgttcagaaaaccagtcatgggcatctgatatttcctaaacaggccttcgaccagattctccaagacaggaatcacagctcttatctggggtacagcgtggcagccatttctaccggtgagagcacacacttcgtcgctggagccccacgcgctaattacacaggtcagattgtgctctattccgtgaatgaaaacggcaatatcactgtgatccaggctcatagaggcgaccagatcggaagttattttgggagtgtcttgtgctccgtggacgtagataaagacacaataacggacgtgctgctggtcggagcacccatgtacatgtccgatcttaagaaggaggaggggcgtgtgtatctctttaccatcaaagaggggatccttggacagcaccaatttctcgagggtcccgagggcattgagaacaccaggttcggttccgccatcgctgccttaagcgacattaacatggacggcttcaacgacgtaatcgttgggagtcccctagagaatcagaatagcggcgcagtgtatatttataatggtcaccaaggcacaattcggactaaatattcccagaaaatattgggctctgacggcgctttcagatcacacttgcagtacttcggacgaagtctcgatggatacggggatctaaatggcgactctatcacggacgttagcattggtgccttcggtcaggtggtgcagctatggagccagtccatcgctgatgtcgctattgaggccagcttcacgcccgaaaaaattaccctggtgaataaaaacgctcagataattcttaaactctgcttctcggcaaagttcagacccaccaaacaaaacaatcaggtggccattgtgtataacataactctggacgctgatggattctcatctcgcgttacttctcgcggtctattcaaggaaaataacgaaagatgcctgcagaagaatatggtggtgaaccaggcccaatcatgcccggagcatatcatctacattcaagagccatctgacgtggtgaattccctggacctgagggttgatatctctctggagaacccaggcacatctcccgctctggaagcatatagcgagacggccaaagtgtttagtatcccatttcacaaagactgcggcgaggatggcctgtgtatatcagacttggtactggacgtccgtcagatccctgcggctcaggagcagccatttatcgtgtccaatcaaaacaaacggctgaccttcagcgtgaccctcaagaacaaacgcgagtctgcctacaacaccgggattgtcgtagactttagcgagaacttattctttgcctcgttctctctccccgttgatgggacagaggtgacgtgtcaggtcgccgcatcccaaaaatctgtagcatgcgacgttggctatccagcactgaaaagagagcagcaggtcacttttaccattaacttcgattttaatctccagaacctgcaaaatcaggcgtctttgtccttccaggccctttcagagagtcaggaggagaacaaggctgacaacttggtgaacctcaaaatccccctactgtatgatgctgaaattcacctgaccaggtag

SEQ ID NO: 226956 - DNA, 3120 bp, synthetic construct
  misc_feature 1..3120: note = Description of Artificial Sequence: Synthetic coding sequence
  source 1..3120: mol_type = other DNA
atggctcgtgccctatgcccactgcaggccctctggttgcttgagtgggtgctgctccttttaggcccatgcgctgccccacccgcatgggccttgaacctggatcccgtgcagctgactttctacgccggaccgaacggttcccaatttgggttctctctggattttcacaaggactctcacggacgcgtggccatcgtggttggggcacccagaactctgggtcccagccaggaagagacaggtggggtcttcctctgtccctggagagctgagggtggacaatgcccgtctctgctcttcgatcttagggacgagactagaaacgtcggaagccagacactacagaccttcaaggcccgtcaggggctcggggcaagcgtcgtgagctggagtgatgtgatagtggcatgtgctccttggcagcattggaacgtgttggaaaagacagaggaagctgagaaaactcccgtcgggtcttgcttcttggctcaacccgagtccggtagaagagcagagtacagcccctgtagaggaaatactctttctcggatctacgtggagaacgacttctcgtgggataaacgatactgtgaagcaggtttctcctctgtagtcacgcaagccggagagttggtgttaggtgcaccaggtggatattactttctgggcctgctggcccaagcgccagttgctgacatcttcagcagttacagaccaggcatcctcctctggcatgtttctagccagagcctgagcttcgattcatctaatcctgagtactttgatggatactggggctactccgtggccgtgggggagtttgatggagacctcaataccaccgaatatgtcgttggggcacccacatggagctggacgctcggcgcagttgaaatactcgacagctattatcagcgcttgcatagactgcgaggagagcagatggcctcctatttcggacactcagtggcagttacggacgtaaacggggatggcagacacgacctcctggttggggctcccctctacatggagtcacgcgctgatagaaagctggctgaagttggacgcgtgtatttgttcctgcaacctagaggccctcacgcactgggagctccaagcttactactcacaggtacacaactgtatggtaggtttgggagcgctatagcccctctgggagatttggaccgtgatggatacaatgacattgccgtggcagcgccttacggcggaccaagcggaaggggacaggtattagtgttcctaggtcagagcgaggggttaagatcccgccctagccaagtgctggattccccgttccccaccggatcagcttttggtttttctctgcgcggagcggttgatatcgacgataacggctatcccgatctgatcgttggagcatatggagcgaaccaggtggcagtgtacagggctcagcccgttgtcaaggccagtgtccaactgctggtgcaggacagcctgaacccggctgtgaagtcctgcgtgctcccacagaccaagacccccgtgtcttgcttcaacattcagatgtgcgtaggagcgacaggtcataacataccccagaaactaagcctcaacgcggagctccagcttgatagacagaaacctaggcagggccgaagagtgctcctactcggctctcaacaagccggaactactctgaacctggacctgggcggaaaacatagccctatctgtcacactactatggccttcttaagagacgaggcagattttcgggataaactgtctcctatagtgctgagccttaacgtaagtctccccccaactgaagcaggaatggcccctgccgtggtgctgcacggtgacacgcatgtccaggagcagacaaggatcgtgctcgactgcggcgaagacgacgtctgcgtgccccagctgcaactgactgcgtctgtcacaggcagtccgttgctggtcggcgctgacaacgttttagaactgcagatggatgcggctaatgagggcgagggtgcttacgaggccgaactagctgtacatctgccgcagggggcacactatatgcgagccctttccaatgtggaggggtttgagaggcttatttgcaaccaaaagaaggaaaacgagacccgagtggtgttgtgcgaactgggaaaccccatgaagaaaaacgctcagatcggcatcgccatgcttgtgtccgtcggcaacctggaggaggccggagaaagcgtgtcatttcagcttcaaatacgtagcaaaaattctcaaaatccaaactctaaaatcgtgctgcttgacgtgcctgtcagggcagaggcacaagtcgaattgagagggaactcattcccagcatcactcgttgtcgcagcagaggaaggagagagagagcagaactctctggattcatgggggcctaaagtcgagcacacgtacgagctgcacaacaatggaccaggaacagtgaatgggctacacttgtctatccacttgccgggtcagtctcagcccagtgatctgctatatattttggacatccaaccccagggcggtctccagtgcttccctcaacctcctgttaaccctctgaaagtggactggggcttaccaattcctagtccctctcccattcaccctgcccaccacaaacgggataggaggcagatcttcctgcccgagccagagcagccgagccgcctgcaggatcccgtccttgtatcttgtgactcagcgccatgtactgtggtccagtgcgatctgcaggaaatggctcgaggccagcgggctatggtgacagtgcttgccttcttgtggttaccatccttataccagcgccctctggatcagtttgtcctgcagtcacatgcttggttcaacgtatcatccctcccgtatgccgtaccacccctgtcacttccgcgaggcgaggctcaggtgtggacccagctgttgcgcgctctggaggagagagctatccccatctggtgggtgctggtgggggtgctgggaggccttctgctcctgacgatccttgttctggcaatgtggaaagtgggattctttaaaaggaacagaccccctcttgaggaagacgatgaggagggcgaatag

SEQ ID NO: 226957 - DNA, 3018 bp, synthetic construct
  misc_feature 1..3018: note = Description of Artificial Sequence: Synthetic coding sequence
  source 1..3018: mol_type = other DNA
atggcaagggcattgtgcccacttcaggcgctgtggctactcgaatgggtactgttactcctgggaccgtgcgcggctccgcctgcgtgggctttgaatctggatcctgtccagttgacattttatgctggaccaaatggctctcagtttgggttctctttagacttccacaaggactcccacggtagagtggcgatcgtggtcggcgctccacggaccttaggcccaagtcaggaggaaactggcggtgtttttttgtgcccctggcgcgcagaggggggacagtgccctagcctgctgttcgacctgcgcgatgagaccagaaacgtgggttcccagacactacaaaccttcaaagcaagacagggcctgggggcatccgtcgtttcttggagtgacgtgatcgttgcctgcgccccatggcagcactggaacgtgttggaaaagacagaggaggctgagaaaacacccgtcgggagttgctttctggcgcaacctgagtcagggaggcgggctgagtactcaccctgccgcggaaacacgttgtccaggatctacgtggagaacgacttcagttgggacaaaaggtactgtgaagccggtttcagctctgtggttacgcaagctggagagctcgtcctgggcgctcccggtggttactacttcctgggattgttggcacaagcgcctgtggctgacatcttttccagctacagacccggtattctgttgtggcacgtgtcttcacagtcattatctttcgactcatccaatcccgagtactttgatggttactggggatactcagtagccgtcggagaatttgatggcgacctcaacacaaccgaatacgtggtgggagccccaacgtggagctggactctgggtgctgtagagatccttgactcatactatcagagactccacagactaagaggggagcagatggcatcctactttggccatagcgtggctgtgacagatgtcaacggcgatgggaggcatgatctcctggtgggtgccccattgtacatggagtctcgcgctgaccgtaagttggccgaagtggggagagtgtacctcttcctgcagcctagagggcctcacgctctgggcgcacctagcctgctcctcaccggcacacagctgtatggtcggttcggctcagctattgccccactaggcgacctggaccgcgatggctacaatgacatcgccgtggccgctccctacgggggacccagtgggcgtggtcaggtacttgtgtttctgggccagtccgagggcctccgctctcggccaagtcaggtactggattctcccttccccactggcagcgccttcgggttctcccttcgcggagcagtggatatcgatgacaacggataccccgatttgatagtgggcgcatatggcgctaatcaggttgccgtgtacagagcgcagcccgtggtgaaggcctcagtgcaactcttggtgcaggattctctgaaccccgcagtcaaaagctgcgtgctgccacagaccaagaccccagtgtcctgctttaacatccagatgtgcgtcggggcaaccgggcacaacatcccacaaaagttgagcctgaatgccgaactccagttggatcgccagaagccacgccaaggtcggcgtgtgctgctcttgggatcccagcaggccggaaccactcttaacttagatttggggggtaagcactcaccgatttgtcatactacaatggcctttctgagggatgaagcggactttagggataagttgtcaccaatcgttctgtccttgaatgtgagccttccgccaactgaagccggtatggcccctgccgtggttcttcatggtgacactcacgtacaggagcagacccggattgtgctggattgtggagaagatgacgtgtgtgtgccacagcttcagttgaccgctagcgtgaccggtagcccgttgttggtgggggctgataacgtacttgagctgcagatggacgcggcaaatgaaggcgagggcgcatacgaggccgagctggccgtccacctacctcagggtgcgcactacatgcgggctctgtccaacgtcgaaggattcgagcgtctgatttgtaaccagaagaaagaaaacgagacgagagttgtgctgtgcgaactcggaaacccaatgaagaaaaatgcacagattgggattgccatgctggtcagtgtgggaaacctggaagaagcgggagaatccgtttccttccagcttcagatcaggagcaagaactctcagaaccctaactctaagatagtgttgcttgacgtgccagtgagggccgaagctcaagtggaactcagaggtaactctttccccgctagtctggtcgtggccgctgaggaaggggagcgcgaacagaatagccttgactcctggggaccgaaggtggagcatacctacgaactccacaacaacggaccagggactgtgaacggactgcacctgtcaatccacctgccagggcaaagccagccgtccgacctactgtacatactggatatccagccacagggcggtctgcagtgctttcctcagccaccagtaaaccctctcaaggttgactggggattgcccatcccatctccatcccccattcatccagcccaccacaaaagggaccgcaggcagatctttcttcctgaaccggaacaaccatcaaggttacaggaccccgtgctggtgtcctgcgactccgccccttgtactgtggttcagtgtgacctgcaggaaatggctagaggtcagcgcgcaatggtgacagtcttagccttcttgtggctgccatctttatatcaggtgtggacacagctcttaagggcactggaggagcgagcgattccaatatggtgggtgctggtgggagtgttaggtggcttgctcctcctcactatcctggttctggcaatgtggaaggttggcttttttaaacggaataggccaccgctggaggaggatgatgaggaaggggaatag

SEQ ID NO: 226958 - DNA, 660 bp, synthetic construct
  misc_feature 1..660: note = Description of Artificial Sequence: Synthetic coding sequence
  source 1..660: mol_type = other DNA
atggcgagctatttcggacatagcgtcgctgtgaccgatgtgaatggagatgggcgtcatgatcttctagttggggctcccttatacatggagagcagggcagacagaaagctggccgaagtcggacgagtctaccttttcctacagccaagaggaccacacgcgttgggcgctcctagtctcctcctaacaggtacccagttatacgggaggtttggatctgctatcgccccactgggcgacctggaccgtgatggttacaacgacattgccgttgctgccccatatgggggaccctctgggagaggtcaggtgctggtgtttctggggcagtcagaaggtctgcggtcccgcccttctcaggtcctggactctccattccccactggttcagccttcggcttcagcctgaggggtgccgttgacatcgatgataatgggtatcccggtgccttggactgtctccagctggaaatgcccaaaaaggggccatggactttcgctggctcagcaaaaaggcacggacagggactgatgcccggactggtatctcactacggcctcccagaaggtctgggtgagacatcctccggaggaggcggagtgggtaatccttgggaggatgagatgaggataccctgtcccaaccggcagttctag

SEQ ID NO: 226959 - DNA, 3201 bp, synthetic construct
  misc_feature 1..3201: note = Description of Artificial Sequence: Synthetic coding sequence
  source 1..3201: mol_type = other DNA
atggggcctggacctagtcgagcccctagggcacctaggctgatgctgtgtgccctcgctctaatggtggcggctgggggttgtgtggtcagtgcctttaatttggacacccgttttttggtagtgaaagaggccggaaatcctgggagtctgtttggttattccgtcgcgctacataggcagaccgagcgccaacaacgctacctcttattggctggagctcccagagagctggctgttcctgacgggtacacgaatcggaccggggctgtttacctgtgtcccttgaccgcgcacaaggacgactgcgagcggatgaatattaccgtgaaaaacgatccaggacaccacatcattgaggatatgtggctgggagtaactgtggcgtcccaaggcccagctggcagggtgcttgtgtgcgcccacagatacacccaggtgctgtggagtggttccgaggatcagcgacgcatggtaggaaagtgctacgttcggggtaatgatctggagctggattccagtgacgactggcagacataccataatgagatgtgcaattctaacacggactacctggaaactggaatgtgccagctgggaacaagtgggggattcactcaaaataccgtgtactttggggctcccggagcatataactggaaggggaactcgtacatgattcagaggaaggaatgggatctctctgaatactcttataaggatccggaagatcaaggcaatctctatattggctacactatgcaagtcggctctttcattttacaccctaaaaatattaccatagtgaccggagcgccacgccacagacatatgggagctgtcttcctgttatcccaggaggccggaggcgatctgcgtcgacggcaggtgttagagggcagtcaagtcggcgcttacttcggatccgctattgccctggccgacttgaacaacgatgggtggcaggacctactggtgggggctccctactattttgaacggaaagaagaggtgggcggagctatctatgtgttcatgaatcaggccggtacctcattcccggcacacccctctttgctgctgcatggccctagcggtagcgcgtttgggctttccgtagcctcgatcggagacatcaaccaggatgggtttcaagacatcgccgtgggcgctccgttcgagggactgggaaaagtctacatttatcattcctccagcaaaggacttctgagacaacctcaacaggtgatccatggcgaaaaacttggcctgcccggattagccacgttcggatactctctcagcgggcagatggatgtagatgaaaacttttacccagaccttctggttggcagcctgtccgaccatatcgtcctgctacgggctagacccgtgatcaatatagtgcacaagaccctggtcccaagaccagcagtgctggatcccgcattatgcactgcaaccagctgtgtgcaggtcgagctgtgcttcgcttataatcagtctgcaggcaaccccaactatagaagaaacattacactcgcctatacgctagaagccgatcgcgaccgtcgtccccctcgcctccggtttgccggttctgagagtgctgtgttccatggctttttctccatgccggaaatgcggtgtcagaagctagagctgctgctcatggacaatctacgggataaactgcgacccattattatctcaatgaattactccttgccactgcgcatgccggaccgaccccgtctgggactgagaagtttggacgcttacccaatccttaaccaggctcaggccctcgaaaatcatactgaggtccaatttcaaaaggaatgtgggcctgataacaaatgtgagtccaatctgcaaatgagggcagcgttcgtttctgagcagcaacagaaactgtctcgattgcagtattcccgcgacgtgcgcaaactgctgttaagtattaacgtaactaatacgcggacctcggaacgtagtggcgaggatgcccacgaggccctcttgactctggtcgtacctccggcactgcttctatcctcagtgcggccacccggtgcatgtcaggccaacgagacaattttttgcgagttgggaaatccttttaagcgcaaccaacgtatggagttactgattgccttcgaagtgatcggagtcacccttcacacgagagacctccaggtgcagctgcagctttcgacaagctcccatcaggataatttgtggccaatgatcctgaccctgttggttgattataccctccagactagcttgagcatggttaaccatcggctccaaagctttttcggaggcacggttatgggggagagcggcatgaagactgtcgaggacgtcggaagccccctgaagtacgaattccaggtggggccaatgggcgaaggattagtgggcctgggaaccttggtacttggactggaatggccctacgaggtttctaatggtaaatggctcttgtacccaacagagatcaccgtccacggtaatgggagctggccctgcaggccccctggcgacttgatcaaccccctcaatctgaccctgtcagatcctggcgaccgtccttcatccccacagagaagaagacgacaactcgacccaggcggaggacaggggccaccacctgtgactctcgccgcagctaaaaaggccaagtccgaaaccgtcctgacgtgcgctactgggcgtgctcattgcgtgtggcttgaatgtccaatacccgacgcacctgttgtgacaaatgtgacagtaaaggcacgggtgtggaactcaacattcatcgaggactatagggacttcgatcgtgtgcgcgttaatggatgggcgaccctcttcctcaggacatcgatcccgaccataaacatggaaaataagacaacctggtttagtgtggacatagactcagaactcgtggaggaacttccggctgaaatagagttatggcttgtgttagtggccgtgggcgcagggctgctgttgctcgggttgattatcctgttactttggaagtgcgatttcttcaagaggacacgatactaccagatcatgcctaagtaccacgcagttagaatacgcgaggaagagaggtacccgccacccggatcaactctgcctaccaagaagcactgggtgacaagctggcaaacccgggaccagtattattag

SEQ ID NO: 226960 - DNA, 3156 bp, synthetic construct
  misc_feature 1..3156: note = Description of Artificial Sequence: Synthetic coding sequence
  source 1..3156: mol_type = other DNA
atgggccctggcccaagccgggcaccacgggcacctagactcatgctctgtgccctggctctgatggtcgctgcaggtggctgcgtggtttctgcctttaatctagatacacgattcctggtggtcaaagaagccggaaatcccggatctcttttcgggtacagcgtcgccctgcaccgccagacagagcggcagcaaagatacctgttattagcaggcgctccaagggagctggcagtgccagatgggtacacaaataggaccggagctgtttatctctgtcctctgacagcgcataaagacgactgcgaacgaatgaatattactgttaaaaatgatccaggccatcacatcattgaggatatgtggttgggagtgacggtggcctctcagggaccagccggacgcgtcctggtgtgtgctcaccggtatacccaggtgctgtggagcggcagtgaggaccagcggagaatggttggcaagtgctacgtgagaggcaatgacctggagctggactcttccgacgattggcagacttatcacaacgagatgtgtaatagtaatacagactacttggaaaccgggatgtgccaactcggtacaagcgggggattcactcaaaataccgtgtactttggtgcccctggggcatataactggaagggcaactcatacatgattcagcgcaaagagtgggacctgagcgagtacagctacaaggatcctgaggatcaaggtaacttgtatatcggttacacaatgcaagtgggttcattcattctgcaccctaagaacattactatcgtgacgggcgcacccagacatcgtcatatgggagcagtctttctcttgtcacaagaagcaggcggagacctgcgcagaagacaagttctcgaaggctcccaggttggcgcatacttcgggtctgcaatagcattggccgatctgaataacgacgggtggcaggacctgctggtgggagccccatactatttcgaacgaaaagaggaagtcggtggtgccatctacgtgttcatgaaccaagccggaacttccttccccgcacatcctagcctgctgctgcatggcccatctggaagcgccttcggcctgagcgtggcctctataggggatattaaccaagacggttttcaggatatcgccgtcggcgctccattcgaaggactaggaaaagtgtacatttaccatagtagctctaaagggctgcttaggcagccacagcaagttattcacggcgagaagctcggccttcctggactcgctactttcgggtattctctcagcggccagatggatgttgacgagaatttttaccctgacctgctggtgggtagtctgtccgatcacattgttctgctccgtgccaggccagtgattaatatagtccacaaaactcttgtgccccgtcccgctgtactcgaccccgctctctgtacggccaccagttgcgtgcaggttgaactctgctttgcatacaaccagagcgcaggaaatcctaactaccgaaggaatatcaccctcgcgtacacgctggaggcagatcgggatcgcagacctccgcgtctcagattcgcgggatccgagagcgccgtatttcacgggttcttttctatgcctgaaatgagatgtcagaaactagagctcctactgatggataatctcagggacaagcttagacctatcattatttccatgaactattcgctgcctctgagaatgcctgatcgccctcgtttgggattgcgctccctcgacgcttaccccatccttaaccaggcccaagctctcgagaaccataccgaggtgcagttccagaaggagtgcgggccagataacaaatgcgagagtaatctgcagatgagggccgcttttgtgtccgagcagcagcagaaactctcgcgcctccagtacagtcgtgacgtgagaaagttgctgctgagtatcaacgtgacaaacacacgcacgtcagagcggtctggcgaggacgcgcacgaagcactcctgaccctggttgtaccccctgccttgcttctatcgtcagtcaggccacccggagcttgtcaggctaatgagaccatattctgcgagttgggaaacccctttaaacgtaaccagcgaatggaactgcttatcgcctttgaagtcatcggagttaccctgcatactcgcgacctccaagtacagttacagcttagtacctcaagtcaccaagataacttgtggcccatgatcctgaccttactggtcgattacacattgcagactagtctcagcatggtcaaccaccgcttgcagtccttctttggcggaactgtaatgggcgagagcgggatgaagactgttgaggacgtcggcagcccattgaagtatgagttccaggtggggcctatgggggagggactggttggcctcgggaccttggtcctcggtctggagtggccctacgaggtgagcaatgggaaatggctgttgtaccctacagaaattacagtgcacggcaatggcagctggccatgtcgacccccaggggacctcattaaccctttgaacctgactttatccgatccgggagatagaccgtcatcaccccagcgcagaaggaggcagcttgatcctggtggcggtcaagggcctcctcccgtgaccctcgccgctgcgaaaaaagcaaaatctgaaactgtcctgacatgcgcgacaggacgtgctcattgcgtgtggctggagtgtccgattcctgacgcccctgtcgtgaccaacgtcactgtgaaagccagggtgtggaatagcacatttatcgaagactacagggattttgatagggtccgggtgaatggttgggcaacactgtttttacgcacatccatcccaaccatcaacatggagaataaaacaacctggttttctgtggacatcgactcagaacttgtggaggagctcccggcagagatcgaactgtggctcgtcctagtggccgtcggcgctgggctgctcctcctaggcctcatcatcctgctgctctggaagtgcggcttcttcaagagggctcggacgcgggcattgtacgaggctaaaaggcagaaggcggagatgaagtcacaaccctccgagactgaacgtctcactgacgactactag

SEQ ID NO: 226961 - DNA, 3114 bp, synthetic construct
  misc_feature 1..3114: note = Description of Artificial Sequence: Synthetic coding sequence
  source 1..3114: mol_type = other DNA
atgctctgtgccctcgcactaatggtggccgctggcggttgcgtcgtgtcggcttttaacctggatactcgttttctagttgtcaaggaagccggaaatccaggtagcctgttcggttattccgttgctcttcacagacagacagaacgccagcagagatacttgctgctcgccggagctcctagagagctggcagtaccagacggatatacaaatcgcaccggagccgtgtacctatgcccactaaccgcacacaaagatgactgcgagcggatgaacattacagtgaaaaatgatcctggtcatcatatcatcgaagacatgtggttgggggtgaccgtcgcgagccagggacccgcagggagggtgctggtttgtgcccatcggtacacacaggtcctttggagcgggagtgaagaccaacgcaggatggtgggtaagtgctacgtacggggtaacgacctggagctggactcgtccgatgactggcagacctaccacaatgagatgtgcaactcgaataccgactaccttgagactggtatgtgtcagctgggcacctccggaggctttactcagaatacagtctactttggtgctcctggcgcttataattggaaaggaaacagctatatgatccagcggaaagagtgggacttgtctgaatactcttataaggaccctgaggatcagggaaatttatatatagggtatactatgcaagttggatccttcatactccatcctaagaatattactatcgttaccggcgctcccaggcataggcatatgggggctgtcttcctgctgagccaggaagctggcggtgacttaaggagacgccaagtcctagaggggtcccaggtaggggcttacttcggcagtgctatagcgctggccgacctgaataacgacgggtggcaggatctattagttggtgccccttactactttgaaagaaaagaggaggtcggcggagccatttatgttttcatgaaccaggccggaacaagctttcccgctcatccttcactcctgcttcacgggccatccgggagcgccttcgggttgtccgttgcaagcatcggtgacattaaccaggatggattccaggatattgccgtgggggcacctttcgaagggctgggcaaggtgtatatctaccacagtagtagcaaaggattgctccggcagccacagcaagtgatccacggagaaaaactgggccttccaggactggcaaccttcggttactccctgtctggccaaatggacgtggacgaaaacttttatcccgacctccttgtagggtccctatctgatcatatcgtgctccttagggccaggcctgttattaacatcgtgcacaagacactggtgccaagaccggctgtgttagacccagccctttgtacagccacatcctgtgtgcaagtggaactgtgctttgcctacaatcagtccgcaggtaatcccaattaccgcagaaacatcactcttgcttacacgctagaggccgacagggacagaagacctcccaggttgagattcgctggaagcgaaagcgctgtatttcatggctttttctccatgcctgagatgaggtgccagaagctagagctcctactaatggataaccttagagacaaactgcgccctattataattagtatgaactactccctcccactccgaatgccagatcgacccaggctcgggctgaggagcctcgatgcgtacccaatactaaatcaggcccaggccctggagaaccacaccgaagtccagtttcagaaagagtgcggcccagataataaatgcgagtctaacctccagatgcgcgctgcgtttgtctccgaacagcagcagaaactgtcccgtctccaatactcacgagatgtacggaagctgctgctctctatcaatgtgactaatactagaacctctgaacgcagcggagaggacgcacacgaggcactcctgaccctagtcgttcctcctgctctgctgctttcctccgttcgccctccaggcgcatgtcaggcaaatgaaacgatcttctgcgaattggggaatccatttaaacggaaccagcgtatggagcttctgatcgcttttgaagtcataggcgtgacactccacaccagggatctgcaggtacagctccagctctccaccagctcccatcaggacaatctgtggccaatgatcctaacactgttagtggactacacactacagaccagcctgagcatggtgaaccaccgccttcaatctttttttgggggtacagtcatgggggaaagtggtatgaaaaccgttgaggatgtgggcagcccacttaagtacgagttccaggtgggacccatgggtgaaggccttgtgggcctcggaactctcgtccttggtttagaatggccgtatgaagtcagtaacggaaagtggctgctgtatcccacagagatcactgtacacggaaacggaagctggccttgtagaccaccaggagatctgataaaccctctcaaccttaccctgtcagacccaggcgatcggccttcttcaccacagcgtaggcggcgacagctcgatccagggggaggacaggggcctccccctgttactctggctgccgcaaagaaagctaaatcagagactgttctgacatgcgctactgggagggcacactgcgtgtggctcgaatgtcccatccccgacgcccctgtagtgaccaatgtgacagtcaaagctcgtgtgtggaactccaccttcattgaggactatcgtgactttgatagagtgagggtcaacggttgggctacccttttccttcggacgtctatccccactattaatatggagaataaaacgacttggttcagtgtcgatatagacagcgaactggtggaagaactaccagcggaaatcgagctctggcttgtactggtggctgttggagccggattacttctcctcggtctcataattctccttctctggaagtgcggcttctttaaaagggccaggacaagagccctgtacgaggccaagcggcagaaggccgagatgaagagccaacccagcgagacagagcgcctgacggatgactactag

SEQ ID NO: 226962 - DNA, 885 bp, synthetic construct
  misc_feature 1..885: note = Description of Artificial Sequence: Synthetic coding sequence
  source 1..885: mol_type = other DNA
atgatacagaggaaggaatgggacttatcggagtattcgtataaagatcccgaggaccaggggaacctctacatcggttacactatgcaagttggctcgttcatccttcacccaaagaatataacgatcgtgacaggagctcccagacatcggcatatgggcgcagtgttcctactgtctcaggaagcagggggagacctcagacggcgacaagtattggagggctcccaggtcggggcttattttggctccgccatcgctttggctgaccttaataatgatggctggcaggatctgcttgtgggcgctccttactactttgaacgaaaggaggaagtcggaggcgcaatctatgtgttcatgaatcaggccggaactagctttccggcacaccccagccttctgctgcacggtcctagcgggtctgcttttggtctgtccgtggcatccatcggggacatcaatcaggacgggtttcaggatattgcggtgggtgccccttttgagggactggggaaagtctacatctatcactccagctccaagggtcttttaaggcaacctcaacaggtgatacacggcgaaaaactcggactcccaggactggcaacatttggctattcactcagtggacagatggacgttgatgagaatttctaccctgacctgctagtgggaagtctcagcgatcacattgtcctcctgagagcaagacccgtgatcaatatagtccacaaaacattagtccctcgccctgcggtactggatcccgctctgtgcactgccacttcctgcgtgcaggtggagctctgcttcgcctacaaccagtccgccggtaatccaaattaccgaagaaatatttcagagtgttggggggctgcgtag

SEQ ID NO: 226963 - DNA, 3108 bp, synthetic construct
  misc_feature 1..3108: note = Description of Artificial Sequence: Synthetic coding sequence
  source 1..3108: mol_type = other DNA
atgggcggtcccgcagccccacgtggagctggccgtctgcgcgcacttttgctcgctctggtggtcgccggtattccagccggtgcctacaacctggacccccagcggccagtccacttccaggggccagcggatagcttcttcggctacgcagtcttggaacattttcacgacaacacaaggtgggtgttagtcggggctcctaaagctgattctaagtattcaccaagtgttaaaagtccaggagctgtgttcaagtgccgcgtccacaccaatcccgatagacgatgcaccgaactcgacatggctcggggtaagaatcggggaacttcctgcgggaaaacctgtcgggaagaccgagatgacgagtggatgggggtctcattggcaagacagcccaaagcagatggcagagtgctggcatgcgcacacaggtggaaaaatatctattacgaagctgatcacattttgcctcatggcttttgttatatcatcccatcaaacttgcaggccaaaggtagaacactgatcccttgttacgaagaatacaagaagaagtacggtgaagaacatgggtcctgtcaggcaggaattgccggattcttcactgaggaacttgttgtgatgggggcacctggctccttttactgggccggaacgataaaagtactgaacctgaccgataatacctacctgaagctaaacgacgaagtgattatgaaccggaggtacacatatctcggctacgcggtcactgcagggcacttctctcatccgtccactatcgacgtagtaggcggtgcccctcaagataaaggtattgggaaggtgtacatttttagggccgaccgacgaagtggcacactgatcaagattttccaggccagcggcaagaagatgggttcctatttcgggtccagcctatgcgcagtggatctcaacggagacggtctgagcgaccttcttgtgggggcacccatgtttagcgaaatccgtgatgagggacaggtgactgtgtacatcaatcgcggtaacggggctttagaagagcaactggctctgacgggagacggggcttataacgcccacttcggggaatcaatagcttctctcgacgatctggataacgacgggttccccgacgtggccattggcgcacctaaggaggacgacttcgctggggctgtatatatttatcatggggacgcaggcggaatagtgccccagtatagcatgaaactgagtggacaaaagatcaatcccgtgctcagaatgtttggccaatcaatctccggaggcatcgacatggacggcaatggatatccagatgttacggtcggtgccttcatgtccgattcagtcgtgcttctgagggccagacccgtcatcacggttgatgtgtcgatctttttacctggatctataaacattacagcccctcagtgtcacgacggccaacagcctgtgaattgtttgaatgtcaccacatgcttcagcttccacggtaagcatgtgcctggggagatcggcctcaactacgtcctgatggctgacgtggcaaagaaggagaaaggccagatgccacgagtctattttgtgctgttgggcgaaacgatgggacaggtaacggagaagctgcaactgacttatatggaagagacatgccggcactacgttgcccacgtaaaaaggagagtacaggacgtgatcagtcccatcgtgttcgaagccgcatacagcctcagtgagcatgtgactggggaggaggaacgggaactgcccccactgacccccgttctccgttggaaaaagggccagaagatcgcccagaagaaccaaacagtatttgaaagaaattgcagaagtgaagactgtgcagctgacctgcagctacagggcaagttactgctctcaagtatggatgaaaaaacgctatatctcgccctgggcgcagtgaaaaatatctctcttaatatttcaatctccaacctgggagacgatgcgtacgatgctaacgtaagctttaacgtcagtagagagttgttcttcatcaatatgtggcagaaggaagaaatggggataagctgtgaacttctggaaagcgacttcctaaaatgttcagttggcttccctttcatgcggtcaaaatctaaatatgagttctcagttatattcgacactagccacctttcaggcgaagaggaagtactgagttttattgtaaccgcccagtccggcaataccgagaggagtgaatctcttcacgataacaccctggtgttgatggtgccactgatgcatgaggtggacacatccatcacaggcattatgtctccaacaagcttcgtgtatggcgaatccgtggacgccgctaattttattcagttggacgatttggaatgtcatttccaacctatcaacattaccctgcaggtatataatacaggcccatcaacactgccaggaagcagtgtatctattagcttcccaaatcgtttgagttctggcggtgctgaaatgttccacgtgcaagagatggtggtgggccaggagaagggaaattgctccttccaaaaaaatcccacgccttgcatcattccacaggaacaagagaacatatttcataccatatttgcattctttacgaagagcggcaggaaggtcctggactgtgaaaagccaggcattagttgtctgacggctcactgcaatttttctgccctggccaaggaggaatccagaacgatcgatatctatatgctgctcaataccgaaattttgaagaaggattcaagttctgtcatacagttcatgtcccgcgctaaggttaaagtggacccagcactccgagtggtggagatcgctcatggaaaccccgaagaggtcaccgtcgtgttcgaggcccttcacaacctggagcctcggggatacgtggtaggctggatcatcgctatctccctgctggtcggcattctgatctttctgctgctggctgtgctcctttggaagatgggctttttccggaggcgctacaaggagattatcgaagcggaaaagaaccgcaaagaaaacgaggactcttgggactgggtgcagaagaatcagtag

SEQ ID NO: 226964 - DNA, 696 bp, synthetic construct
  misc_feature 1..696: note = Description of Artificial Sequence: Synthetic coding sequence
  source 1..696: mol_type = other DNA
atgtgccagccccctccaacagcaccaggatcctggcccgttgcccgaccatgtaccgaatccgtggggagaactcatacacagcgagtccctgctagctgctgggctcgagcaggtcgtagctctcgccagtcaccaacacctagacaattcgccctcatgcagtacagcaacttgctcaagattcatttcacatttacgcagttcaggaccagccccagccaacagagcctggtcgacccaatcgtgcagctgaaaggcctcacattcaccgctaccggcattctgaccgtcgtcactcaactatttcatcataagaacggagcgaggaagagcgccaaaaagatactcatcgtgatcacagacggtcagaaatataaggatcccctcgagtattctgacgtgatccctcaggcagagaaggcgggaattatacggtatgccatcggcgtacgattatttttcactcctgccccaggaagcgcctgtatctccttcaggtgctccgcggctgggctcattcttttgggctgcctttctgcagccggaggcaccaggtttcccggaacacactgtcaggcaggagccgaataccaccagctgtctgcatccgcagggcctcgtgtgcagggcggtcagctctgctcaccgtggcagcatccagaggccgcagcgggagaggacctttgcagctag

SEQ ID NO: 226965 - DNA, 3486 bp, synthetic construct
  misc_feature 1..3486: note = Description of Artificial Sequence: Synthetic coding sequence
  source 1..3486: mol_type = other DNA
atgacctttggcaccgtcctgttgctgagtgtcctcgcctcataccacggctttaacctggacgtggaggagcctaccatattccaggaagacgcagggggattcgggcagagcgtggtgcagtttggtggatcacgtctggtagtaggggctccactagaagtggtggccgcaaaccagacaggacggctctacgactgcgccgcagccaccggtatgtgccagccaattcccctgcatatcaggcctgaggcagtgaatatgagcctcggcttgactcttgctgctagtactaatggaagtagattactagcctgcggccctactctgcatagagtctgtggggagaacagttattccaaaggttcatgccttctgctgggatccagatgggagatcatccagactgtcccagatgctaccccagagtgccctcaccaggagatggacattgtgtttctcatagacggcagcgggtcaatcgatcagaacgactttaaccagatgaaagggtttgtccaggctgtgatgggccaatttgaaggaacagataccctctttgccctgatgcaatactcaaacctgcttaagatccattttaccttcacacagttccgtacgagcccatcacagcagtcactggtggaccccatcgttcagctgaaaggcttaacattcacggcaaccgggattctgacagtcgtaactcaactgtttcatcataaaaacggagcccgtaaatcagccaagaagatcctgatcgtaattaccgacggccaaaagtataaagaccccctcgagtacagtgatgtgattccacaggccgaaaaggccggaatcatcaggtacgccattggtgtaggtcatgcctttcaaggacccacagctcggcaggagttgaatactatttcaagcgcccctcctcaggaccacgtgtttaaagtggataacttcgcagctctcggctccattcagaaacagcttcaggagaagatctatgccgtggagggcacacagtcacgagccagcagcagcttccaacatgaaatgtcgcaggaaggattttctacagcactgacgatggacggactctttctgggcgcagtcggcagtttttcttggtctggcggagcttttttgtatcccccaaatatgtccccgacatttatcaacatgtctcaagaaaacgtggatatgagagattcctatctagggtacagtaccgaactggcactatggaagggagtgcagaacctggtgctgggcgctcctagatatcagcacacaggaaaagcagtgattttcactcaggtgagccgccaatggcggaagaaagcggaggtcaccgggactcagattggcagttactttggtgcctccctttgtagtgtcgatgtcgactcggacggcagcaccgacctgatactgattggcgctccgcactactacgaacaaacaagggggggacaggtttctgtatgcccccttcctcgaggccgtgtgcaatggcagtgcgatgctgttttgagaggtgaacagggacacccatggggcaggttcggcgctgcgctaactgtcctgggagacgtcaacgaggataaactgatcgacgtagccattggggctcccggtgaacaggaaaaccgaggggcagtatacctgtttcatggagctagcgaatcaggaatcagcccaagccattcccaacgcatcgcttcaagtcagttatctcctagactccagtacttcgggcaggcgctgtccgggggacaggatcttacacaggatggcctcatggacctggcggtgggggcacgcggacaggttttgctgctccgcagtctgcctgtgttgaaggtgggagtagcgatgcgcttttccccggtggaggtggccaaggctgtttataggtgttgggaggagaaacccagcgcgcttgaagcaggggatgcgaccgtatgcctcaccatccagaagagctctctcgaccagctcggagatattcagtcttcagtgcgattcgaccttgcactggatccagggaggcttacatcgagagcaatattcaatgagactaagaatcctaccctcacacgccgaaaaaccctcggcctggggattcactgcgagaccctcaagctgttattacccgactgtgtggaagatgtggtctcaccaattattttacacctgaatttctccttggtgcgggagcccatcccatctccccagaaccttagacctgtgctggctgtaggatcacaggatcttttcaccgcatctctgccgtttgagaaaaattgtggccaggatggtctgtgtgaaggagatttaggggtgacactaagtttttccggcctgcaaacactgaccgtgggatcctccctggagctgaatgtgatcgtaacggtctggaacgccggtgaggattcgtatggcactgtggtgtccctgtactaccccgctggcctgtctcaccgccgagtttccggggcacaaaagcagccacaccaatccgcattgaggctcgcgtgtgaaactgtacccactgaggacgaggggctcaggagcagcaggtgctctgtcaatcatccaatttttcatgaaggttctaacgggacttttatagtcaccttcgatgtttcctataaagcaacactcggggataggatgctcatgcgagcttccgcttctagtgaaaataataaggctagcagcagcaaagcaaccttccagctggaactccctgtcaaatacgccgtatataccatgataagcagacaagaagagtccacaaaatactttaactttgcaacctcagacgagaaaaaaatgaaggaagctgagcacaggtatcgcgttaataatctaagccagagggacctggccatcagcataaatttctgggtacccgtcctgctcaacggtgtggcagtttgggatgtggtgatggaagccccttctcagtcactgccctgcgtgtccgaacgtaagcctcctcagcacagcgattttctaacacagatatccaggagtcctatgttggactgtagcatcgccgactgcttgcaattcagatgtgacgtgccaagttttagtgttcaagaagagctggattttaccctgaagggtaacctttcttttggatgggttagagagaccttgcagaagaaagtcctggttgtatccgtggcagagatcacgtttgacacgagcgtctatagccaattacccggacaggaggccttcatgagagcgcagatggagatggtgctcgaggaggacgaggtttataacgcgatccccatcatcatgggctcaagcgtcggggcactgctgctgttggccctcatcacagccacactgtacaagctgggcttttttaagcggcactacaaagagatgctggaggataagcccgaagacactgccacctttagcggagatgatttctcttgtgttgcccctaacgttcccctgagttag

SEQ ID NO: 226966 - DNA, 3534 bp, synthetic construct
  misc_feature 1..3534: note = Description of Artificial Sequence: Synthetic coding sequence
  source 1..3534: mol_type = other DNA
tgcgccctctcaccaacctttcatttccctagtaccagatgttctggcatgactttcggcactgtgcttctcctctctgtgttagcaagttaccacggattcaatctcgatgttgaggagcccacgatctttcaggaggacgccggtggcttcggtcagagcgttgtgcagttcggtggtagccgactggtggtcggggcaccactcgaggtggtcgctgccaatcaaacgggcaggttatacgattgtgcggcagcgacaggcatgtgtcaacctatccctctgcacattcgcccagaagccgtgaatatgagcctcggtctgaccttggctgctagtacgaatgggagcaggctcttagcctgtgggcctaccctgcatagggtctgtggtgaaaacagctacagcaagggttcctgccttctgctggggtcacgttgggagataatacaaacggtacccgacgctacacctgagtgccctcatcaggaaatggacatcgttttcctcattgatggatcggggagtatcgatcagaatgacttcaatcagatgaaaggcttcgtgcaggccgtcatggggcagttcgaaggcaccgatacactttttgcactgatgcagtatagtaacctgcttaaaatacatttcacctttacccagttccggaccagtccttcacagcagtcattagtggatcctattgtgcaacttaagggcctcacttttactgctacgggaattctgaccgtggtgacacagctgtttcaccacaagaatggcgctcgaaagtccgctaagaaaattctgattgtgataaccgacggacaaaaatataaagatcctttagagtactccgacgtgatcccacaggccgagaaagcgggtatcatccgatatgccataggtgtaggtcacgccttccagggccctaccgcccgtcaggagctgaatacaatcagctcagccccaccccaggatcacgtcttcaaggtggacaatttcgcagccctcgggtccatccagaagcaactgcaagaaaaaatctacgcagttgagggcacacagtcacgcgcttctagttcatttcaacatgaaatgagtcaggaggggttcagtaccgccctaacaatggacggactgttcctgggcgcagtcggaagcttttcttggagtggcggagcttttctgtaccctcccaacatgtcaccaacgttcataaatatgtcccaggaaaatgttgacatgagagactcgtacttaggctattcaacagagctagctctatggaaaggagtgcagaatcttgtcttgggggctccgagataccaacacaccggcaaagccgtgatcttcacccaggtatctcgccagtggagaaaaaaggccgaggtgaccggcactcagatcgggtcctatttcggcgcttctctctgcagcgttgatgtcgactccgatggcagcacggacctcattctcatcggagcccctcactactacgaacagacacgagggggacaggtatcagtgtgtcccttgccgaggggcagggtccagtggcaatgcgatgcagttctgcggggtgagcaggggcatccttggggacgttttggcgctgcgctaacagtgcttggcgacgtgaacgaagataaactcatcgacgtggccataggcgcaccgggagagcaggagaatagaggcgcagtttacttgtttcacggcgcttctgagagtggcatctccccttcgcactcacagcggattgcttcatcacagttgagccctcgccttcagtattttgggcaagcactgtcgggtgggcaggacttaactcaagacggtctgatggatctcgctgtgggagcccgtggacaggtgttacttttgcggtcactgcccgtcctgaaggtgggcgtggctatgcggttctcccccgtggaggtggcaaaagctgtgtatcgatgttgggaggaaaagccatcagccttagaggccggtgacgctaccgtgtgcctgactatccagaaatcgtccctggatcaacttggggacattcagtccagtgtgagatttgatctcgccctggatcctggcaggttgacgagcagggccattttcaacgagacgaaaaacccaacacttacacggagaaagacgttggggttgggcatccactgcgaaacgctcaagcttctgctgccagactgcgtggaagacgtggtttcccctatcatcttgcacctgaatttctctctggttagagagcccattccgtccccccagaatctgcgtccggtgctcgcagtcggctctcaagacctgttcacggcttctttgcccttcgagaagaactgcgggcaggacgggttgtgtgagggagacctgggcgtgactctgtccttctctggcttacagacgcttaccgtagggagcagcctggaactgaacgtcattgtgacagtatggaacgccggagaggactcgtatggaaccgtagtatctctgtattatccggcaggactttcccatcgtcgggtcagtggagcacaaaaacagcctcaccaatctgccctgcgccttgcttgtgagactgttcctactgaggatgaaggtcttaggtcttcacggtgctcagtaaatcaccccatcttccatgaaggctccaacggtacttttatagtaaccttcgatgtgtcctacaaagctactctcggagacaggatgttgatgagggcgtcagctagtagcgagaacaataaagctagttcatctaaggcaacatttcagctcgagctgccagtgaagtacgcggtgtacaccatgataagccgacaggaggaatcaaccaagtactttaacttcgccaccagcgatgaaaaaaagatgaaggaggccgagcatagatatcgagtcaacaatcttagccagcgcgacttagcaatatccatcaatttttgggtaccagtgttgctgaatggggtagccgtatgggatgtggttatggaagccccatcgcagtccctgccttgtgtctccgaaagaaaacctcctcaacactccgattttctgacacagatcagcaggtcacccatgctcgactgtagcatcgctgactgcttacaatttaggtgtgacgtcccatcattctcagtccaggaagaactcgactttacactgaaagggaacctgtccttcggatgggtccgggaaactctgcagaagaaggtgctggtggtgtcagtggcggaaatcacatttgacacgtctgtctatagccagctgccaggacaggaggctttcatgcgagcccaaatggagatggtgctcgaagaggacgaggtgtataatgctataccgattatcatggggtccagcgtaggagccctgctgttactggccctgatcacagcgaccctgtataagttggggtttttcaagcgccactacaaggaaatgctggaggataagccagaagacaccgcaactttcagcggggatgacttttcatgtgtcgccccaaatgttccactctcatag

SEQ ID NO: 226967 - DNA, 3513 bp, synthetic construct
  misc_feature 1..3513: note = Description of Artificial Sequence: Synthetic coding sequence
  source 1..3513: mol_type = other DNA
atgaaagactcatgcatcaccgtcatggctatggctctgctgtctggatttttcttctttgccccagcatcaagttataacttggacgtgaggggcgcaaggagcttttctcccccaagagcaggcaggcactttggctatcgggttctccaggtgggaaatggcgttattgtaggcgcaccaggtgaaggaaatagtaccggctcactgtaccagtgccaaagtgggaccggccattgcctgcccgtgaccctacgaggtagtaactatacctctaaatatctgggaatgacactcgcaactgacccaaccgacggctccattctcgcctgcgaccccggtctgtccaggacctgtgatcagaacacatacttaagcggtctctgttacttatttcgccaaaacctgcagggccctatgctgcagggacggcctggattccaggaatgcataaaggggaatgtggatcttgtgttcctcttcgacgggtcgatgtctctgcagccagacgagtttcagaagattctggattttatgaaggacgttatgaaaaaattgtcaaacacgagttatcagtttgccgcagtacagttcagcacaagctataagaccgagttcgatttttcagactatgttaagcggaaggaccccgacgctttgctcaagcacgttaaacatatgctgctgctgaccaatacttttggagcgatcaactatgtggccacagaggtgttcagagaagaattgggagctcgcccagacgccactaaagtgttaatcattataaccgatggggaggccacagactccggaaacattgatgctgcgaaagacattattaggtacatcattggaatcggaaaacacttccagacaaaggaaagccaggaaaccctgcacaagttcgcttctaagcctgcctcagagtttgttaagatcctggataccttcgagaaactcaaggacctgttcacggaactgcagaagaaaatctacgtaatcgaagggacgagcaaacaggacctgacgtccttcaacatggagctcagctcatcaggaatcagtgccgatctttcccgcggacatgcagtggtgggcgctgtaggcgcaaaggactgggcaggaggtttcctggacctgaaagccgacctccaggacgatacattcattgggaacgagccattgacaccggaggtgcgggcaggctatttaggctacacagtgacgtggctaccatctaggcagaaaacttctcttctcgcttccggggctccgagatatcagcatatggggagggtgcttcttttccaggagccccaggggggtgggcactggagccaggttcaaaccatacacggcactcagatcggctcctactttgggggagagttgtgcggagtggacgtcgaccaggacggagaaacggaattgttgctgattggggcaccactgttctacggtgagcagagaggaggcagggtgtttatctaccagcggaggcagctgggctttgaagaggtgagtgagcttcagggcgatcctggatatcctcttggaaggttcggcgaggctatcactgcccttaccgatatcaacggcgacggcctggtggatgttgcggtcggtgcaccgttggaagaacagggggctgtgtatatcttcaatgggaggcacgggggtcttagcccacagccctcccagaggatcgagggtacgcaggtgctttctggcatccagtggtttggaagaagcatccatggggtaaaggacctcgagggtgacggtctggcagatgtggccgtgggggcagagtcccagatgatcgtactcagtagccgcccagttgtggatatggttactctgatgtctttctcccccgcagagatccccgtacacgaggtggaatgtagctactctaccagcaataaaatgaaggaaggcgtgaatattaccatctgttttcaaattaaatctctgatcccccagttccaagggcgattggtggctaatctgacttacactcttcaactggatggtcatcgcacacgacggaggggcttgtttcctggcggaagacatgaactaagacgcaacattgccgtcacaacctctatgtcctgcacggatttttcattccacttcccagtgtgtgtacaggatctgatcagccccatcaatgtcagtttgaacttcagcttatgggaggaggaaggcactccccgagatcagcgtgcacaaggtaaagatatcccccctatcctgagaccaagtttacacagcgagacatgggaaatcccctttgaaaagaattgcggagaggataaaaagtgtgaggctaatctgcgtgtcagcttcagcccagcgcgttctagggccctgaggttgacagcatttgctagtctgtctgttgaattgagcctgagcaatctggaagaagatgcatattgggtccaattagacctacacttccctccgggtctcagttttagaaaggtggagatgctgaaacctcatagccaaatcccagttagctgtgaagagttacctgaggagtctaggctgctgagccgagccttgtcttgcaatgtcagcagtcccatatttaaggccggacactcggttgctcttcagatgatgttcaacactctcgtaaatagcagttggggtgatagtgtcgagttgcacgccaatgtgacatgcaataacgaggacagcgacctgctggaggacaatagcgccacaacaattatccccatcctgtacccaattaacattttaatacaggatcaggaagactccaccctgtacgtgagctttacccccaaaggccctaaaattcaccaagtaaaacacatgtatcaggtgagaatccagcccagcatccatgatcataatatccccacccttgaggcagtcgtcggcgttccgcagccaccgagcgagggcccaatcacccaccagtggtccgtgcagatggagccaccagtgccctgccattatgaggatctcgagagactcccagatgctgccgagccctgcctgcctggagctctctttcgttgtcctgttgtgtttcggcaggaaattctggtgcaggtgattggcactctggagctggtcggcgagatcgaagcttcctccatgttctcactctgttctagtctatccataagtttcaactcttcgaagcactttcacttgtacgggagcaacgcgagcctggctcaagtggtcatgaaagtcgacgtcgtatatgaaaagcagatgctctatctatacgttctgagtggtatcgggggtctcctgttacttctattgatctttatagtgctgtataaggtgggattttttaagaggaatcttaaggaaaagatggaggccggaagaggcgtgccaaatggtatcccagcagaggattccgaacagctggctagtggacaagaagcaggcgaccctggttgcctgaaaccactccacgaaaaggactccgaatcggggggtggaaaagattag

SEQ ID NO: 226968 - DNA, 3261 bp, synthetic construct
  misc_feature 1..3261: note = Description of Artificial Sequence: Synthetic coding sequence
  source 1..3261: mol_type = other DNA
atgaaagattcctgtatcacagtcatggccatggctctcctgtcaggattttttttttttgcccctgcttcttcatacaatctggatgttagaggcgctcgatccttttcccctcctcgggctggacgtcatttcggttatcgggtgctccaggtgggtaatggagttatcgtgggcgcacccggagaaggaaatagcactggaagcctttatcagtgtcagagcggcaccggccactgtctgcctgttactctccgcggatccaactacacttctaaatatttaggaatgacgttggccacagatccaacagatggttcgatcttgttcgccgctgttcagttcagtactagttacaaaaccgaatttgatttctctgactatgtcaaaagaaaagatccagatgcccttctgaagcatgtgaagcacatgctgctattgaccaacacctttggagcgataaactacgtggcaactgaggtttttcgcgaggagctgggagctagacccgatgccacaaaggtgctgattataatcactgacggcgaggccactgactcaggtaacatcgacgccgcaaaagacattatccggtatataataggaatcggtaaacactttcagactaaagagtctcaggaaaccctacacaagttcgcctcaaaaccggcttccgagttcgtgaaaattctggacacgtttgaaaaactcaaggatcttttcactgaactccagaagaagatttacgtgatcgaggggaccagcaaacaggacctcacctcttttaatatggagctttcttcctcagggatttccgcagacctttctcgaggacatgcagtcgtaggagcagttggtgcgaaggactgggccggtggatttttggatctcaaagccgacttgcaagacgatacattcatcggcaacgaaccccttacgccagaagtcagagccggatacctgggatataccgttacgtggcttcctagcaggcagaagacgagcctgcttgctagcggcgcacctaggtaccagcatatgggaagggtgttgctgtttcaagagccacaggggggtgggcactggtcacaagtgcagacgatacatggaacgcaaatcggatcttactttgggggtgaactatgcggcgtggatgtggatcaagacggggaaacagaactgctactgatcggagcccctcttttctacggagaacagcgagggggtagggtttttatctaccagaggcgacagttgggttttgaggaggtgtccgagttgcaaggagacccaggctatcccctgggccgatttggcgaagctatcactgccctgacagacatcaacggcgatgggctagtggatgtcgcggtgggtgctcctctcgaggagcagggcgctgtgtacatttttaatgggagacacggcggactgtcaccacagcccagtcagcgcattgagggaacacaagtattatcgggcattcagtggttcgggaggtctatccacggcgtgaaggatctggaaggcgacggactggcagatgtagctgtgggagcagaatcacagatgatcgtgttatcatcccgcccagtggtagatatggtgactttgatgagcttctcccctgcagaaattccagtccatgaagtggaatgtagctatagtaccagcaataagatgaaggaaggggtgaacatcacaatatgtttccagataaaatctctgattccccagttccaaggacgactagtggcaaatctgacatataccctgcagctcgacggccatcggacaaggaggaggggcctctttccgggtgggcgacacgagttaagaagaaacatagccgtcactacatccatgagctgcactgacttctcatttcacttccccgtatgtgtgcaggacctcatctcccccatcaacgtgagtctcaatttcagtctgtgggaggaagaggggactcctcgcgatcagagggctggaaaagacatcccccctattctgcgaccatcattacatagcgaaacttgggagattcccttcgaaaagaactgcggcgaagataagaagtgtgaagcaaatctgagggttagcttttctccagctcgctccagggcactgaggctcacggcgttcgctagcctttccgttgagctcagcttgtcaaatctggaggaggatgcttattgggtgcagctggacctgcacttccctccaggtctttcttttcgcaaggttgagatgctgaaaccacactctcagatacctgtgtcatgtgaggagctgccggaagagagccgactcctatctagagctctctcctgcaatgtgtcaagtcccatattcaaagccggacatagcgttgctttacagatgatgtttaataccttagtaaactcaagctggggggacagtgtggaactacatgccaacgtcacttgtaataatgaagatagcgacttgcttgaagacaacagtgccacaaccattataccgatactctatcctatcaatatcctaatccaggaccaggaagactccaccctgtatgtatcattcacgcctaagggccctaagattcaccaggtgaagcacatgtaccaggtgcggatacagcccagtatccacgaccataacattcctacactggaggctgtagtcggggttcctcaacccccatcagagggccctataacgcatcagtggtcagtccagatggagccacccgtgccttgtcactacgaggacctggagagattgccagacgcagctgaaccttgtttaccaggggcactgttcagatgcccagtcgtatttcgacaagaaatcttagtacaggtcatcggcaccctggagctcgtgggagaaattgaggccagcagcatgttctctttgtgcagcagtcttagcatctccttcaacagctcaaagcactttcacttatatggctcgaacgcctcgctggctcaggtagtgatgaaggtggacgtggtgtatgaaaaacagatgctatacctctacgtgctgtccggtattggcggactcttgctcttgttgttgatctttatcgtgctttataaagtagggtttttcaagcggaatctgaaggagaaaatggaagcagggagaggcgtgccgaacggcatccccgctgaggactctgagcagttagcatccggccaggaggccggagatcccggatgcctgaagcccctgcacgaaaaggactctgagagcggcggaggaaaggattag

SEQ ID NO: 226969 - DNA, 1215 bp, synthetic construct
  misc_feature 1..1215: note = Description of Artificial Sequence: Synthetic coding sequence
  source 1..1215: mol_type = other DNA
atgaaggacagctgcatcactgtcatggcaatggccctcctctctggtttcttcttctttgcacctgcctcctcctataatctggacgttagaggagcaagatcctttagtccaccccgagcgggtaggcattttggctaccgcgttctgcagatcaagagtctgatacctcagttccaggggcgactcgtggctaaccttacctataccctacagctggacgggcaccggacccgtcgccgtggcctgtttcctggagggagacatgaactccggagaaacattgcggtgacaacatctatgagttgcacagacttcagcttccacttcccaatgatgttcaacaccctcgtcaactcttcttggggcgattctgtagagctgcatgccaatgtgacatgtaacaatgaagactccgatctgctcgaagataatagtgctaccacaattatccctatcttgtacccaattaacatactaattcaagatcaggaggatagtaccctgtatgtgtcatttactcccaaaggaccgaagatccaccaggtgaaacacatgtatcaggttcggatacagccaagcatccacgatcataacatcccaaccctggaggctgtggttggtgtgccccagcccccatccgaagggcctattacccatcaatggtcagtgcagatggaacctcctgtgccctgtcactatgaggatcttgagcgcctgcccgacgccgcagaaccttgtctcccaggggctctgttccgctgccccgtggtgtttcggcaagaaatcctggtacaggtgattggcactctagaactggtgggggagattgaagcatcttcaatgtttagcttatgctcttctttgtcgatatccttcaattcttcgaagcacttccacctgtacggttcaaacgcctcgttggcacaggtggtgatgaaagtggacgtagtgtatgaaaaacaaatgctgtatctgtatgttctttccggcataggtggtttgcttcttctgttacttatctttattgttctgtacaaagtcgggttctttaaaagaaacttgaaagaaaagatggaagctggccgaggcgtcccaaatgggatccctgccgaagactctgagcaattggcatctggacaggaagcaggcgatccaggctgcctgaagccgttgcacgagaaggactcagagtctggcggagggaaagactag

SEQ ID NO: 226970 - DNA, 489 bp, synthetic construct
  misc_feature 1..489: note = Description of Artificial Sequence: Synthetic coding sequence
  source 1..489: mol_type = other DNA
atgaaggattcttgtatcaccgtaatggccatggccctgctctcggggttttttttcttcgcccctgcttcaagctataatctcgatgtcagaggcgctcggtcgttctctccacccagggccggaaggcactttggctaccgcgtcttacaggtggggaacggggtaattgtcggagccccaggtgaggggaattctaccggatctctgtaccaatgtcagagcggtactgggcactgcctgcctgtcacattgagagggtctaattatacatctaaatacttgggcatgaccctcgccacagatcctactgacgggagcatattggcatgtgaccccggtctcagccgtacatgcgaccaaaatacttatctatcaggcctctgttacctgttccgccagaacttgcaaggcccaatgctccagggtcgcccaggattccaggtctgctgctgcagtgtgtttcacaagctgcaaaatcgcatctag

SEQ ID NO: 226971 - DNA, 3459 bp, synthetic construct
  misc_feature 1..3459: note = Description of Artificial Sequence: Synthetic coding sequence
  source 1..3459: mol_type = other DNA
atggcgctgagagtgcttctgcttacagcactcaccctgtgccacggattcaatttggatacagaaaacgccatgacttttcaagagaatgcccgaggctttggacagtccgtggtccagttgcaggggagcagagtggtggtcggcgctccacaggagattgtcgcagctaaccagagaggaagcctttatcagtgcgactatagcaccggaagctgtgaaccgataagactgcaggtgccggttgaagcggtgaatatgagccttggactctccctggccgcaaccacatctcctccacagctactcgcatgcggtccgacggtacaccagacgtgttctgaaaatacttacgtcaaggggctgtgctttctgttcgggagtaaccttagacaacagccacagaaattcccagaagcacttcgcggatgtcctcaggaggactcagatattgccttcttgatcgacggctccggaagcatcattccacatgattttaggagaatgaaagaatttgtttcaaccgtgatggagcagctcaagaaatctaagaccctcttcagtctgatgcaatattccgaggaattcagaatccattttacgtttaaggaattccagaacaaccccaacccacggtcgctcgtcaagcccataacgcagttactcgggaggacacacactgccaccggaattcggaaggttgtgagagagttgttcaacatcactaacggagcgcgaaagaatgcgttcaagatcctcgtcgtgatcaccgacggcgaaaaatttggggatccactgggatacgaagatgtaatcccagaagctgacagagagggagtgataagatatgtcatcggggttggtgacgcctttcgctcggagaagtcaaggcaggagctcaacaccatagcaagcaaaccaccgagagaccacgtttttcaggttaataattttgaggcattgaaaaccatccagaaccaactgcgggagaaaatcttcgcgatcgagggaacccagacaggtagttcttcatcctttgagcatgagatgagtcaggaggggttttccgccgcaatcacatcaaatggaccacttctgagcaccgtcgggtcatacgattgggcaggaggagtatttttgtacacatccaaagaaaagtcaaccttcatcaacatgacacgggtcgactctgacatgaacgacgcctatttagggtatgctgctgcaataattctgagaaatagggtccagtccctggtgcttggcgcacctcgctaccagcacatagggctcgtggcgatgtttcggcagaataccggaatgtgggagtcaaacgcaaacgtgaagggaacacaaataggagcgtacttcggagccagcttgtgttctgtggacgtggacagtaacggctctactgacctcgttcttattggggctcctcactattacgaacaaacacgcggtgggcaagtgagtgtgtgtccactgccacggggaagagctaggtggcagtgcgacgccgtgctgtatggcgagcagggacagccctgggggcgtttcggcgctgcgcttacagtcctgggggatgtgaatggagacaaattgacagacgtggctataggggcacctggcgaggaggataacagaggagctgtctaccttttccacggcaccagcggttccgggatttctccatcacatagccagcgcattgctggaagcaagttatctccaaggttacaatatttcggtcagagcctttcaggcggacaggacctgacgatggacggtctggtggacctgacagtcggagcccaagggcacgtgctccttctgcgctcccagccggtcctaagagtgaaagctatcatggaatttaaccccagggaagtggccaggaacgtctttgaatgcaacgaccaggttgtgaaaggtaaagaggctggcgaggttcgtgtgtgtcttcatgtacagaagagcaccagggatcgactgagagaaggccagattcagtctgtagtgacttatgatctggcacttgattctggtagaccccacagccgagcagtctttaatgagactaaaaactctaccaggaggcagacgcaggttctggggctgacccagacttgcgagaccctcaagcttcaacttccaaattgcattgaagaccctgtgtcccctattgtactccgattaaattttagcctggttgggacaccactgtctgcgttcggtaacctcagacccgttctagcagaggacgcacagcggctcttcacagccctgttcccatttgaaaagaattgtggcaacgacaatatttgccaggacgatctgagcatcacgttttcattcatgtccctggactgtctggtggttgggggacctagagagttcaatgtgaccgtgaccgtgcgcaatgacggtgaggacagttaccggacccaggtcactttcttcttccccttggacctgtcttatcggaaggtctcgacccttcaaaatcaacggtcacagaggagttggaggttagcctgtgaaagcgcgagttctacggaagtttctggggctctcaaaagcaccagctgcagtataaatcaccctatcttcccggagaattctgaggtaacctttaacattacatttgatgttgactctaaggcgagtctagggaacaaattgctgttaaaagctaatgttacatctgaaaataatatgcccaggactaataaaactgagttccaactggagcttcctgtgaagtatgccgtatatatggtagtgaccagccatggcgtgtctacaaaatatctgaactttactgcgagcgaaaacactagccgcgtgatgcagcaccagtatcaggtaagtaacctggggcagcggagtcttccaatttctttagtgtttctagtaccggtgagactcaaccagacagtcatttgggaccggcctcaggtgaccttctcggagaatctgtcttcaacatgccacacgaaagagaggttaccttcccattccgattttttagctgagttaagaaaggcccctgtcgtgaattgttcaattgctgtgtgccagcgcatccagtgcgatataccttttttcggtattcaagaggaatttaatgccacactgaagggcaatctaagtttcgactggtatataaagacaagccataatcacctcttgattgtgagcaccgctgaaatcctgttcaacgactctgtctttactctgttacctggtcagggtgcattcgttcggtcccagacggaaaccaaagtggaacccttcgaggttcctaatccactgcccctgatcgtgggcagcagtgtgggaggcctcctgcttctagctctgattactgctgctctttacaagcttggcttttttaagagacagtacaaggatatgatgagcgagggtggccctcccggtgctgagccccagtag

SEQ ID NO: 226972 - DNA, 3462 bp, synthetic construct
  misc_feature 1..3462: note = Description of Artificial Sequence: Synthetic coding sequence
  source 1..3462: mol_type = other DNA
atggctctcagagtactgctgttgactgccctgaccctttgccacgggtttaatctggatacagagaacgccatgacattccaggaaaacgccagagggtttgggcagtccgttgtccagcttcaaggtagccgcgtcgtggtgggggcaccgcaggaaatcgtggctgccaatcaacgcggttcactgtatcagtgcgactactctaccggttcgtgtgagccaatcagactgcaggtgccggtcgaagcagttaacatgtcactggggttgtccctggcagccacaacctccccaccacagttgcttgcgtgcggccctaccgtacaccagacttgctccgaaaatacctatgtgaagggtttgtgtttcctgttcgggagcaacctccggcaacaaccccagaaatttccagaggccctgcggggatgcccacaggaggactcagacatagccttccttatcgacgggtcaggaagcatcatccctcatgatttccgtcgcatgaaagagtttgtgagcaccgtgatggagcagctcaaaaaaagcaagactctattttctctcatgcaatattccgaagagtttcggatacacttcacctttaaagagttccagaataaccctaatcctaggtctttggtgaaacctatcacacagctgttgggcagaactcatactgcgactggaatccgtaaggtggtgcgagaactgtttaacatcaccaacggcgctcgcaagaacgctttcaagattctggtggtgattaccgacggggagaagtttggagacccgctcggatatgaggacgttattccagaagcagaccgagagggagtcatccgctatgttatcggtgtgggagacgctttcagatccgaaaaatcaagacaggaactcaatacaatcgcttcaaagcctcctcgggatcacgtgttccaggtaaacaatttcgaggccttgaagacaatccagaatcagctgcgcgagaaaatctttgcaattgaagggacgcaaaccggatcctctagctcctttgagcacgagatgtcccaggaagggttctcagctgccatcaccagtaacggtcctcttttgagcacagtaggctcttatgactgggctgggggtgtcttcctgtatacctccaaggagaaaagtaccttcatcaatatgacacgagtggatagcgacatgaacgatgcctatctgggatacgccgcagccatcatactgagaaatcgggtacaaagcctggtgctgggtgcgcctaggtaccaacacataggcttggttgcaatgttccggcagaatactggaatgtgggaaagcaacgccaatgttaagggaacacagatcggcgcttacttcggggcttcgttatgttcagtcgacgtcgattctaatggatcgacggatctggtgctaatcggcgcaccacattattacgaacagacacgaggagggcaggtgtcggtgtgcccccttcccaggggtcaaagagcccgttggcaatgcgacgcagtgctctacggcgaacaagggcagccttggggaagattcggggctgccctcactgtgctcggggatgtgaacggcgataaactgaccgatgtcgctatcggcgctcccggtgaggaggacaataggggcgctgtgtacctgtttcatggcacctccggaagtggtatcagtccaagccacagtcagcgtattgctggctcgaagctttctcccaggctgcagtacttcgggcagtctctgtccggcggtcaggacttaactatggacggactggttgatttgaccgtaggcgctcagggccatgttctactgctacgcagtcagcccgtactccgagttaaagccattatggagtttaatcctcgcgaggtggcaaggaatgtatttgaatgtaatgatcaggttgtaaaggggaaagaggctggagaagttagagtttgtctgcatgtgcagaaaagtacacgcgataggctcagagagggacagattcaaagcgttgtgacctatgatctggccctggattctggacggccacattcacgggctgtgttcaacgagaccaaaaactccacccgcaggcagacgcaggtactcggactgacccagacatgtgagacactgaagctacaactaccaaactgcatcgaagatccagtctcccccatagtgctcagattaaacttttccttagtgggaacgcctctaagcgcctttggaaatttacggcctgtcctcgcagaagacgcccaacggctcttcaccgccttgttcccattcgaaaagaattgcggtaacgacaacatttgccaggacgatctatcaataaccttctcgttcatgtccctggactgtcttgttgtcggtggcccacgtgaattcaacgtcaccgtgacagtgcgcaatgacggagaggatagctatcggactcaagttacattcttcttccctctagatctgagctataggaaggtgagcaccttacagaaccagagatcccagcggagctggcgactggcttgtgaaagcgcttcttccacagaggtgagcggcgctctgaagagtactagctgctctattaaccatcccatttttcccgagaactcagaggttacattcaatattaccttcgacgtggactccaaagcaagcctgggcaacaaacttctccttaaagccaatgtgacctccgagaacaacatgcccagaacaaataagacagagttccagctggagctgccagtgaagtacgcagtctatatggtcgttacatctcacggggtgagcactaagtatctcaacttcacagcctcagaaaacacctcacgtgtcatgcagcaccagtatcaggtaagcaatttgggacagcgctctctgcctatttctctagtgttcctggtcccagttcggctgaatcagaccgtgatctgggaccgtccccaagtgaccttctccgagaacctgtcctccacctgccacaccaaggaaagactgccatcacacagcgattttttagcagaactccggaaagcaccagtagtgaattgttctatcgctgtgtgtcagcgcatccagtgtgacattccctttttcggcattcaggaagaattcaatgctacgctcaaggggaatctcagctttgattggtatatcaaaacctcccacaaccacctgctgatcgtcagcactgccgagatactgttcaacgacagtgtgttcaccctgctgcctggacagggtgcattcgtgagatcccagactgaaacgaaggtcgagccattcgaggtaccaaatcctctgcctttgattgttggtagttcagtcggaggtctgctactactggccctcatcaccgctgccctctacaaactgggttttttcaaacggcaatataaggatatgatgagcgaaggaggaccacccggagcggagccccagtag

SEQ ID NO: 226973 - DNA, 3492 bp, synthetic construct
  misc_feature 1..3492: note = Description of Artificial Sequence: Synthetic coding sequence
  source 1..3492: mol_type = other DNA
atgactcgcacccgcgctgccctacttctcttcaccgcactggccaccagtttaggcttcaatcttgacacggaggagttaactgccttccgagtggacagtgccggatttggcgactctgtggtacagtatgcgaattcatgggtcgtggtgggcgctcctcagaagataacagccgcaaaccaaacaggaggcctgtatcagtgcggctactcaaccggggcttgcgaacccattgggcttcaggtcccgccagaagcagtgaacatgtcattagggctgagtctggcttccactacgagcccatcccaactgctggcttgtggccctacagtgcaccatgaatgcgggcgaaatatgtatttaactggcctgtgcttcctgctcggcccaacccaacttacacagcgactgccagtgagccggcaggagtgtccaagacaggagcaggacatagtttttcttatcgacggttccggatctatttcttctcgaaattttgctacgatgatgaactttgtgagagcggtgatcagccagttccagaggcctagcacccagttcagccttatgcaattttccaacaagttccagacccactttacctttgaggaatttaggcgcagctctaaccctttatcactgctggcatccgtccaccagttgcagggctttacttacacagccactgccatacagaatgtggtgcatagactgtttcatgcctcctacggggctaggagagacgcagcgaaaatacttattgtgattaccgatggcaagaaggagggggatagcctcgactataaggacgtcattccaatggcggacgcagctgggatcattcgatacgcgattggcgtgggcctggcattccaaaacagaaattcctggaaggagttaaacgatatagcttcaaagccttcgcaggaacacatcttcaaagtggaggattttgacgcacttaaagatatccagaaccagctcaaagagaaaatttttgccattgagggaacagagactacatcatcctcctccttcgaattggaaatggcccaggaggggttctcagccgtcttcacacccgacggaccagtacttggagcagtggggtcgttcacatggagtggaggcgcatttctgtaccctccaaacatgtcccccacatttatcaacatgtctcaggagaatgttgatatgcgggacagttacctagggtacagcacagaactcgcgctgtggaagggtgtccaaagcctagtcctcggagctccaagatatcagcacaccgggaaggccgtgatctttactcaggtgtccaggcaatggcgcatgaaggcagaggtgacaggaacccagatcggctcttactttggtgctagcctctgctccgtagacgtcgactccgatggctcaaccgatttagttctgattggcgcaccgcattactacgagcaaacgaggggtgggcaggtctctgtgtgccctttacccagagggtggcggcgatggtggtgtgatgccgtgctgtacggcgaacaagggcatccatgggggagatttggcgcagctctcaccgtactgggcgacgtcaatggtgacaagctaacagatgtagtcattggagcaccaggagaagaggagaaccgtggcgctgtgtacctcttccatggtgtgctgggcccttccatctcaccttcccactctcagcgtatagcaggttctcagcttagttcacgattgcagtactttggccaggccctgtctgggggtcaagacctcacacaagacggtttagtggacctcgcggtgggcgcacggggacaggttctcttgctacgtacccgccctgtcctgtgggtaggcgtgtccatgcagtttattccagctgagattcctcgatctgcctttgagtgtcgcgagcaagtagtctccgagcagacactggtccagtctaacatttgcttgtacattgataagcggtccaaaaatcttttaggcagcagggaccttcagagctcagttactcttgacctggccctcgaccccggacggctgtcccctagggccaccttccaggagactaaaaatcgaagtctgtcccgggtgagagtactaggtctaaaggctcactgtgaaaacttcaacctgttactcccttcctgcgtcgaagacagtgttactcctatcacactccggctgaatttcacactggtggggaaaccactcctcgcattcaggaatcttagacctatgctggctgccgacgcccaacggtactttacggctagtcttccgtttgagaaaaattgcggagccgaccacatttgccaggataatctcggcatcagtttctccttcccagggctcaagagcttactggtgggctcaaacctggaactgaatgcagaggtgatggtgtggaatgacggggaagatagctacggcaccaccattactttttcacaccctgcaggtctcagttacaggtacgttgcggaggggcagaagcagggacagcttcggagccttcatctgacgtgtgattccgcgcctgttgggtcacagggaacatggagcaccagttgccggataaatcacctgatcttccgtggaggagcccaaatcacttttttagcaacattcgacgtgtctccaaaggcagtactcggagacaggctgttgctgactgccaatgtatcctcagagaacaataccccgagaaccagcaagactacatttcagctggagctgcccgtgaaatacgcagtctacacagttgtttcaagccatgaacagttcactaaatacctgaatttcagcgaaagtgaggagaaagagagccatgtcgctatgcaccgctaccaagtcaataatctcgggcagagagacttgccagtctcaataaatttttgggtgcccgtagagttaaatcaagaagccgtctggatggacgtcgaagtctcccatccccaaaatccatcactgcggtgcagtagtgagaagatcgcacctcctgcctcagacttccttgcccatatccaaaagaatcccgtcctggactgctcaatagctggctgccttcgcttccgctgcgatgtgccgagtttcagtgtgcaggaagagctagattttacattaaaaggcaatttgtcatttggctgggtcaggcagatcctgcaaaagaaggtgtctgtcgttagcgtagccgaaattacgttcgacacgtcagtgtatagccaattgccgggacaggaagcgtttatgcgggctcagacaacgaccgtcctggagaaatacaaggtccacaatccaacaccgctgattgtaggaagtagtataggcggacttctgttactggctcttattaccgcagtgttgtacaaggtggggttctttaaaagacaatacaaggagatgatggaggaggcgaacgggcagatcgccccagagaacggcactcagaccccgtccccaccttccgagaagtag

SEQ ID NO: 226974 - DNA, 5469 bp, synthetic construct
  misc_feature 1..5469: note = Description of Artificial Sequence: Synthetic coding sequence
  source 1..5469: mol_type = other DNA
atggccggaccacgaccctccccatgggccagactgctcctcgccgctctgatctctgtctctctttctgggactttagcgaatcgatgtaagaaggccccagttaagtcatgcactgaatgcgtacgcgtggataaagactgcgcctactgtacggacgaaatgtttcgagatcggaggtgtaatacccaggccgaacttctggccgctggatgccaacgggaatcgattgttgtcatggagagctccttccagatcacagaggagactcaaattgataccaccctgagacgctcgcaaatgagcccccagggccttagagttcgcctgcgccctggtgaagaaaggcactttgagttagaagtattcgaacccctcgaatctccagtcgacctttatatcctgatggacttctcgaactctatgtctgacgacttggacaatctgaaaaagatgggtcagaacttggcccgagtgctgtcccaacttacatccgattacacaatcggctttggcaaatttgtcgataaggtgtccgtgcctcagacagacatgaggcccgaaaaactgaaagaaccttggcccaacagcgacccaccattcagcttcaagaatgtcatcagtctaactgaagatgtggatgagttcaggaataagctacagggagaaaggatcagtggtaatctggacgcacccgaggggggattcgacgccatcttgcagactgctgtgtgcacgagggatatcggctggagaccagattccactcacttattagtcttcagcaccgaatcggcctttcattacgaggccgatggggctaatgtcttggccggaataatgagccgtaatgacgagcggtgccacctagacacaacaggaacgtacacacaataccggacccaggactaccccagcgtgccaacactagtgcgcctgttggcaaaacacaatatcatccctatctttgcggtaaccaactacagttactcatactacgagaaattgcatacttattttccagtgtcttccttgggcgtcttacaggaggacagcagtaatattgtggaactacttgaagaagcattcaataggatccgtagcaacctggatatccgggcattggacagtcctcgcggtctgcgcacggaagttacaagtaaaatgtttcaaaagacccgaaccggctccttccatatcagaaggggcgaggtgggcatttatcaggtacagctgagggccttggagcacgtcgatggtacacatgtttgtcagctgcctgaggaccaaaagggcaacatacacttgaagcctagcttttctgacggtctgaaaatggacgctgggatcatttgcgacgtctgcacatgtgaactgcagaaagaggttaggtccgccagatgctcatttaatggcgatttcgtttgcgggcagtgtgtctgttctgagggttggtcgggccagacatgcaactgcagcacagggtctttatctgacatccagccctgtctgagagagggggaggacaaaccttgctccgggcgaggggagtgccaatgtggccactgtgtctgctatggcgagggtcgatatgaaggtcagttctgcgaatatgataattttcagtgccctagaaccagtggtttcctctgcaacgacaggggcaggtgctcaatgggccaatgtgtgtgtgaaccgggttggacgggaccctcatgcgactgtcccctgagcaacgccacatgtatagattctaacggcggaatatgcaatggacgaggccactgcgaatgtgggagatgccactgtcatcagcagtctttgtacactgacaccatctgtgagattaactactcagctatacaccctggactgtgtgaggacctgcggagttgcgtccagtgccaggcatggggcactggcgaaaaaaagggcaggacctgcgaagagtgcaatttcaaagtcaagatggtggatgagctgaaaagggctgaggaagtcgttgttaggtgctcttttcgcgatgaagacgatgactgcacatacagctacactatggaaggcgatggagcaccaggccctaattcaaccgtcctcgtgcataaaaaaaaggactgcccaccaggaagcttctggtggcttatccccctgttgctgctgctgttgccactgctcgccttactactattgctgtgctggaaatattgcgcgtgctgcaaggcatgccttgccctcctaccctgttgcaaccgtggtcacatggtgggctttaaggaggatcactacatgctcagagagaacctgatggcctctgatcatctagacacacctatgctccgtagtggtaatctgaagggtagggacgtggttcggtggaaagtgacaaacaatatgcagagacctggctttgctactcatgccgcttcaattaaccccactgagctggtgccttatggcctttctttacggcttgcgagactttgtaccgagaatcttttaaagcccgacactcgggagtgtgcccagctgagacaagaggtggaggagaatctcaacgaggtctaccggcagatcagcggagtccataagcttcagcaaactaagtttcgacagcaacctaacgctggaaaaaagcaagaccacaccatcgtcgacaccgtgctgatggcacctagatctgcgaagcctgctttgctgaaactgacagagaagcaagtggagcagagagcctttcacgatttgaaggtggcaccaggctactacacattaacagcggaccaagatgccaggggcatggtggagtttcaggaaggggttgaactggttgatgtccgagtgccactgtttattcggcctgaggacgatgatgaaaaacagctacttgtcgaggcgatcgacgtgcctgctgggacagcaacattgggtaggcggctggttaacattactattatcaaggagcaggctagagatgttgttagctttgagcaaccagagttttcagtaagccgaggcgaccaggtggccagaatcccagttatccgcagagttcttgatggcggaaaatctcaggtgagctataggacccaggacggcactgcccagggcaacagggattatatccccgtggagggagaactgctattccagccaggcgaggcctggaaagagctccaggtcaagctcctcgagcttcaggaggtggatagcctgctgagaggacggcaagtaagaagattccacgtccagctttccaacccaaaatttggagctcaccttggtcaaccccactccaccactatcatcattagagatccggatgaactggatagatcttttacgtcacaaatgttatcaagccaacctcccccacatggagacctcggagcccctcagaatcccaacgccaaggcagccggatcccggaaaattcactttaactggctgccacctagcggaaagccaatgggatatagggtaaaatattggatacagggagattccgagtcagaagcacacctgttggacagcaaggtgccaagcgtagagctgactaacttatatccctactgcgactatgagatgaaggtttgtgcttatggtgcccaaggcgaggggccatacagctccttggtgtcctgcagaacccatcaggaggtgccttcagaaccagggcgacttgctttcaatgttgtgagctccactgtgactcagttgagctgggccgagcctgcagagactaatggcgaaatcaccgcctacgaggtgtgttacggactggttaatgatgacaatcgcccaattggtccaatgaaaaaggtcctcgtggataatccaaagaatcgcatgctgttaattgaaaacctgagagagagtcagccctaccggtatacagtgaaggcccgaaacggagcaggctggggcccagagagggaagcgatcattaatctggctacccaaccaaaacgacctatgtctatccccattattcctgacattccaatcgtggacgcccaatctggagaggactacgatagcttcttgatgtatagtgatgatgtcctacgcagtcctagcggctcacaacgccctagcgtgtccgatgacaccggatgcggatggaaattcgagcccctcctgggagaggagctggatctgaggcgggttacttggcgattgcctcccgagctgattccacgcttgagcgcttcttccgggagaagctctgatgccgaggcaccacacggaccacctgacgatggaggcgctggaggcaaggggggaagtctcccacgatcagcaaccccaggaccacccggtgaacatttagtcaacggaaggatggactttgcctttcctggtagcacgaactcactgcatcgaatgaccaccacttccgcagctgcatacgggacccacctgagtccacatgtcccccacagggtgctgagcacctcttcaactctgactagagactacaatagtctcacgcggagcgaacactctcatagcactacccttccacgcgactatagcaccctgacgtccgtgtccagccacgacagccggttaacagcaggcgtgcccgacacaccaacccggcttgtgttttctgcattaggtccaaccagcctgcgagtcagttggcaggagcctcggtgcgagcgcccactgcagggttactctgttgagtaccagctgctgaacggcggtgagctccaccggctgaacatccctaatccagcacagacttctgtggtggtggaagatcttctgcctaaccattcctatgtgtttcgcgtaagagcccagtcccaggaaggttggggaagggagcgagagggcgttatcacaatcgagtcacaggtccaccctcagagccctctgtgccccctgccaggctcagcattcaccttgtctacgccatctgccccaggtccgctcgtctttaccgcgttatccccagatagcttgcagctctcgtgggagcggcctcgcagaccaaatggtgacatcgtcggctatcttgttacctgtgaaatggctcagggaggcggtcctgccactgcattccgagttgatggcgattctcccgagtcccggctgacggtgcctggactgagtgaaaacgtgccttacaagtttaaggtgcaggctcgtacaactgagggatttggcccagaacgagagggtataatcaccatcgagagccaagacggagggcctttccctcagcttggttcccgggcaggacttttccagcaccctttgcagtcagaatattcctcaattaccactacgcacacttccgccacagaaccgttcctggtagacggtctcacccttggagcacaacacctggaggctggcggatcactcactagacacgtcactcaagaattcgtgagccggactctaacgacaagcggcaccctgtcgactcacatggaccagcagttctttcaaacctat

SEQ ID NO: 226975 - DNA, 5417 bp, synthetic construct
  misc_feature 1..5417: note = Description of Artificial Sequence: Synthetic coding sequence
  source 1..5417: mol_type = other DNA
atggcaggccctaggcctagcccttgggcacgcttgctcctggcagccctgatcagcgtaagtctctccggtacactcgctaaccggtgcaaaaaagctcccgtgaagagttgcactgagtgcgtgagggtggacaaggattgtgcatattgcaccgacgagatgtttcgggaccggagatgtaacactcaggcagagctgctggccgcaggatgccagagggaatcaattgtagtgatggagtcatcatttcagattacagaggagacacagattgacacaactcttagacgctcacaaatgtctcctcaggggctgagagtccgcctgcgccctggcgaagagcggcactttgagcttgaggtgtttgagccactcgaaagcccagtggatctgtacatactcatggacttcagtaactctatgagtgatgatcttgacaatctcaagaagatgggccagaatctggctcgcgtgctgagtcaactgaccagcgattatacaataggatttggcaagtttgtagacaaggttagcgtgcctcagaccgatatgcggcctgaaaaactcaaagagccctggccaaattctgaccctcccttttcatttaaaaacgtgatcagtctgaccgaagatgttgatgagttccgaaacaaactgcagggggagagaatttctggcaatttggacgctcccgagggcggatttgatgcaatcctgcagactgctgtatgtacaagagacattggatggcgcccagattcgacccacctgctggtgttctctactgagagcgctttccattacgaagcagatggagctaacgtgttggccggtattatgagccggaacgatgagaggtgccacctcgatacaaccgggacctacacacagtatcgcacacaggactacccctccgtccctaccttggtccgactgctggccaaacataatataattccaatctttgccgtgacgaactatagctattcctattacgaaaagctccatacgtacttccccgtcagcagcctcggcgtgctgcaggaagactcaagcaatattgtcgagctccttgaggaggcttttaataggattaggagcaacttagatattcgggcacttgactccccccgtggtttacggacagaagtgacatccaaaatgttccagaaaacgcgcaccggcagctttcacattcgacggggagaggtgggaatctaccaggtgcagctgcgggctttagagcacgtcgacggcacacatgtgtgtcaattgcctgaagaccaaaagggcaacatccacttaaagccaagcttttccgatggtctcaagatggatgccggaattatttgtgatgtgtgcacttgcgaactccagaaggaggtgcgcagtgccaggtgttcctttaatggcgacttcgtgtgtggacagtgcgtgtgttccgagggatggtccggacagacctgcaattgctccacgggaagcctgtccgacatccagccttgtcttcgcgagggtgaggataaaccttgctctggcagaggggaatgtcaatgcggccattgtgtctgctacggggaggggcgatatgaaggacagttctgtgagtacgacaattttcagtgccctaggacctccggtttcctttgtaacgaccgcggtcgctgttccatgggtcaatgtgtgtgtgaaccgggatggacgggaccctcatgtgattgcccactgagtaacgctacgtgcatagactccaacggcggaatttgcaacggtcggggacactgcgagtgtggccgatgtcattgccatcagcagagtttgtacactgatacgatctgtgaaattaattatagtgccatccatccaggactctgtgaggaccttagaagctgcgtgcagtgccaggcttggggaactggtgaaaagaaagggcgtacctgtgaagaatgtaactttaaggtcaaaatggtggacgaactcaaacgggcagaggaagtggtggtgagatgcagtttcagagatgaagatgatgattgcacctatagctatacaatggagggcgacggagcccctggcccaaactcaaccgttctggtacataaaaaaaaggactgcccaccaggttccttctggtggctcatccccctgttgctcctgctcctgccgctcctggcactcctgctgcttttgtgttggaagtactgcgcgtgttgcaaggcatgtctggctctgctcccctgttgtaatcgtggccatatggtggggttcaaagaggaccactacatgctgagagagaatctgatggccagcgaccacttagataccccaatgctacgctcaggaaatcttaaaggaagagacgtagtccggtggaaagtgactaacaatatgcagcgcccaggattcgcaacacacgccgcttcaataaaccctactgagttggtgccttacggactctctctacgactcgcacgcttatgcacggaaaatctcctgaaacctgatacacgggaatgtgcccaactccgacaggaggtcgaagaaaaccttaacgaggtgtataggcagatatccggagtgcacaaactgcagcagaccaagtttagacaacagcctaatgcaggtaagaaacaggaccacaccatcgttgatacagtgctgatggccccacgttctgctaaaccagcgctacttaaactgacagagaaacaagtagaacagcgggcatttcacgatttgaaagtggcccctgggtactacactcttactgccgatcaagatgcaagagggatggttgagttccaggagggtgtggagctggtggacgtgcgcgtgcctctttttattcgaccggaagacgatgacgagaaacagctgttggtggaagccatcgatgtgccggcaggtactgccacccttggacgtaggttagtcaacattaccattataaaagaacaggcacgggacgttgttagttttgaacagcccgagttctccgtctccaggggtgatcaggtggcaaggattcctgttatcaggcgggtcctcgatggtggtaagtcccaggtatcataccgcacacaggatgggacagcccagggaaacagagactatatcccagtggagggggaacttctgttccagccaggcgaagcctggaaagagctgcaggtcaaacttctagaattgcaagaagtcgatagcttgttgagaggcaggcaggtcagaagatttcacgtacagctcagcaatcccaaatttggcgctcacttgggacaacctcactccaccactatcatcataagagatcccgatgagctggatcggagcttcacgtcccagatgcttagctcccaaccccctcctcacggagacctaggggctccccagaatcccaatgcaaaagctgccggatcacggaaaattcatttcaactggctgcctccctccggcaaacctatgggctacagggtcaaatattggattcagggtgactccgaaagtgaagcccatctcttggacagcaaagtgccttccgtcgagctgaccaatttatatccctattgcgattatgaaatgaaggtgtgtgcctatggggctcagggcgagggcccatacagcagtctcgtgagttgcagaacccatcaggaagtcccaagcgagccagggcgactggccttcaacgtcgtgtccagcacagtcactcagctgtcctgggccgagccagccgagaccaacggcgagattaccgcttacgaagtctgctacggcctggtcaacgatgacaacaggcccatcgggccaatgaagaaggtcctggttgacaaccccaaaaaccggatgctacttatcgaaaatctcagagaatcacagccttaccggtatactgtaaaggctcgtaatggggcaggatgggggccagaaagagaggccattattaatttggcgacccagcctaagcgacccatgagcattccaattattcctgacatccccattgtggatgctcagagtggggaggactacgacagcttcctgatgtactctgatgacgtcttgaggtccccaagcgggtcacagaggcccagcgtgtcagatgatactgagcacctggtaaacggacgcatggattttgctttcccgggatcaacaaactctttgcatagaatgacgactacatccgccgctgcatatggcacccacctttctccacacgtgccgcatcgtgtcttgtctacaagctctacactgactagggactacaactcgttaactcgtagtgaacattcacactcaacaaccctgcctcgggactattccaccctcactagcgtgtcatctcacgggctgcctccaatctgggagcatggccgtagccgtctgcccctgtcttgggccctgggaagtagatcccgcgcacaaatgaaggggtttccgccttcccgtggacctcgcgatagtatcatcctggcgggacgacccgcagctccgagctggggacctgactccaggctcacagcgggagtcccagacacacctactcggctcgtattttcggcattggggccaacctcattgcgggtcagttggcaggagcctcggtgtgaacggccactgcaaggttattccgtggagtatcagcttttaaatggcggagagttgcatcggctgaacattcccaatccagcccagacttcggttgtggtggaagacctcctgcctaatcattcctacgtgttccgtgtccgggctcaatcccaggaaggctggggccgagagcgagagggagtgatcaccatagagagtcaggtacatccgcagagcccgctatgccccttgccaggtagtgcctttactttgagcaccccctctgcccctgggccactggtctttacagcgctgagccccgactccctccagctttcttgggaacgcccacgcaggccgaatggggacatcgtgggctatttagtaacatgcgaaatggcacaagggggtggcccagcaacggcgtttcgggtagacggggacagcccagaaagtaggctaactgtgccgggtctttccgagaacgtgccgtacaagttcaaggtccaggccaggaccactgagggattcggccctgaacgggaaggcatcattactatcgaaagccaggacggcggacccttcccccaactggggtcaagggccggactattccaacacccattgcaaagcgaatatagcagtatcactacaacccatacaagcgctaccgaacctttccttgtagacggcttaacgctcggagctcagcatctcgaggccggaggatccctgactcgccacgttacccaggagtttgtgtctcggactctgacgacatccggtactttgtcgacccatatggaccaacagttttttcagaccta

SEQ ID NO: 226976 - DNA, 5417 bp, synthetic construct
  misc_feature 1..5417: note = Description of Artificial Sequence: Synthetic coding sequence
  source 1..5417: mol_type = other DNA
atggccggacctagacccagcccatgggcacggctgctgctggccgcattaatttcggtgtccctgtctggcacactcgccaataggtgcaaaaaggcccctgtgaagagctgcaccgagtgtgtcagagtcgacaaagactgtgcctactgtaccgacgagatgtttagggaccgcagatgtaatacccaagctgagctccttgccgctggatgccagagggaaagcatagtcgtgatggagagctctttccagattacagaggagacgcagatcgacacaaccttgcggaggtctcagatgtcccctcaaggtttgagggtgaggctccgcccaggcgaggagcgacactttgaactcgaagtttttgagcctctggagtcccccgtggacctgtatattctgatggatttctctaatagtatgtccgatgacctcgacaatctgaagaaaatggggcagaatctcgccagagtgctgagtcagcttactagtgactatacaatcggttttgggaaattcgtggataaagttagtgtgcctcaaacagatatgcgacccgaaaagctcaaagagccttggcccaactcagaccctccatttagttttaaaaacgtgatctccctcactgaagacgtggacgagttcaggaataaactccagggggagcggatctccggcaacttggacgctcccgaaggcggttttgatgctatactgcagaccgccgtgtgcacccgcgatattggatggagaccagactccacccaccttttggtatttagcacggaatccgcattccattatgaggccgacggcgctaacgtccttgctggcataatgtcgagaaacgatgaaaggtgccatctggacacgacaggtacatatactcaatatcgtactcaggactatcccagtgtaccaacactggtacgccttctagcgaaacacaacattataccgatcttcgccgtcacaaattatagttactcttattacgaaaaactccatacgtacttccccgtaagcagcctcggtgttctgcaggaagatagtagcaatattgttgagcttcttgaagaagcctttaacagaattagatccaacctggacatccgcgctctcgatagccccaggggactccggactgaggtaacatccaaaatgtttcagaagacacggaccggcagtttccacatcaggagaggggaagtgggcatctatcaagtgcagctgcgagccttggagcatgtcgacggcactcacgtgtgccagctccccgaggatcaaaagggcaacatccacctcaagccgtcctttagtgacgggctgaaaatggacgcagggatcatatgcgatgtgtgcacctgtgagctgcagaaagaagtgagatcggctcggtgcagtttcaacggcgacttcgtgtgtggacagtgcgtttgtagtgaaggatggagcggccagacatgtaactgttcaaccggtagcctgtcggatatccagccctgcctcagggagggcgaagataaaccttgctccgggaggggggaatgtcagtgtgggcactgcgtttgctatggcgagggtaggtacgaggggcaattctgtgaatatgacaactttcagtgtcctcggaccagcggttttctgtgcaatgatcgcggaaggtgtagtatgggccagtgcgtttgtgagcctgggtggactgggccttcctgcgattgtccgctctccaacgccacttgtatcgacagcaacggcggaatatgtaacggccgtggccattgcgaatgtgggagatgtcattgccatcagcagtccctttatacggacacaatttgtgaaatcaactattcagcaatccatccagggttatgcgaagacctcagaagctgcgttcagtgccaggcctggggcactggcgaaaagaaagggaggacctgcgaggaatgcaatttcaaagtcaagatggtcgacgagctgaaaagagctgaggaggtcgtcgtgagatgctcgtttcgcgatgaagacgacgattgtacctattcctacactatggaaggcgacggcgctcctggacccaactctactgtcctcgtgcataaaaagaaagattgtccccctgggtctttttggtggctgattcccctgttgctgttgctcctgcctcttttggcactactgttattattgtgctggaagtattgcgcatgctgtaaggcgtgcctggccctcctgccgtgttgtaaccgcggacatatggtaggattcaaggaagaccactatatgcttcgtgagaacctgatggctagcgatcatctagacacgccaatgttgaggagtggtaaccttaagggacgagacgttgtacgatggaaggtgaccaacaacatgcagcgtccagggtttgccacccacgccgcatccatcaatcctactgaactggtgccttacggactttcgttgaggctcgcccgactgtgcacggagaatcttctgaagcccgacacccgggaatgcgcgcaactccgccaagaggtggaggagaaccttaacgaagtgtaccggcagatttccggagtgcacaagttgcagcagactaaattccgtcaacagcctaatgctggaaagaagcaggatcatacgattgtcgatactgtgcttatggcacccagaagtgccaagccagccctgctaaagttaaccgagaagcaggtagagcaacgagccttccatgatctgaaagtcgctcccggatattatacactgacagcagaccaggacgccagggggatggtggagttccaggagggggtggaacttgtcgatgtcagggttcccctgttcatcaggcccgaagatgatgacgagaagcagctgctcgttgaggccatcgatgtgcctgccggaacggccacactgggacgacgcctggtcaacatcaccataattaaggagcaggccagagatgttgtgtccttcgagcagcctgaattcagtgtcagcaggggagaccaggtggcacgaataccagtaattcgacgggtattggacggaggcaagagccaagtcagctataggacccaggacggtacagcacaaggcaatcgagactacatccccgtagaaggagagctactgtttcagcctggcgaggcatggaaggaacttcaggtgaagcttctcgagctgcaggaagtggatagtctgctcagaggacgccaggtgagacggttccatgttcagctgagcaaccccaagtttggggcacatctgggccaaccacactccacaacaataatcattagagatccagacgaactcgaccgtagctttactagccagatgctcagcagtcagccccctccccacggcgatttgggcgcaccgcaaaaccccaacgcaaaagccgcagggtccagaaagattcacttcaactggttgcccccatcagggaaacctatgggctacagggtgaaatactggatccagggagactccgaatcagaagctcacctcctggactccaaggtgccctctgtggagctcacaaatctgtatccttattgcgactacgagatgaaagtgtgcgcctacggtgctcaaggcgaaggcccatactcctccctggtgtcctgtaggacacatcaggaggtgccttcagaaccaggtagattggcatttaatgttgtgagcagcaccgtgacccagctgagctgggctgagccagctgagacaaatggtgaaattaccgcttatgaggtttgctacggattggtgaatgacgacaatagacctatcggtcctatgaagaaagtgctggtcgacaaccccaagaatcgcatgctattaattgaaaatcttcgggagtctcagccctacaggtacacggtcaaagctcggaacggtgccggttggggacccgagagagaagccatcatcaatctggcgactcagccaaagagacctatgagcattccaatcataccagatatccccatcgtcgacgctcagtcgggggaggactacgacagttttctgatgtattcagacgatgtgctcaggagtccgtcaggctcgcagcgcccatctgtgtccgacgatactgagcatctagtgaatggaaggatggacttcgcttttccagggagcaccaactccctgcatcgcatgaccaccacttccgccgcagcatatggcacacacctcagtcctcatgttccacacagggtcctttctaccagtagcacccttaccagggattacaatagcctgacccgatcggagcactcccactctacaacacttcctcgcgattactcaactctcacttctgtctcctcacacggcctgcccccaatctgggaacacggcagaagcagattgcccttaagttgggccctgggaagcaggagccgtgctcagatgaagggatttccaccctcacggggtccccgtgacagcatcatcctcgcagggagaccagccgcacctagctggggccctgattcccggctcacggccggagttcctgatacaccaacgcggttagttttctccgcattggggcctaccagtctgagagtgtcctggcaggaacctagatgtgagaggcctttacagggttacagcgttgagtatcagctgcttaatggcggagaactgcaccgtctgaatatccctaatccagcccagacctcagtcgtcgttgaggacctgttgcccaaccacagctacgtctttagagtgcgcgctcaaagccaagaaggatggggtagagagagagagggcgtcattaccatagagagccaagtccaccctcagagccccctttgtccactgccaggttcagcttttactttgagtactccttcggcccctggccctctcgttttcacagccctttcccccgacagtctgcagctttcctgggaaagacccaggagacccaatggtgatatcgtaggctatctcgtcacttgcgaaatggcccagggcggaggtccagcaaccgcgtttagggtggacggagactcacccgaatctcgcctgactgtacctggtttgagcgagaacgttccttacaagttcaaagtccaggcacggaccaccgaagggtttggacctgagagagagggaatcatcacaatcgaatctcaggacggcggaccgtttccccagcttggctctcgcgctggactcttccagcacccacttcagagcgagtactcttctatcactaccactcatacttccgccaccgagccttttttggttgatgggctaaccctaggtgcccagcatctcgaggctggtggctctctcactagacacgtgactcaggagtttgtcagtagaactcttactacatcgggaactcttagcacacacatggaccaacagttttttcaaactta

SEQ ID NO: 226977 - DNA, 1932 bp, synthetic construct
  misc_feature 1..1932: note = Description of Artificial Sequence: Synthetic coding sequence
  source 1..1932: mol_type = other DNA
gggggaattgaagaaacacagattgacactactctccgacgaagtcaaatgagtccccagggacttagagtgagattgagacccggagaggaacggcactttgaactggaagtcttcgagccactggaaagtcctgtagatctctacatcctcatggatttcagtaacagcatgagcgatgatctcgataaccttaagaaaatgggacagaaccttgccagggtcctgagtcagctgaccagtgattatactatcgggtttggaaagtttgtggataaggtttcagtaccccagaccgatatgcggccagagaaattgaaagagccatggcctaactccgacccaccttttagcttcaagaacgtaatctcactgaccgaggatgttgacgaatttagaaacaagctgcagggagaacgaattagcggcaatctcgatgcacctgagggaggcttcgacgccattctacaaaccgccgtgtgcaccagagatatcgggtggcgcccagatagcacacatctgctggtatttagtaccgaatcagcctttcattacgaagcggatggtgcaaacgtcctagcgggtatcatgagcaggaatgacgagcggtgccatcttgataccacaggtacatacacacagtatcgcacccaagattacccttccgtcccaactctggtgcggctgttggcaaagcacaatataattcccatcttcgcggtgacaaattactcgtacagttattacgagaaactccacacgtactttccagtgtccagcttgggcgtcctgcaggaagattcaagtaatattgtagagctcctcgaagaggccttcaatcgcatacgatctaaccttgacattagagccctagacagtccgagaggacttaggacagaggtaacaagtaagatgttccaaaagaccaggacgggtagctttcatattaggagaggggaggtcggaatttaccaggtgcaactgagggctctggagcacgtggatggaacacacgtgtgtcagttgcctgaggaccagaagggtaacatccacctcaagccgtctttctccgatggactgaagatggatgctggaattatctgcgatgtttgcacctgtgaactacagaaagaggtgcggagcgccagatgttcttttaatggagactttgtctgtggccaatgcgtatgttcagaaggctggtctgggcagacatgcaactgtagcaccggttccttgtcagacatccaaccttgcctgagggaaggtgaggacaagccatgtagcggccgtggcgagtgccagtgcggccattgtgtctgttacggggaaggccgatacgaaggccagttctgcgaatacgataattttcagtgtccaaggacatcaggcttcttgtgtaacgatagaggacgatgctcgatggggcagtgcgtttgcgagccaggatggaccggaccaagctgtgattgtcctttgtctaacgcgacatgcatcgatagcaacggagggatctgtaatgggaggggacactgtgaatgtggacggtgtcattgtcaccagcaaagtctttatacagacactatctgtgaaatcaactacagcgccatccatcctggattgtgcgaggacctacgcagctgcgtccagtgccaagcctggggcacgggtgaaaaaaaagggagaacgtgtgaggagtgcaatttcaaggttaaaatggttgacgagctgaagcgagccgaagaggttgtggttcgctgtagcttccgggatgaggacgatgattgcacatatagctacacaatggaaggcgatggtgctcccggaccaaacagcacagtgttagttcacaagaagaaagattgtccacctggaagcttttggtggttaatcccattgctcctcctgctcctccccctgctggcactgtag

SEQ ID NO: 226978 - DNA, 2367 bp, synthetic construct
  misc_feature 1..2367: note = Description of Artificial Sequence: Synthetic coding sequence
  source 1..2367: mol_type = other DNA
atgggcatcgagttgttatgcctgttcttcctctttctggggcgaaacgaccacgtgcagggcggttgtgcgttaggcggagccgagacctgcgaggactgcttgctgatcggaccccagtgcgcctggtgtgcgcaggaaaattttactcatccttccggggtcggcgagcgatgcgacacacctgctaacctgcttgcaaagggatgtcagctgaacttcattgagaacccagttagccaggttgagatcctgaagaataagccactttccgtcgggcgacaaaagaactcctctgatatcgtgcaaatcgcccctcagagtctcatccttaagttacgacctggaggcgctcagacactgcaggtgcatgttagacagactgaagactatcctgtagatttgtattacctcatggatctcagcgcgtccatggacgatgatctgaataccatcaaggagcttggatcccgcctgagtaaggagatgagtaaactgacatctaattttcgcctgggcttcggttcttttgtagaaaaacccgtgtctccgttcgttaagacaacgcctgaggaaatcgccaatccctgttcgagcatcccatatttctgcctccccacttttggttttaaacatatcctgccccttacaaatgacgctgagcgatttaatgagatagtgaagaaccagaagatctccgcgaatatcgacactcccgaaggaggatttgatgccatcatgcaagcagcagtttgtaaagagaagattggttggcgcaacgactctctccaccttctggtgtttgtgagcgatgcggacagtcacttcggtatggactccaagctagctggaattgtgattcctaacgacggcctctgccaccttgactctaagaatgagtactctatgtctacagtacttgagtatccgaccatcggccagctcattgacaagcttgttcagaataacgtgctcctaatctttgctgtgacacaggaacaggtacacctctacgagaactacgctaaacttatccctggagccacggtggggctgttgcaaaaggactccggcaacatccttcagctgatcatctcagcctatgaggagttgagaagcgaagtagagttagaggtactgggtgacacagaaggactgaacctctctttcaccgcgatctgcaataatggaaccctttttcagcaccagaagaaatgcagtcacatgaaagtgggggataccgctagcttttctgtgaccgtcaacattccacattgtgagaggaggagtaggcacatcattatcaaaccggtagggctgggtgatgcactggaactgctggtatcccctgaatgtaactgcgactgccagaaagaggtggaggtcaacagcagcaaatgccaccatggaaatgggtcctttcagtgcggcgtgtgcgcttgtcacccaggccacatggggcctagatgcgaatgtggcgaagatatgctgtccaccgacagttgcaaggaggcacccgatcaccctagctgttccggccgaggtgattgctactgcgggcagtgtatttgccatctctccccctacgggaacatatacggtccctattgccagtgtgataacttctcatgcgtgcgccataaggggctgctgtgcggaggaaacggggactgtgactgcggcgagtgcgtatgtagatccggctggacaggagaatactgtaattgcacgacctctacggactcctgcgtgtcagaggacggcgtgctgtgttccgggaggggcgactgcgtgtgcgggaagtgcgtttgtactaaccccggagctagcggacctacatgtgaacgctgtcccacctgtggggacccatgtaactccaagagatcttgtatcgagtgtcacctgagtgccgctggccaggcgagggaggagtgcgtggacaaatgtaaattagctggggctactattagcgaggaagaagattttagcaaagacggcagcgtgagctgctctttacagggcgagaatgaatgcctgataacatttttaatcaccactgacaatgagggtaagaccatcattcattctatcaacgaaaaggattgcccgaagccaccaaatattcctatgatcatgctgggagtgagtctggcaattctcctgatcggcgtggtcttactgtgcatctggaaactcctcgtgagcttccacgaccggaaagaggtcgcgaagtttgaagccgaacgatccaaggcgaaatggcagaccgggactaacccactgtatcggggatctacaagcacatttaaaaatgtgacatataagcatcgagaaaaacaaaaagtggaccttagtacagactgctag

SEQ ID NO: 226979 - DNA, 2367 bp, synthetic construct
  misc_feature 1..2367: note = Description of Artificial Sequence: Synthetic coding sequence
  source 1..2367: mol_type = other DNA
atgggaattgagctgctgtgtttattctttctcttcctgggcaggaatgatcatgtacaggggggttgcgccttgggcggtgccgaaacttgcgaagattgtctgctgatcggcccacaatgcgcctggtgcgctcaggaaaatttcacccatccttcaggggtgggcgagcgctgcgacacacccgcaaacctcctggctaaagggtgccaactcaattttatagaaaatcctgtctcgcaggtggagatactaaagaacaaaccactgagtgttggtagacagaagaattcgagcgacattgtgcagattgcaccccagtccttgatattaaaactgcggccagggggtgctcaaacactccaggttcatgtgcggcagaccgaagactatccagtggacctttattatctgatggatctgtccgcctccatggatgacgacttgaatactattaaagaactgggtagccggctcagcaaagagatgagcaaactaacatctaattttaggcttggctttggcagctttgtcgagaaacctgtatccccatttgtcaagacgacccccgaggaaatagcaaacccttgtagttcaattccttatttctgtctgcctacattcggtttcaagcatatcctgccccttactaatgacgccgagcggttcaacgagatcgtaaaaaaccagaagatatcggctaacatcgacaccccagaaggcggatttgacgcaattatgcaggccgctgtgtgcaaagaaaaaattgggtggcggaacgattctctgcacctgttggtgttcgtctctgatgcagatagccacttcgggatggactctaagctggcaggcatcgtcattcctaatgatggtctgtgccatctggactctaagaatgagtactcaatgtcgacggtgctagaatacccaaccattggtcagctgatcgacaagttggtgcagaacaacgtgctcctgattttcgccgtcacccaggaacaggtgcacctgtatgagaactatgctaaacttattccgggagcaacagtggggttattgcagaaggatagtggtaacattttgcagcttatcatcagtgcatatgaagaactgagaagcgaggtcgaacttgaggtgctaggtgacacagaaggcctgaacctgtctttcacagccatctgtaacaacgggactctgttccaacaccaaaagaaatgctctcacatgaaagtgggagataccgcttctttttcggtcaccgtgaacatcccacattgcgaacggagaagccgacacattattatcaagccagttggattgggggacgcgttggagctactggtcagcccagagtgtaattgcgactgtcaaaaagaggtggaagttaactctagcaagtgccaccacggaaatggcagtttccaatgcggtgtctgcgcatgccatccaggtcacatggggcctcggtgtgagtgcggtgaagacatgcttagcactgactcttgtaaggaggcccctgatcacccgtcttgttcaggaaggggagactgttattgtggccagtgcatctgtcacctctcgccctatgggaatatttatggcccatattgccagtgcgataacttttcatgtgttaggcacaaagggctcctttgtggaggcaacggcgactgcgactgcggcgagtgtgtgtgtaggtcgggatggacgggcgagtactgcaactgtacaacttccaccgactcctgcgtgtctgaggatggggttctgtgcagtggtcggggtgactgtgtgtgcgggaagtgcgtgtgtactaatcctggcgcttccggccctacctgtgagcggtgtcccacctgtggcgatccgtgcaattccaagcgcagttgtatcgaatgccacctctccgccgctggccaggccagggaagaatgtgtagacaagtgtaaattagcaggcgctactattagtgaggaggaggatttctcaaaggacgggagtgtgtcttgctccttacaaggagaaaacgagtgcttgattacctttctaattactacggataacgaaggcaagacaattattcactccatcaatgagaaagattgccccaaaccccctaatatcccaatgattatgctgggtgtctcactcgccattttgctcattggggtcgtcctcttgtgcatctggaagcttctggtctcgttccatgacaggaaggaagtcgcaaaatttgaagcagagagatcaaaagcgaaatggcaaactggtactaaccccctgtataggggtagcacctctacttttaaaaacgttacttacaaacatagagagaaacagaaggtcgatctcagtacagactgttag

SEQ ID NO: 226980 - DNA, 2397 bp, synthetic construct
  misc_feature 1..2397: note = Description of Artificial Sequence: Synthetic coding sequence
  source 1..2397: mol_type = other DNA
atggtcgctctgcctatggttctagtgttgctactggtgttgagtaggggagagagcgaattagacgcgaagattccatccaccggcgatgcaaccgagtggcgaaacccccacctgtccatgctcggtagttgtcagccggctccctcctgccagaaatgtatcctgtctcatccctcctgtgcctggtgcaagcagctgaatttcaccgcaagcggcgaagccgaggctcgaaggtgcgcacggagagaagagctgctcgcccgaggctgtccgttggaggagcttgaggagccaagagggcagcaggaggttctccaggaccagccgctgtctcagggagctagaggcgagggggctactcagctcgcccctcagcgggttagagtgaccctgcggcctggtgaacctcagcagctgcaggtccggttcctgagagcagagggttaccccgttgatctgtattatctgatggacctgagttactctatgaaggatgatctggaacgggtgcgccaactggggcatgccctccttgtgcggttacaagaagtaacccactccgtccgcattggctttgggtcttttgtggacaagacggttctgccgttcgtatctaccgtgccaagtaagctgcgacacccctgtcctacgcggcttgaaaggtgccagtccccattctccttccatcacgtgctctccctcacaggcgacgcgcaggcctttgaaagagaggttgggcgacagtcagtgtccggcaatttagacagtccagagggcggtttcgacgccattttacaggccgctctgtgccaggaacagatcggatggaggaatgtgtcacggttactggtgttcactagcgatgatacttttcatacagctggggatggcaagctgggcggaatcttcatgccttctgatgggcattgccacctggactcaaatggcctgtactcacgatctaccgaattcgattatccctcagtggggcaggtagcccaggccctgagcgccgctaacattcagccaatctttgccgtcaccagtgcggctctgccggtatatcaggaattatcaaagctgattcctaaaagtgccgtgggcgaactttctgaagacagctctaacgtggtgcaattaatcatggacgcctacaactccctgtccagcacagtaaccttagagcatagcagcttgcctcctggagtccatatttcttatgagtcacagtgtgaaggtccagagaaaagagagggcaaagccgaggaccgtggccagtgcaatcatgttcgcataaaccaaaccgtgacattctgggtatccctgcaagccacccactgcctccctgaaccgcatctgctacgcctgagggccctcggcttctctgaagagctgatcgtcgagctgcataccctgtgcgactgtaattgttctgatactcaaccccaggcacctcactgttctgacggtcagggccacctgcagtgtggagtgtgctcttgtgctcctgggcgactgggcagactttgcgaatgtagcgtggctgaactttcgtcacccgatctcgaatccggatgtagagctcctaatggcaccggtcccttgtgttccggtaaggggcactgtcagtgcgggaggtgcagctgttctgggcagtcgagtggccacctgtgcgagtgcgacgacgccagttgtgagagacatgaaggcatcttgtgcgggggttttggacggtgtcagtgtggggtttgtcattgccacgctaaccgcactgggagggcttgcgagtgctctggagacatggattcgtgcatcagcccagaaggtggtttgtgtagcggacatggcaggtgcaagtgcaaccgctgccagtgccttgacggttattatggtgctctctgtgaccagtgtccaggttgcaagaccccctgtgagaggcaccgggactgcgctgagtgtggcgcatttcgaaccggaccactggcaacaaattgcagcacggcctgcgcacacacgaacgtaactctggccctcgctcccatcctggacgacgggtggtgcaaagagcgtactttggacaaccagctcttttttttcctggttgaggatgacgccaggggcacggtggtgctgcgggtgaggccccaggagaagggcgcagaccacactcaggctatagttctgggatgcgtcggcggaatcgtggcagtcggacttggacttgtgctggcatatagactctcagttgaaatctatgatagacgcgaatattcccgttttgagaaggagcagcaacagctgaactggaagcaggatagcaatcctctctataaaagtgccattaccacgaccatcaaccctaggttccaagaggctgactctcccacactctag

SEQ ID NO: 226981 - DNA, 1953 bp, synthetic construct
  misc_feature 1..1953: note = Description of Artificial Sequence: Synthetic coding sequence
  source 1..1953: mol_type = other DNA
atggtcgcattgccgatggtgctagttttgcttctcgttttgtcacgtggagagtccgaactggacgctaaaataccctcaacgggtgacgcaaccgaatggcgtaacccacacctgtctatgttaggctcctgtcaacctgccccatcgtgtcagaagtgtatcctgagtcaccccagttgtgcgtggtgtaaacaattgaacttcacagcatcaggcgaggccgaggccaggcggtgcgcacgcagggaggaactgcttgccagaggatgccccctagaggaactggaagagcctcgagggcagcaggaggttttgcaggatcagccactgtctcagggcgcacggggagagggcgctactcagctggctccccagcgcgtaagggtgacattaaggcccggagagccccagcaactgcaggtgcgcttcttacgcgctgaaggctacccggtagacttgtactacctgatggatctatcatattccatgaaggacgatcttgagcgcgtccggcaacttgggcatgctctactcgtgaggctgcaggaagtgacacatagtgtgcgaatcggtttcggatcctttgtggacaaaaccgtgttacccttcgtgtccaccgtgccctccaaactgagacacccatgcccaactcgtctggaacgatgccagtctcctttcagtttccatcatgtcttgtccctgaccggcgatgcccaggctttcgagcgggaagtcgggcgacagtctgtgagtggcaatctcgacagtcccgaaggaggtttcgacgctatactacaggccgctctctgtcaggaacagatcgggtggcgtaatgtatcaagactgctggttttcacatcagacgataccttccatacagcaggcgacggtaagttgggaggtatcttcatgccaagcgatggccactgccaccttgatagcaacggactctacagccggagcacggagttcgattatcccagcgttggccaggtcgctcaggcgctctccgcagctaatatccagcccatttttgccgtgacctcggctgctctcccggtgtaccaggagttgagcaagttgatccctaagagcgctgtgggtgaactaagtgaggatagcagtaatgtggtgcagttgataatggacgcatacaactccctgtcatccacagttactctcgagcactcaagcctgccgccaggggtgcatatatcatacgaatctcagtgtgaaggccctgagaagagagaggggaaagcggaagatcggggacaatgcaaccacgtccgaattaaccagacggtgactttctgggtttctctgcaggccacccactgtctccccgagccgcatttgctcaggctccgcgctcttgggttctccgaagaattgatcgtggaattgcacacgctctgtgattgcaattgtagcgatacccagcctcaggcaccacattgcagtgacggacagggccacctacagtgcggagtctgccgggattgcgcggaatgcggcgcattccgaactggcccactcgctacgaactgtagcacagcgtgcgcccacacgaatgttaccttggccttagcgcctatattggacgatggctggtgcaaggagagaaccttggacaaccaattgtttttcttcctagtcgaagacgacgcccgaggcactgtcgtcctgcgcgtgagaccccaagagaaaggtgcggatcatacacaggccattgtactgggctgtgtgggaggcattgtagctgtcggcctgggactcgtgctcgcctataggctgagcgtggagatctatgaccgcagagaatactcccgctttgagaaggagcagcaacagctgaactggaagcaggacagcaacccgttatataagtcggcgataacaaccacaatcaatccaaggtttcaggaagccgatagtcctacactttag

SEQ ID NO: 226982 - DNA, 2397 bp, synthetic construct
  misc_feature 1..2397: note = Description of Artificial Sequence: Synthetic coding sequence
  source 1..2397: mol_type = other DNA
atggtcgccctgccaatggtccttgtgctgttattggtcctctctagaggcgagtctgagcttgacgcaaaaattccttccacaggagatgcaactgaatggaggaacccacacctgagcatgcttggctcttgtcagcctgccccatcctgtcagaagtgcattctcagtcatccaagttgcgcctggtgcaaacagctgaacttcacagcttccggggaggcggaagcacgcagatgtgcacggagggaggagctcctcgccaggggctgtccccttgaagagcttgaggaacccaggggccagcaagaagtgctgcaagatcagcccctcagccagggtgcgaggggagagggcgctacccaactggccccacagagggtcagggtaactctccgaccgggtgagccccaacagctgcaagtgcgatttctgcgagcagaaggctacccggtagatttatattacctaatggatctgagttactctatgaaagacgatctggagcgcgttagacaactgggacacgccctgttggttcgactgcaggaagttacacacagtgtccggatcggcttcggctcatttgtagataaaacagtgctgccattcgtctccactgtcccaagcaagctgagacacccttgcccgacccgcctggaacgctgccagagcccttttagcttccaccatgttctctcattaactggagacgcacaagcgtttgaacgagaagtcggtcgacagagtgtaagcggcaacctggattcgccagaaggcggatttgacgctattctccaggccgctctgtgccaggaacagatcggatggcgcaacgtgtcgaggttgttggttttcacatccgacgataccttccacacagctggtgatggtaagttgggcggaattttcatgccaagtgatggccattgtcatctcgatagcaatggcctctactctcggtcgacggagtttgattacccctctgtaggccaggtggcacaggcactctctgcagctaatatccagccaattttcgcagttacatcagccgctctccccgtgtaccaggagcttagcaagttgatccccaagagcgccgtaggcgagctaagtgaagactcctccaatgtggtgcaattgattatggacgcatacaattccctgagctctacggtaaccctggaacacagttccttgccccctggcgtgcatatatcttacgagagccagtgtgagggcccagagaagcgagaaggcaaggccgaggaccgcggacaatgcaaccacgtccggattaatcagactgttacattttgggtgtccctgcaggccactcattgcctgcctgagcctcacctgctgaggctgcgcgctctgggattttcagaggaactgattgtcgaactccatacactgtgcgactgtaattgtagcgatactcagccccaggcccctcactgcagcgacggacagggacatctacagtgtggggtgtgctcctgcgccccaggtagactggggcgtctgtgcgaatgctctgttgccgagctctcaagtccggatctggagtccggatgcagagccccaaacggaacagggcctttgtgttctggaaaaggccactgtcagtgcgggagatgttcctgttctgggcagagctctggacacctctgcgagtgcgatgatgcatcctgcgagaggcatgagggcatcctttgtggaggatttggtcggtgtcagtgcggggtctgccattgtcacgcaaacagaactggcagggcctgcgagtgttccggggatatggacagttgtatctcccctgagggtggactgtgtagcggtcacggaagatgtaagtgcaatcgatgtcagtgcctggatggctactatggcgcactctgcgatcagtgcccaggctgcaaaactccttgcgaacgccaccgtgactgcgcggagtgtggagcgttccgcacaggccctctggccactaactgtagcacagcttgcgcccacactaacgtcacattggccttggccccaatattggacgatggctggtgcaaggaacgcacactggacaatcagctgttcttttttctggtggaggatgatgcaagaggtactgtggtcctgagggtgagaccccaagagaagggagcagatcatacacaggcgatcgttttggggtgtgtgggagggattgtggccgttggcttgggacttgtgctggcctacagactcagcgtggagatctatgataggcgggaatactctcgcttcgaaaaggaacagcagcagctcaactggaagcaggatagcaatccactgtacaagtccgctatcactactactattaatcccagattccaggaagccgatagtcctaccctctag

SEQ ID NO: 226983 - DNA, 1206 bp, synthetic construct
  misc_feature 1..1206: note = Description of Artificial Sequence: Synthetic coding sequence
  source 1..1206: mol_type = other DNA
atgaatctcgtggcggttatgggagctttcaacaagggccacggtaaatgtgattgcgggaaatgtaagtgtgaccagggatggtacggagatgcatgccagtatccaacgaattgcgatcttacaaagaagaagagcaaccagatgtgtaagaactcccaggacatcatctgcagtaatgcgggtacgtgccattgcggccgttgtaaatgtgataactctgatggtagcggcttagtatacggcaaattctgtgaatgcgatgatagagagtgtatcgatgacgagactgaggaaatatgcggtgggcacggaaagtgctactgcggtaattgctactgcaaagcaggttggcacggcgacaagtgcgagttccagtgcgatattacaccatgggagagcaagagaagatgtacctccccggacgggaagatctgtagtaataggggcacatgtgtgtgcggcgaatgcacctgtcatgacgtggaccctactggcgattggggtgacattcacggcgatacgtgtgaatgtgatgagcgcgactgtcgggctgtgtatgacaggtactctgatgacttctgttccggtcacggacagtgtaactgtggacgatgcgattgcaaagctgggtggtatggcaagaaatgcgaacacccccagtcgtgtacattgagcgccgaggagagtatccgtaagtgtcaggggtcaagcgacctcccttgttccggtcggggaaaatgcgagtgcggaaaatgtacctgctacccccctggggacaggcgagtttacggaaaaacatgtgagtgcgatgatcggaggtgtgaggatctggatggggtggtgtgtggtggccacgggacctgtagttgcgggaggtgtgtatgcgaaaggggttggttcgggaaattatgccaacatccgcgtaaatgcaacatgactgaagagcagagtaaaaacttgtgtgaatctgctgacgggatcttgtgtagcgggaaagggtcatgccactgtggtaagtgcatatgtagtgccgaagaatggtatatcagcggggaattttgtgattgtgatgacagagactgcgacaagcacgatggcttgatttgtacagggaatgggatttgttcttgtgggaactgcgaatgttgggacggatggaatggcaatgcatgtgagatatggcttggcagcgaatacccttag

SEQ ID NO: 226984 - DNA, 1485 bp, synthetic construct
  misc_feature 1..1485: note = Description of Artificial Sequence: Synthetic coding sequence
  source 1..1485: mol_type = other DNA
atgcggcctcccggatttagaaactttttactgctcgcctcatcactgttatttgccggtctgtcagcagtgccccagtcattttctccctcactgcggagttggcccggtgccgcttgccggctctcacgggctgagagcgagcgccgttgtcgggctcctggtcagcctccaggcgctgccctgtgtcacggaagggggagatgcgactgcggcgtgtgtatttgtcatgtgacggagcctgggatgttttttgggccactttgtgagtgccatgagtgggtatgtgagacatacgatggttcaacatgtgccggacatggaaagtgcgactgcggcaagtgcaaatgtgaccaaggctggtacggagatgcttgtcagtacccgaccaattgcgatcttacaaaaaaaaagtctaaccaaatgtgtaagaattcccaggacataatatgttccaacgccggaacttgccactgtggtcgctgcaagtgtgataactcggacggtagtggattagtatatggcaaattttgcgagtgcgacgaccgggaatgcattgacgacgagacagaggagatttgcggcggacacggcaaatgctattgtggtaattgttactgcaaggctggttggcacggcgataaatgtgagtttcagtgtgatataacaccgtgggagtctaagaggaggtgcaccagccccgacggaaagatatgttctaacagaggcacatgcgtatgtggggaatgtacatgtcacgatgtagacccgaccggtgattggggagacattcatggtgatacttgtgagtgtgacgagagagattgtagggcggtttatgatcggtatagtgatgatttttgtagcggacacggtcagtgcaattgcgggcgatgcgattgcaaagccggttggtatgggaaaaaatgcgagcatccccagtcctgtacactgagtgctgaggaaagcataagaaaatgtcagggttcaagcgaccttccttgctccgggagaggaaaatgtgaatgcggcaagtgcacatgctaccccccaggcgaccgtagagtgtacgggaaaacatgcgaatgcgatgatagacgctgtgaggacctagatggcgtcgtttgcgggggacatggaacctgcagctgtgggaggtgtgtctgcgagcgcggttggtttggcaaattgtgccaacaccctcgaaaatgtaatatgactgaggagcagtccaagaacctgtgtgaatcggcagatgggatcctgtgttcaggaaagggcagctgtcattgcgggaaatgcatttgcagtgcggaggagtggtatatctctggagagttttgtgattgcgatgaccgcgactgtgacaagcacgatggtctgatctgcactggaaatggcatatgctcctgcgggaattgtgagtgctgggatggttggaacggtaatgcctgtgaaatttggctagggtcagaatacccttag

SEQ ID NO: 226985 - DNA, 1209 bp, synthetic construct
  misc_feature 1..1209: note = Description of Artificial Sequence: Synthetic coding sequence
  source 1..1209: mol_type = other DNA
atgagtggatgtgcgaggccgactactggcgctccggtgcaggctatggtctcagttactggcaaatgcaaatgtgaccagggctggtacggagacgcttgtcaatacccaacgaactgcgatctgacaaagaaaaagtctaaccagatgtgtaagaatagccaagatatcatatgctccaacgccggtacatgccattgcggacgttgtaagtgtgacaatagcgatgggagcgggctagtatatggcaagttctgcgagtgtgatgaccgcgagtgtatcgacgacgagacagaggaaatttgcggaggacacggaaagtgctattgtggaaattgctattgcaaggccggatggcatggtgacaagtgcgaattccagtgcgatattaccccctgggagtccaaacgaaggtgcaccagccccgacgggaagatatgttctaaccgcggtacgtgcgtctgcggcgaatgtacctgtcacgatgttgatccgacaggagattggggcgacatccacggcgatacctgtgaatgtgacgagagagattgtcgagctgtttacgaccgatacagcgatgacttctgttccgggcacggacagtgtaactgcggacgatgtgactgcaaggcgggttggtacgggaaaaaatgtgagcacccgcagagttgcaccctgagtgcagaagagagcatcagaaagtgccagggcagctccgacttaccttgcagcggccgtggtaaatgtgagtgcggtaagtgtacctgttaccccccaggtgacaggcgtgtctacggaaagacttgtgagtgtgacgacagacggtgcgaagacctggacggggtggtgtgcggcggacacggcacctgctcctgtggtcgatgtgtgtgcgagagaggctggttcggcaagctgtgccagcacccaaggaaatgtaacatgacagaagagcaaagtaaaaatctttgcgaatccgcggatggcatcttgtgttctggtaaaggctcttgccactgcggaaagtgcatctgtagcgcagaggagtggtacatctccggcgaattttgcgattgtgatgaccgcgactgtgataaacacgatggcctgatctgtaccggtaacgggatttgtagctgtgggaattgtgagtgctgggatgggtggaacggcaatgcctgcgaaatctggctggggtctgaatacccatag

SEQ ID NO: 226986 - DNA, 1062 bp, synthetic construct
  misc_feature 1..1062: note = Description of Artificial Sequence: Synthetic coding sequence
  source 1..1062: mol_type = other DNA
atgtgcaaaaactctcaggacataatttgctcaaacgccggaacatgtcactgtggcagatgtaaatgtgacaactctgatggaagcggacttgtctacggcaaattctgcgagtgcgacgatcgcgagtgtattgacgatgagactgaagaaatatgcggcggtcacggcaaatgctattgtgggaattgttattgtaaggccggttggcacggggataaatgtgagtttcaatgtgatattaccccgtgggaatcaaagaggcggtgcacgagcccagacgggaagatctgcagtaataggggcacatgtgtatgcggggagtgtacctgtcatgacgtggaccctactggcgactggggtgatatacatggggatacatgcgagtgcgatgaaagggactgcagagctgtttacgaccggtactccgacgacttttgtagcgggcatggtcagtgtaattgcggtcgctgtgattgcaaagcgggatggtacggaaagaagtgtgaacacccacaaagctgcaccctgagtgccgaagagagcattagaaaatgccagggatcaagcgatttaccctgctctggacggggtaagtgcgaatgtggcaaatgtacttgttatcctcccggagataggcgggtctatggaaagacctgcgagtgcgacgatcgcagatgcgaggatctggacggcgtggtgtgtgggggtcatggcacgtgttcctgtgggagatgtgtgtgcgaacgtggctggttcggtaagctgtgccagcatccacgtaaatgtaacatgacagaagaacagagcaagaacctgtgcgagtccgcagatggcatactttgttctggaaagggcagctgccactgtgggaaatgtatctgcagcgccgaggagtggtacatatcaggcgaattttgtgattgtgatgatcgcgattgcgacaagcacgatggcctcatctgtaccgggaatggaatctgcagctgcgggaactgcgagtgttgggacggctggaacgggaacgcctgtgaaatttggctgggctccgaatatccttag

SEQ ID NO: 226987 - DNA, 1062 bp, synthetic construct
  misc_feature 1..1062: note = Description of Artificial Sequence: Synthetic coding sequence
  source 1..1062: mol_type = other DNA
atgtgcaagaactcccaggatatcatttgcagcaacgccggtacgtgccactgcggtcgctgtaaatgtgacaattccgatggctcggggctggtgtatggaaaattttgtgaatgcgacgaccgagaatgtattgacgacgagactgaggagatttgcggtggtcatgggaagtgctactgtgggaactgctactgtaaggctggttggcatggcgataagtgtgagttccagtgcgacatcacgccatgggaatctaagaggaggtgtaccagcccagacggcaaaatatgtagcaaccggggtacgtgcgtttgcggcgagtgcacctgtcacgacgtggatcccactggtgactggggtgacatccatggggacacatgcgagtgcgatgagagggattgtcgggcagtgtatgaccgttattctgatgatttctgctctggacatgggcagtgtaattgcggcaggtgcgactgtaaggctggatggtatgggaagaaatgcgaacaccctcagtcctgcacattatctgccgaggagtccatccggaagtgtcaagggagttccgatttgccttgctccggccgaggtaaatgtgagtgcggaaagtgcacctgctaccccccaggtgacagacgagtgtacgggaagacttgcgaatgtgatgatcgtcgctgtgaggacctggatggggtggtatgtgggggtcatggcacatgctcatgtggaagatgtgtatgtgagagagggtggttcggtaagttgtgccagcatcccagaaagtgcaatatgacagaagagcaatccaaaaatttgtgcgaatctgcagatggcattctttgctctggcaaggggtcctgccattgtggtaaatgcatctgctctgccgaagagtggtacatcagcggcgagttttgcgattgcgacgaccgggattgcgataagcatgacggactgatctgtaccgggaatggcatctgttcttgcgggaattgcgaatgttgggatggatggaatggtaacgcctgcgaaatctggcttggatccgaatatccatag

SEQ ID NO: 226988 - DNA, 903 bp, synthetic construct
  misc_feature 1..903: note = Description of Artificial Sequence: Synthetic coding sequence
  source 1..903: mol_type = other DNA
atggctaactgtgaattttcaccagtatccggtgacaagccatgctgtcgattgagcaggagagcacaactctgtcttggagtatcaatactcgtgctcattctggtggtggtactggcagtcgtcgtgccccgatggcgccagcagtggtcaggcccaggtacaacaaagaggtttcctgagaccgtcctggccaggtgtgtcaagtataccgagattcaccccgagatgcggcacgtggactgtcagagcgtgtgggacgccttcaaaggagcctttatctctaagcacccatgcaacatcacagaggaagattaccaaccgctgatgaaactcggtacacagacagtgccttgcaacaagatcctcctgtggtctcgaatcaaagatctcgcgcaccagtttacccaggtgcagcgcgatatgttcaccctggaggacacattgctcggctacctcgccgacgatctgacctggtgcggagagttcaacacgtctaagatcaattaccagtcctgcccagattggcgaaaagattgttccaacaatcctgtgagtgtattctggaagactgtgtcaaggaggttcgccgaagccgcatgcgacgtcgtccacgttatgctgaacggtagccgcagtaaaattttcgacaagaattctacattcggttctgtagaagtccacaatttgcaaccagaaaaagtccagacgctcgaagcctgggtgatacatggaggccgagaagattccagagatttatgccaggacccaaccataaaggagcttgaatccattatcagtaagagaaacatacagtttagttgcaaaaatatctacaggccagataaattcctgcagtgcgtgaagaatcccgaagatagctcgtgcacttcagagatctag

SEQ ID NO: 226989 - DNA, 942 bp, synthetic construct
  misc_feature 1..942: note = Description of Artificial Sequence: Synthetic coding sequence
  source 1..942: mol_type = other DNA
atgaaccagctgtcattcctgctctttctgatagcaactacacgtggctggtcgacagacgaggcaaacacctacttcaaagaatggacctgctcttctagtccatccctccccagaagctgcaaggagataaaggacgaatgtccaagtgcatttgacgggctttacttcctgcgcaccgagaatggggtgatctaccaaacattctgcgacatgacaagcggcggtggaggatggacacttgtcgcctctgttcacgagaatgacatgcgcggaaaatgcacggtgggcgacagatggtcaagtcagcaaggatccaaggccgtttatcctgagggagacggtaactgggcaaactataacacttttggatccgccgaggccgcaactagcgatgactataaaaaccctggatactacgatattcaggccaaggatttgggcatatggcacgtgccaaataagagccccatgcaacattggcgtaattctagtttgctccgatacagaacagatacgggattcctccagacactgggtcataaccttttcgggatttaccagaaatacccagtaaagtatggtgaaggaaaatgctggaccgacaacggtccggtcattccagtagtttacgacttcggtgacgcacagaaaacagcaagttactatagtccctacgggcagcgagaatttaccgccggattcgtacagttcagggtgttcaacaacgaaagagccgctaatgcgttgtgcgcgggaatgcgagttaccggatgtaatacagagcaccactgcatcggcggaggcggatatttccccgaggcctctccccagcaatgtggagactttagcgggttcgactggagtggctacggaactcatgtgggttattcctcctcacgagagatcactgaagcagccgttcttctgttttacaggtag

SEQ ID NO: 226990 - DNA, 978 bp, synthetic construct
  misc_feature 1..978: note = Description of Artificial Sequence: Synthetic coding sequence
  source 1..978: mol_type = other DNA
atgttgtctatgttgaggacaatgactcgattatgtttcctcctcttcttcagtgtggccacttccgggtgttcagcagcagctgcctcatcacttgaaatgctcagtcgagagtttgagacctgcgcattcagctttagcagtctgccaagaagctgcaaagagataaaggaacgctgtcattctgcaggagatggtctatatttcctgagaacaaagaatggagtggtctaccagactttttgcgatatgactagcggagggggtggttggacgttggtggcctcagtgcacgaaaacgacatgagaggtaagtgtactgtgggtgacagatggtcttcccagcaaggcaacaaggccgattatcccgaaggagacggcaattgggcgaactacaatactttcggatctgccgaagcggctacatcagacgattataaaaacccaggatactatgatatccaggccaaggatctcgggatttggcatgtacccaacaaaagtcccatgcagcattggagaaacagcgccctgctgagataccggaccaacaccggttttttgcagcggttaggtcataatctatttggcatttatcaaaagtacccagttaaataccggagcggcaaatgctggaacgataatggtcctgccattcccgttgtatacgacttcggggacgctaaaaaaactgcctcttactactcaccctacggccagcgagagtttgtggctggttttgtgcagttccgcgtgttcaataacgaaagagctgccaatgcactgtgtgcaggaatcaaggtaactggatgcaatacagagcatcactgtatcggaggtgggggatttttcccccaaggtaagccgaggcagtgcggtgacttcagcgccttcgactgggacggatatggtactcatgtgaaatcttcttgttcacgggagatcactgaggccgcagtgctactgttttaccggtag

SEQ ID NO: 226991 - DNA, 2736 bp, synthetic construct
  misc_feature 1..2736: note = Description of Artificial Sequence: Synthetic coding sequence
  source 1..2736: mol_type = other DNA
atggatggagccatgggaccacggggtctgcttctatgcatgtacctggtgtcactcctgattctacaggctatgccagctctggggtctgccacaggaagatcaaaatcatccgagaaacgccaggccgtggacactgccgtggatggagtgttcattaggtcgctgaaggttaattgtaaagtcacttctagatttgcccactacgtggtaaccagtcaggtggtgaacactgccaacgaggcgagagaggtggcattcgacctggagatcccaaagactgcttttatatccgatttcgcagttaccgccgatggcaacgcctttattggcgacataaaagacaaggttaccgcgtggaagcagtatagaaaagccgctatcagcggagagaacgccggactcgtgagagcttctggcagaacgatggaacagttcactattcatctgaccgttaacccccagtcgaaagtgactttccagttgacatacgaagaggtactgaagagaaaccatatgcaatacgagatcgttataaaggtcaagcctaagcagctagtgcaccatttcgagatagatgtggacattttcgaaccccagggcatctctaagctcgacgcacaggcctctttcctgcccaaggaactcgcagcacagactattaagaagtctttctctggaaagaaggggcatgttttgtttagaccaaccgttagccagcaacagagctgtcccacatgtagtacctcactgctgaatgggcactttaaagttacatatgatgtatctcgagacaagatttgtgatttacttgtggccaataatcattttgcgcatttcttcgccccacagaacctgaccaacatgaataaaaacgtggtcttcgtaattgatatctcggggtctatgaggggccaaaaagtgaaacagactaaagaagctctgctgaaaatcctgggtgatatgcagcctggcgattattttgacctggtcctgttcggaactagagtccagagctggaagggttccttagtgcaggccagcgaggctaacttacaggccgctcaggacttcgtccgcggtttcagtctggacgaggcaacgaacctgaatggcggtttactccgagggatcgagattctgaatcaggtacaggagtctttgcccgagctcagcaaccatgcatcaattctgatcatgcttacggatggcgatcccactgagggagtgaccgatcggagccaaattctcaagaatgttcggaatgcgatacggggaaggtttcccctctataatctcggcttcggccacaacgtggatttcaacttcctcgaagttatgtccatggaaaacaatggcagagcgcaacgaatttatgaggatcatgacgccacccagcaactgcagggtttttatagccaggtggccaagcccttacttgttgacgtggaccttcagtatcctcaggatgccgttctggctttaactcagaaccaccacaagcaatattacgaggggtccgagatcgtcgtagccggtcgcattgctgacaacaagcaatcatcctttaaagctgatgtgcaggcgcacggggagggccaggaattctccataacctgcttggtcgacgaagaagaaatgaagaagctcctgagagaaagggggcacatgcttgaaaatcacgttgagaggctatgggcctacctaaccatccaggaactcctggcaaagaggatgaaggtggacagggaggaacgcgcaaacctgagttcacaggctctgcagatgtctctggactatggctttgtgacgcccctgacaagcatgtctattagaggtatggctgaccaggacggacttaaaccaaccatcgataagcctagcgaggatagccctcctcttgaaatgctgggccctcgcaggacattcgtactaagcgcactgcagccctcacctacacactccagttccaatacgcaaagactgcccgacagagtcacaggagttgatacagatcctcactttatcatccacgttccacagaaagaggacaccctctgtttcaacatcaatgaagagcctggagtgattctgtccctcgtgcaagatcccaacaccggttttagtgtaaatgggcaactgataggcaataaggcacgtagcccgggacagcatgacgggacctattttggcaggctcggcattgctaacccagcaaccgattttcagctggaagtcacaccacagaacatcactttgaatcctggatttggaggtccagtgttctcttggcgtgaccaggctgtcctgaggcaggacggagtcgtagtgactatcaacaaaaaaagaaatctggtagtgtcggtggatgatggcggtacttttgaagtggtccttcaccgagtttggaagggttccagcgtgcatcaggattttctgggcttctacgtgctggacagtcacagaatgtctgccaggacccacggactgttagggcagttttttcatcccatcggctttgaagtctccgacatacacccagggtcggatccaaccaagccagacgccaccatggttgtgaggaatcgaaggcttactgtaacaagggggctgcagaaagactacagcaaggatccctggcatggcgctgaagtttcatgttggttcattcacaataatggggctggactgatcgatggggcttacaccgactacatcgttcccgacattttctag

SEQ ID NO: 226992 - DNA, 1872 bp, synthetic construct
  misc_feature 1..1872: note = Description of Artificial Sequence: Synthetic coding sequence
  source 1..1872: mol_type = other DNA
atgaacaagaatgtcgtcttcgttatcgatatttcaggctccatgagaggccaaaaagtaaaacagacaaaggaagcccttctgaaaatcctcggagacatgcagccaggagattattttgatctggtgctcttcggaacaagggtgcaaagctggaagggttctttggtccaggcttcggaagcaaacctgcaggccgcacaggactttgtgcggggtttcagccttgatgaagcaaccaacctgaatgggggattattacggggaatcgagattttgaaccaagtgcaggagtcgctcccagaattgagcaatcacgctagcatcctcattatgctgacagacggcgatcctaccgagggggtaaccgataggagtcagattctcaagaatgtacgaaacgccatcagaggtcgcttcccgctgtataatctgggctttggacacaacgtagattttaattttttagaggtgatgagcatggaaaataatggacgcgcacagagaatatatgaagatcatgatgcaacccaacagcttcaaggcttttactcgcaagtagccaagccactgctggttgatgtggaccttcagtaccctcaagacgctgtgctggctctcacacagaatcatcataagcaatactacgaaggtagcgagatcgtggttgcaggccgaatcgctgacaataagcagagttcattcaaggcagacgtccaggcccacggtgaaggccaagagtttagcatcacctgcttagtcgatgaggaagaaatgaagaagttattaagagagcggggtcatatgctcgaaaatcatgtggagaggctgtgggcatacttaactatccaagagctgctcgctaagaggatgaaagtggatagggaagaaagggccaacctgtcatctcaggccctacagatgtctctggattacggctttgtcacgccactgacgtccatgagcattagaggaatggccgatcaggatgggctgaagcccactattgacaaaccttctgaggacagtcctcctcttgagatgttggggccaaggcggactttcgtcctgagcgccctgcagccctcccctactcacagttcctcaaatacacagcgtctgcccgaccgcgtaactggggtggataccgatccacattttatcattcatgtgcctcagaaagaggataccctgtgctttaatattaatgaggagcctggtgtgattctctcattagtgcaggatcctaatacgggcttcagtgtgaatggccaactcatagggaataaggcgcgtagcccaggccagcacgacggtacctacttcggaaggctgggaatcgccaacccagcaaccgatttccagcttgaagtcactcctcagaacattactcttaatccaggctttggcggtccagtcttttcctggcgtgaccaggccgtgctgaggcaagacggagtggtggtgactatcaacaaaaaacgtaatctcgttgtttcggtggatgatggcggtacttttgaggtggttctgcaccgggtctggaaggggagcagcgtacatcaggacttcctgggcttctatgtgctggatagccatagaatgtccgcacgaacgcatgggctgttaggccagttctttcaccctattgggtttgaggtgagcgacatccatccgggatccgaccctaccaagccagacgcaaccatggttgtcagaaatcgccgattgaccgtaacccgtggcctgcagaaagattattctaaggatccttggcacggcgctgaggtatcttgttggttcatccacaacaatggcgcaggtttgattgacggtgcgtatacagattacatcgtacctgatatcttttag

SEQ ID NO: 226993 - DNA, 2310 bp, synthetic construct
  misc_feature 1..2310: note = Description of Artificial Sequence: Synthetic coding sequence
  source 1..2310: mol_type = other DNA
atggaacaattcactatccatcttactgttaaccctcaatccaaagttacttttcagctgacttacgaggaggttctgaagaggaatcacatgcagtatgaaattgtgatcaaggttaaacccaaacagttagtgcaccactttgagatagacgttgacatcttcgaaccgcagggaatatccaaactcgatgcccaagcgagctttctgcctaaagagctggctgcccagaccatcaaaaagtctttttctggcaaaaagggccatgtgctttttcggccaactgtctcacagcaacagtcatgccctacatgcagcacttctcttttaaacggtcactttaaagtcacctacgatgtgagccgggataagatttgcgatctgctggtggccaacaaccacttcgcgcatttcttcgcaccgcagaaccttactaacatgaacaaaaatgtagtctttgttatcgatatctccggtagtatgcgaggccagaaggtgaagcagaccaaggaggctctgttaaagatcctcggtgacatgcaaccaggcgactatttcgaccttgtcctgttcgggacccgcgtacagtcttggaaggggtcccttgtccaggcatcagaggccaatttgcaggctgcgcaggacttcgttcggggatttagcctcgacgaagccacaaacttaaacggaggcctgttgaggggaatagagattctcaaccaggtgcaggagagtctgccagagctgtcgaatcacgcaagcatcctcatcatgttaacggatggcgatccaaccgagggagtgacagacagatcccaaatcctaaagaacgttcggaacgctataaggggaagattccctttgtacaacctagggtttgggcataacgtggacttcaactttctggaggtcatgtcaatggagaataatggacgtgctcagcgcatatatgaggatcatgatgcaactcagcagctgcaggggttttattctcaggtggccaagcccctgttggtggacgtggaccttcagtaccctcaggacgccgtgctagcactcactcagaaccatcacaagcaatattacgagggaagtgaaatagtggtcgccggtcgcattgcagataataaacagtcgtcattcaaagcggacgtgcaggcccacggcgaagggcaggagttctccatcacttgcctagtcgacgaagaggaaatgaaaaagcttttgcgggaacgaggccacatgctcgagaatcatgttgagagactgtgggcctacctgaccatccaggagctcctggctaagcgcatgaaagtagatcgggaggagagggccaatctgtcaagccaagcattacagatgtccttggactacggatttgttacccccctcacaagcatgagtattcgaggcatggcggaccaggacggtctgaagccaacaattgataaacccagcgaagactcccctccccttgagatgctcggccctaggcggacctttgtgttgtctgcattgcaaccttctccaacacactcttcttcaaatacacagcgactccccgatcgagttaccggggtggataccgatccccatttcattatacacgttccacaaaaagaggatacattatgtttcaacatcaatgaagagccaggcgtgatcctgtccctcgtccaggaccccaacactggtttttcggtgaatggccagctgattggaaacaaagccagaagcccgggtcaacacgacggaacctacttcgggcgactcggaatcgccaaccccgctactgatttccaattagaagtgactcctcagaatataacactgaatcctgggttcggcggtcctgtgttctcttggagggaccaggcagtattgagacaggatggcgtggtggtgacaatcaacaagaaacgtaatctcgtcgtgtctgtggacgatggcggaacatttgaggtggttctgcacagagtgtggaagggatcaagcgtgcatcaggattttctggggttttacgtccttgactcccaccgcatgtctgccaggactcacgggctgctgggccagtttttccacccaatcggcttcgaagtgtcagatattcatcctggctctgatcctactaaacctgatgcaactatggtagtaagaaatcggaggctgaccgttactcggggactgcagaaagactactctaaggacccatggcacggagccgaggtgtcctgctggtttattcataataatggagcaggtctcatagacggggcttatactgattatatagtgcctgacattttttag

SEQ ID NO: 226994 - DNA, 1938 bp, synthetic construct
  misc_feature 1..1938: note = Description of Artificial Sequence: Synthetic coding sequence
  source 1..1938: mol_type = other DNA
atggatggcgcaatgggccctagggggctgctactgtgtatgtacttagtctcactgctgatccttcaggccatgcccgctctaggcagtgcgacaggtaggagcaaatcgtcggagaagaggcaggctgtggataccgccgtggacggtgtcttcatcagaagtcttaaggttaactgtaaagtaacatccagattcgcacactacgtggttacgagtcaagtcgtgaacactgcaaacgaagccagagaggtggcctttgatttagaaatcccgaaaactgcctttatttctgacttcgctgtgaccgcagacggcaatgccttcattggcgatattaaggataaggtgactgcctggaagcaatatcggaaagccgctatttccggtgagaacgcaggactggtacgggcatcaggtagaacaatggagcaatttactattcacttgaccgtcaacccccagtctaaagtgacattccaactgacatacgaggaagtgcttaaacggaaccacatgcagtatgagatcgtgatcaaagtcaagcccaaacaactggtccatcatttcgagatcgacgtcgacatttttgaaccacagggaatctccaagttggacgcccaggcgtcttttctgcctaaggagctcgccgcacagacaattaagaagtcgttcagcggcaagaaaggacacgtattgttcagaccgacggtctcccagcagcagtcgtgcccgacttgtagtacgtctcttcttaatgggcacttcaaggtgacatacgatgtgagtagagacaaaatctgtgatctgctcgttgcgaacaaccactttgctcacttcttcgcgcctcagaatttgacaaacatgaataaaaatgttgtcttcgtaattgacatttccggcagcatgcgtgggcagaaggtcaagcagaccaaagaggccctcttgaagatcctcggcgatatgcaacccggagattattttgacctggtgctatttggcacccgggtgcagtcttggaaaggatctctggtgcaggcctctgaagctaacttgcaggcagcacaggactttgtgaggggcttttccctggacgaagctactaacttaaacggcggactgctgcggggtatcgagatcctaaaccaggtgcaagagtcactcccggaactctcgaaccatgcgagtatcctgataatgttgacagatggagaccctacagagggcgtcaccgacagatctcagatcttaaaaaatgttaggaacgccatccgcggtcgattccctttgtataaccttgggttcgggcacaacgtagattttaattttctagaagtcatgagtatggagaataacggtagagctcagcgaatttacgaggatcacgacgctacccaacaattacagggtttctactcgcaagtggcaaagcccttgctcgtggacgtggacctccagtatccgcaggatgctgtgttagctttgacccaaaaccaccacaaacagtattatgaaggctccgagatagtggtggctgggcgtattgccgataacaaacaatcctcttttaaggcggacgtccaggcacatggagagggtcaggagttctctatcacatgcttggttgatgaggaagagatgaaaaaacttcttcgcgaaagaggccatatgctcgaaaaccacgtggagaggttgtgggcttatctgacaattcaggaattgctggctaagcggatgaaggtggaccgggaggagcgcgctaatttgtcgagccaggcactgcagatgagtctcgactacggctttgtcacccctctgacatccatgtcaatccgtggaatggctgaccaagacgggctcaaaccaaccattgacaaacccagcttgcatcacccaagggcacctgaacgtggtcatccagtccttcagcaccaatag

SEQ ID NO: 226995 - DNA, 2841 bp, synthetic construct
  misc_feature 1..2841: note = Description of Artificial Sequence: Synthetic coding sequence
  source 1..2841: mol_type = other DNA
atgaaacggttgacctgtttcttcatttgcttttttctgtccgaagtctcaggttttgaaatccctatcaacggactgagtgaatttgtggactacgaggatcttgtggaactggcgcctggaaaattccagctggtggccgaaaacaggcggtatcagagaagtctgcccggagaatcagaggagatgatggaagaggtggaccaggtgacgctgtactcatacaaggttcagtccaccattacctcccggatggccacaacaatgatccaatccaaggtcgttaacaacagtccacagccccagaatgtggtctttgatgtgcagattccgaagggagcttttatctcaaacttttctatgactgtggatgggaagaccttccgtagctctattaaagaaaaaacagttgggcgagccctctacgcgcaagcacgcgcaaagggaaaaactgcaggactggtgcgcagctctgcgctagatatggaaaatttccgcaccgaggtaaatgtcttacccggtgctaaagtccagtttgaactacattatcaggaggtgaagtggcgaaagctaggcagttacgagcataggatttatctgcaacccggaagactggccaaacatctggaagtcgacgtatgggtgattgaaccccaggggctccgattcttacacgttccggacacatttgagggacatttcgacggagtaccagtaatttctaagggccagcagaaagctcacgtatcatttaagccgacagtcgcacagcagcgaatttgtcctaattgccgtgagaccgcagtcgacggggaattggtcgtgttatacgatgttaagcgcgaagaaaaagctggggagttagaggtttttaatggatatttcgttcatttcttcgcgccagacaatctggatccaatccccaaaaacattttgtttgtgatagatgtcagcggttcgatgtggggggtcaaaatgaaacagactgtggaagctatgaagactatcttggacgaccttcgggcagaggatcatttcagtgttatcgactttaaccaaaacatcagaacatggcgcaatgatctaatcagtgctactaagacacaggtggcagatgccaagagatatatagaaaagatccagccatctgggggtacgaacatcaacgaggcattgctgagggccatctttattctcaatgaagccaacaacctagggcttttagatcctaacagcgtgtcactcatcattttggtgagtgatggcgatcctacagtcggagaactaaagctgtcaaagattcagaagaatgtgaaagagaacatacaagacaatatcagcttattcagcctcggcatggggtttgacgtggactatgactttttgaagaggttatccaatgagaaccatggaattgctcagcgcatttatggaaatcaggatacttcctcacagctgaagaaattctataaccaagtcagtacacctttactgcgcaatgtgcagttcaattatccccatacgtctgtgaccgacgtgacacagaacaattttcataactattttggtgggagcgagattgtcgttgcgggtaagtttgacccggcaaaactcgatcagattgagagtgtcataaccgctactagtgccaacacacaattagttttagagacactggctcagatggacgatctgcaggattttctgtccaaggacaaacacgctgatccggatttcactcgcaagctttgggcttacctcactattaaccagctccttgcagaacgatcactcgctcccaccgctgcagctaagaggagaattacaaggagtatactccagatgagtcttgatcatcatatcgtcacaccactcactagtcttgtgattgaaaatgaggctggcgacgagcgaatgctggccgatgcccctccacaggatccttcctgttgctcaggagcattatattatgggtctaaagtggtccccgatagcacacctagttgggccaaccctagcccaacaccggtgatcagcatgttggcccagggatctcaggtactggagtctacacctccccctcacgtgatgagagtggagaacgatccacacttcatcatatacctcccaaagtctcagaagaatatctgcttcaacatcgatagtgagccagggaagattctcaatttggtgtccgatccggaaagtgggatagtggttaacggccagctggtcggagcaaagaagcctaataatggaaaactcagtacctattttgggaagctcggattttatttccagtccgaagatattaaaattgagatatcaactgagaccatcactctgtctcatgggtcctcgacttttagtctgagctggtctgacactgctcaagttaccaaccagcgcgtgcagatctctgtgaaaaaggagaaagtagtaaccatcaccctggacaaagaaatgtccttcagtgtgctcctgcatcgggtgtggaagaagcacccagtaaatgtggattttctggggatatacattccccctacgaacaagttcagcccgaaagcgcatggactgattggccagttcatgcaggagccaaagatccatatcttcaacgaaagacctgggaaggatcccgagaagcccgaggcttctatggaagttaagggccaaaagctgatcatcaccagaggcttacagaaagactatcgaactgacctggtctttgggactgatgtgacctgttggtttgtccacaacagcggaaagggcttcatagatggtcattataaagactacttcgtcccccaattatacagttttctcaagagaccatag

SEQ ID NO: 226996 - DNA, 2658 bp, synthetic construct
  misc_feature 1..2658: note = Description of Artificial Sequence: Synthetic coding sequence
  source 1..2658: mol_type = other DNA
atggttgcactgtctcatctggggtctgctctgcaactgggcagcttgttcccccgaagccccttcagactgctgggcaaacggtccctccccgagggcgtcgccaatggaattgaggtgtattcaactaaaattaactcaaaggttaccagtcgctttgcacacaatgtggtgacaatgcgggctgttaacagagcagacaccgctaaggaagtatcttttgacgtcgaattgcccaagacagccttcatcaccaatttcaccctgacaatcgacggtgtaacttaccctggcaacgtaaaagagaaagaagtagccaaaaagcagtatgagaaggcggtcagtcaaggtaaaacagcgggactcgttaaggcttctggcagaaagctcgagaagttcactgtcagcgtaaacgtagcagcaggatcaaaagtgaccttcgaacttacatacgaagaactcttgaaacgacacaaagggaaatatgagatgtatctgaaagtacaacctaagcagcttgttaagcattttgaaatcgaggtcgacatctttgagccccaggggatctccatgttagacgccgaggcttccttcattactaatgacttgctggggtctgccttgaccaaaagtttttctgggaaaaaaggacatgtgtcttttaaaccttcattggaccagcagaggagctgcccaacttgtactgactcacttctcaacggcgactttacaataacttacgacgtgaatagggaaagtccaggaaacgtgcagattgtaaacggatacttcgtacattttttcgcaccacaggggctgcccgtggtccccaagaacgtggccttcgtgatcgatataagcggcagtatggctggacgcaagctcgagcagaccaaggaagcattgctccggatcctcgaggacatgcaagaggaggattatctaaatttcatattgttcagtggtgatgtgagcacttggaaggagcatcttgtgcaagccactcccgaaaacttacaagaagctagaactttcgtgaaatctatggaggataaaggcatgactaacataaatgatggactcctgcgcggtatttctatgctgaacaaagcaagagaagagcaccgaatccctgagcgatccaccagcattgtgataatgttgaccgacggtgacgcaaacgtaggagaatcgcggcctgaaaagatccaggagaatgtgagaaacgctatcggtggcaaattcccactgtataacctgggctttggtaacaatctcaattataactttctcgagaacatggcactggagaatcacggatttgcccgaagaatctatgaggactctgacgccgacctccagctgcaggggttctacgaggaggtggctaaccccctcctgaccggtgttgaaatggaatacccagaaaacgctatcctggacctgacacagaatacctaccagcatttttacgacggcagcgagatagtcgtggcgggtcgactggttgacgaagacatgaatagctttaaggcagacgtgaagggtcacggggctaccaatgatctgacctttaccgaggaggtggacatgaaagagatggagaaggcgctgcaggagcgcgattacattttcggaaattatatcgagcgactatgggcctacttgaccattgaacaattgcttgagaagagaaagaacgcacacggcgaggaaaaagaaaaccttacggcaagagctcttgacctaagtctcaagtaccactttgttacccctttaacttctatggtggttacgaagcccgaggataacgaagatgaaagagccatcgccgataaacccggagagggattcagtgctacacccgtctcaccagcgatgagctacctgacctcttaccagcctcctcagaatccgtattactacgtggacggtgatccccactttattatacagattccagagaaagatgatgcactttgttttaacattgacgaagcccctggcacagttttacgcctgattcaagatgccgtgaccggcctgactgtgaatgggcaaatcaccggtgataagcgagggagcccggactcaaaaaccaggaagacatactttggtaaacttggaatcgccaacgcgcagatggactttcaggtggaagtcaccacagaaaaaatcaccctctggaacagggctgtaccaagcacctttagttggctggacactgtcactgttacccaggatgggctgtccatgatgatcaaccgaaagaatatggtggtctcatttggtgacggtgtgacgttcgtggtagttttgcaccaggtgtggaaaaaacaccccgtgcatcgtgatttcctgggattctatgtggttgattcacacagaatgtccgcacagacacacggacttttaggccagttctttcagcccttcgactttaaggtgtctgacatccgacccggttcagacccgaccaaaccagatgccacattggtagtgaagaatcaccagttgatagtgacaagggggtcgcaaaaggattatagaaaggacgccagtataggaaccaaggtggtctgctggttcgtacataataacggggaaggattgattgacggagtgcacacggattatatcgtgccaaatctattctag

SEQ ID NO: 226997 - DNA, 2013 bp, synthetic construct
  misc_feature 1..2013: note = Description of Artificial Sequence: Synthetic coding sequence
  source 1..2013: mol_type = other DNA
atggcgttcgcctggtggccatgcttgatcctggccttactgtcctcgctagccgcaagcgggtttccaagatctcccttccgccttttgggaaagcgctctctgcctgagggcgtcgcaaacggtatcgaggtgtactccaccaagattaatagcaaggttacctctagatttgcccacaacgtcgtgaccatgagggccgtgaatcgcgcagatactgccaaggaagtgagcttcgacgttgagcttcctaagacggcttttatcaccaacttcacactcaccattgacggtgtcacctacccaggcaatgttaaagaaaaggaagtagccaagaagcagtatgagaaggcggtgtctcagggaaagactgcaggactagttaaggcgagcgggagaaagcttgaaaaatttactgtttccgttaatgttgcggcaggcagcaaagtcacattcgagctcacctacgaagaattactgaagcgccataaagggaagtatgaaatgtacctgaaggtgcagcccaaacagctcgtcaagcattttgagatcgaggtggatatcttcgagcctcagggcataagtatgcttgacgccgaggcatcattcattacaaatgacctcctgggctccgcactaacaaaaagcttctccggcaagaaaggccatgtcagcttcaagccgtccctggaccagcagcgcagctgtccaacgtgcactgactccctacttaatggcgatttcacaatcacatacgacgttaatcgggagagccctggcaatgtgcaaatcgttaatggttatttcgtacacttttttgcgccacagggactgcccgtggtgcccaaaaatgtcgccttcgttatcgatattagcggttcaatggcaggtcgaaaattagagcaaactaaggaggctcttttacgcatacttgaagacatgcaagaagaagactaccttaattttatattatttagcggcgacgtctcaacatggaaagaacatttagtgcaggccactccggagaacctccaggaagcgagaacttttgtgaaatcaatggaagataagggaatgacgaatattaatgacggcttactgcgtggcatatcgatgctgaataaagccagggaagaacacagaattccagagcgctctacttcaattgtcattatgctgaccgacggggacgcgaacgtgggcgagtcacgccctgaaaaaattcaggagaacgttcggaatgccattgggggaaagttcccactgtataatctggggttcggcaataatcttaattacaacttccttgagaacatggctctggaaaatcatggctttgctcggagaatttacgaagattcggacgcggatctccaactgcaagggttctacgaggaagtggccaaccctctgttgacgggagtggaaatggagtaccctgagaatgccattttggacttaacacaaaacacatatcagcacttctacgacggcagtgaaatcgtggttgcaggtcgcctggtggacgaagatatgaacagctttaaagccgatgtgaagggccacggagctactaacgacttaactttcacagaagaagtggatatgaaagaaatggagaaggctctccaggagagggattacatctttggcaactacatcgagagactgtgggcgtacttgaccatcgagcaattgttggaaaagaggaagaatgcacatggcgaagagaaagagaatttgactgcacgcgcattggacctcagcttgaaataccactttgtcacccccctgacgtctatggtggtgaccaaaccagaggacaacgaggacgagagagccatcgccgacaaaccaggtgaagggggagactcacatacaggcgagcctaggcatgtgttaccagaccaactgcccgcatcttcaaaaccactgcttctatgtggtcggggaagtccactgcatcaccccaatagcggtgagcgccgttgtcctctgctccaacacagatag

SEQ ID NO: 226998 - DNA, 2673 bp, synthetic construct
  misc_feature 1..2673: note = Description of Artificial Sequence: Synthetic coding sequence
  source 1..2673: mol_type = other DNA
atggctttcgcctggtggccttgcctcatccttgcattgttgtcaagccttgcagcttccggtttccccagatccccattcaggcttcttggaaagcgctctcttccggaaggggtcgccaatggtatcgaggtttactctaccaaaatcaactcaaaagtaaccagtagatttgctcataacgtggttaccatgcgcgctgtcaacagagccgacacagcaaaggaggtgagctttgacgtggagctgccaaaaaccgccttcatcacgaatttcaccctgacaatcgatggcgtgacataccccggaaatgtcaaggaaaaggaagtggctaagaagcagtacgagaaggccgtgtcgcaaggcaaaacggctggcttggtcaaggcgtccggtcgcaaactggaaaagtttacagtttccgttaatgtggcagccggaagtaaggttacctttgagctcacatatgaggaactgttgaaacgccataaaggtaagtacgagatgtatttaaaggtgcagccaaagcaactcgtgaaacattttgaaatcgaagttgacattttcgagccgcagggcatttctatgttagacgctgaggcttccttcattactaacgatttgttaggcagcgctctaacaaagagcttttccggcaagaagggccacgtgtcctttaaaccttcactcgaccaacaaaggtcttgccctacctgcacagactccctgctgaacggagatttcacaataacttatgatgttaatagggagtctcctggaaatgtgcagattgtgaatggctattttgttcatttttttgcgcctcagggactgcccgtcgtacctaaaaacgtggccttcgttatcgatatctccggcagcatggcgggaaggaagttggagcaaactaaagaggcgctacttcgcatcttggaagatatgcaggaggaggactacctcaatttcattttattttcaggcgacgtgagtacgtggaaggaacacttagttcaggcaacccccgagaacctccaggaggcacgaacctttgtgaagtctatggaagataaagggatgaccaacataaacgatggtctcctgagaggtataagcatgctcaacaaggctagggaagagcataggatcccggaacggagtacctccatcgtgataatgctgaccgatggggatgctaacgttggagagagtcggcctgaaaaaattcaggaaaacgtccgaaatgctattggtggaaagttccctctgtacaacctcggctttggaaacaacctaaattacaattttttagagaatatggccctggaaaaccatggttttgcaaggaggatttatgaggactccgatgcagaccttcagttgcaggggttctacgaggaggtggcgaacccgctgctcacaggggtcgaaatggaatatccagagaatgccatccttgaccttactcaaaacacatatcaacacttttatgacggatcggagattgtggtcgctgggcgactggtagacgaggacatgaacagtttcaaagccgatgtgaaaggccacggggctacaaacgacctaacttttacagaagaagtagacatgaaagaaatggagaaggccctgcaagaacgggactacatttttggcaattatatcgagaggttgtgggcctacttgaccatcgagcagcttctggaaaaaaggaagaatgctcacggggaagagaaggaaaatcttacggcccgagccctggatctgtcattaaagtatcacttcgtgactccattaacgagcatggtggtgactaaacctgaggataacgaagacgaaagagccatcgcggacaagccgggagaggatgccgaagccactcctgtgtcccctgcaatgtcatacctgacatcttaccagccacctcagaacccttactactatgttgacggcgatccacacttcatcatccaaattccagagaaggatgacgccctatgcttcaatatagatgaagccccaggcacagttctaaggctgatccaggacgccgtgacgggtctcaccgtgaacggacagattactggcgataaacggggttctcctgactccaaaacaaggaagacttacttcgggaaactcggaatcgctaacgctcagatggattttcaggttgaagtcactactgaaaaaatcaccctttggaacagggcggtgccttcaaccttcagctggttggatacagtaactgtgacccaggacggcttaagcatgatgatcaatcgtaagaatatggttgtatcattcggtgacggagtcactttcgtggtcgtcctgcaccaggtttggaaaaaacacccagttcacagggattttctggggttctatgtagtggattcccatcgcatgtccgcccagacccacgggctcctaggacaatttttccagccgtttgacttcaaggttagcgatatacggccaggatccgaccctactaagcctgatgccacgctcgtggttaaaaatcaccagctgatagtcacaaggggcagccaaaaggattatcgtaaagatgcctctattgggaccaaagtggtgtgttggttcgttcataataacggtgaaggcctgatcgacggcgtccatactgattatatcgtcccgaacctgttttag

SEQ ID NO: 226999 - DNA, 1977 bp, synthetic construct
  misc_feature 1..1977: note = Description of Artificial Sequence: Synthetic coding sequence
  source 1..1977: mol_type = other DNA
atggcctttgcctggtggccctgcctgatcttggcccttctgagcagcctggctgcctcaggctttcctcgctcccccttccgtttacttggaaagcggagtctccccgaaggggtcgccaacggaatcgaggtgtactcaaccaaaataaattctaaagttacaagcagattcgcccataacgtggttaccatgcgcgctgtcaacagagcagatacggcgaaggaggtcagcttcgatgtggaactgccaaagacagcctttatcaccaactttactcttacaatagatggcgtgacttatcctggtaacgttaaggaaaaggaggtggctaaaaaacagtacgagaaagcagtgagtcagggcaaaacagccggtctcgtgaaggcaagcgggaggaagctagaaaaattcacagtcagcgtgaacgtggcagctggctccaaaaggcacaaagggaagtacgaaatgtacttgaaggtgcagcctaagcaactggtgaaacactttgagatagaggttgacattttcgagccccagggcatctccatgctggacgcagaagcaagcttcatcacgaacgacctgctggggagcgctcttactaagtcttttagtggtaagaagggccacgttagctttaagcctagcctggatcagcagcgctcatgccctacctgcacagatagtctactgaacggcgactttacaatcacgtacgatgtgaatagagaaagtcctgggaatgttcaaattgttaacggatacttcgtgcatttcttcgctccccagggccttcctgtggtgcctaaaaatgtcgccttcgtaatcgacatttcaggcagcatggccggacggaaactggaacagactaaggaggctctactgcgtattctggaggacatgcaggaagaggattatctcaattttatcctgtttagcggcgatgtgtccacttggaaggagcacctggtccaggctaccccggagaatctccaggaagcgaggacatttgtgaaatcaatggaagacaaaggaatgaccaatatcaacgatggactgttaaggggcataagcatgttaaataaggccagggaggagcaccgcatccccgaaagatctacctctatcgtaatcatgctgaccgacggcgatgccaacgtcggtgaatccaggcccgagaaaatacaggaaaacgtaaggaacgctatcgggggaaagttccctctttacaatctgggatttggaaacaatctgaattataacttcctcgagaatatggccttagaaaaccatggttttgcacgacggatttacgaagacagcgacgccgaccttcagttacaggggttctacgaggaagtggctaaccccctcctgacaggggtggaaatggaatatcctgagaatgccattctggacctgacacagaatacataccaacatttttacgacggatctgagattgttgtggccggaagactggtagacgaggatatgaattcttttaaggcggacgtgaagggccacggtgcaaccaatgacttgacttttactgaggaagttgacatgaaggagatggaaaaggcacttcaggagcgtgactacatatttggaaactacatcgaacggctctgggcctacctgacaatcgagcagctgctcgagaaaaggaaaaacgcccacggggaggagaaagaaaacctgaccgcgagagcgctggacctgagcttgaaatatcacttcgtgacccctctgacatccatggtggtgacgaagccagaggataatgaggacgaacgcgcaatcgcagacaagcctggcgagggcggtgattcacacactggtgagcccaggcacgtattaccggaccagttgcctgccagcagtaagccgctcctgttgtgcggcagaggttctccactccaccatccaaacagcggggaaagaaggtgccctctgctgcaacaccgctag

SEQ ID NO: 227000 - DNA, 2793 bp, synthetic construct
  misc_feature 1..2793: note = Description of Artificial Sequence: Synthetic coding sequence
  source 1..2793: mol_type = other DNA
atgaaaccccctcggccagtgaggacttgcagcaaagtcttggtactgttgtcgttgctcgccatccatcaaacaacgaccgcggagaagaatggcatagatatctattccctgacagtcgattcgcgagtgagcagtcgcttcgcacacactgtggttacctcaagagtggtcaaccgggctaacacagtgcaggaggctactttccagatggagttgccgaagaaagcatttataacgaacttcagcatgatcatagacggcatgacgtacccaggtatcatcaaggaaaaggctgaggcccaggcacagtactcagccgctgtcgccaaggggaagagtgccggtctcgtaaaggctactggcagaaacatggagcagttccaggtgagcgtgtcagtagcccctaacgcaaagatcaccttcgagctagtgtatgaggaactgctcaagcgccgactcggggtatatgagctgctgttgaaggtgcggccacagcagctagtgaaacatctgcagatggatatacatatctttgagcctcagggaatcagttttctggagactgaaagcaccttcatgacgaatcagcttgtcgacgccctgaccacctggcagaacaaaacgaaagcacacatacggttcaaacctacattatcacagcagcagaaatcccccgaacagcaagaaacagttctggacggcaacctgattatcagatacgacgtggatcgagccatttccggaggttcaatccagatagagaatggctacttcgtgcactactttgcaccagaaggactcaccactatgcccaaaaatgtcgtgtttgtcatcgataaatccgggtcaatgtctggacggaaaatccagcaaacccgggaggcactgatcaagatcctggatgacctgagccccagagatcagttcaacttgatagtgttcagcacagaagcaacacagtggagaccttcacttgtccccgctagcgccgagaatgtgaataaagcgcgtagcttcgcagccggtatacaggctctcggcggtacaaatatcaacgacgctatgttaatggcagttcagcttctggactcgagcaaccaggaagaaaggcttccagaaggcagtgtgagtcttataatcctgcttaccgatggagatcctaccgttggagaaactaacccgagaagcatccagaataacgtgcgcgaggcagtgagtggtcggtacagcttattctgcttgggatttggtttcgacgtgtcatatgcatttctcgagaaactggccctggacaacgggggacttgcccgaagaatccacgaggattccgactcagctcttcagctccaggatttctaccaggaggtggcgaatcctctcctgacggccgtaaccttcgaatacccgagtaacgcagttgaggaagtgacccagaacaatttcaggctgctgtttaaaggctccgagatggtggttgccggtaaactgcaggaccgtggtcctgacgtgctgactgcaaccgttagcggaaaactccccacccaaaacatcacttttcagactgaatcttctgtggccgaacaggaagcagagtttcagtcccccaagtacatcttccacaatttcatggagcggctgtgggcatatttgacaattcagcaactgttagagcaaaccgtcagcgcgagtgacgcagaccaacaagctctccggaaccaggcgttgaacctgagcttagcttacagcttcgtaacgcccctgacatccatggtggtgaccaagcctgacgaccaggaacaatcacaggtggcagagaagcctatggagggtgagtccaggaataggaatgtccattccggttcgacattttttaagtactatttacagggtgcaaaaatcccaaaaccagaggctagtttcagcccgaggcgcggttggaaccgccaggctggagcagccggatccaggatgaatttcagacctggcgtgctctcgagccgtcagcttggactgcccggacctccggacgtgcccgatcacgccgcttaccatccattccgacggctcgccatcctgccagcatcggccccacccgcaacatccaaccccgacccagccgtgtctcgagtcatgaacatgaagatcgaagaaaccaccatgactacacagaccccagcccctattcaagcaccgtctgccatcctgcccctgcccggtcagtctgtggaacggctatgtgtggaccctagacatcggcagggacctgtgaacctgctgtcagacccagaacagggagtcgaagtgaccggacagtatgagagagagaaagccggtttttcttggatcgaagtgaccttcaaaaaccccctcgtctgggtgcacgcatctccagaacacgtcgtggtgaccaggaaccgccgaagctcagcttacaagtggaaggagacgctctttagtgtcatgccaggacttaagatgacaatggacaaaacagggctgcttctgctctccgatcccgacaaagtcacgatcggacttctgttctgggacggacggggtgaagggctgcgattgctcctgcgggacaccgatagattttcttcccatgttggagggacgttaggccagttttatcaagaggtgttgtgggggtcacctgccgcaagcgacgatggcagacgtacactaagggtacagggcaacgatcactcggcaactcgagaacggaggctggactaccaggaagggcctcccggtgtcgaaatctcatgttggagtgtcgagctgtag

SEQ ID NO: 227001 - DNA, 2745 bp, synthetic construct
  misc_feature 1..2745: note = Description of Artificial Sequence: Synthetic coding sequence
  source 1..2745: mol_type = other DNA
atgaaaccgcctaggccagtccggacatgctctaaggtgctggtgcttctgtccttgctcgcaattcaccagaccaccaccgcagagaagaacggcatcgacatttattccctgaccgttgattctcgcgtgtccagtcgcttcgctcacaccgtggtaacctccagggtggtgaatcgtgccaacacagtgcaagaagctaccttccagatggagctccctaagaaggcatttattaccaatttttcaatgataatcgatggaatgacataccccggaatcatcaaggaaaaagccgaagctcaggctcaatattcagccgcagttgcaaagggcaagagtgccggtctagtaaaggcaacgggtaggaacatggagcagttccaagtctcagtgtccgtggctcctaacgccaaaattaccttcgagctggtttacgaggagcttttaaagcggaggttgggcgtgtacgagctcctgttgaaagtgcgaccacagcagctggtgaagcacctccaaatggacatccatatattcgagccacaaggcatatcctttctagaaaccgaatctacgttcatgactaatcagctcgttgatgcacttacaacatggcagaacaaaactaaggcgcacatacggttcaagcccaccctgagccaacagcaaaaatcccctgagcagcaagaaaccgtgttggatggaaacttgattattcggtatgatgttgaccgggctatttctggaggaagtattcagatcgagaacgggtactttgtacactacttcgcccctgaagggttgaccacgatgcccaaaaacgtggtttttgtgatcgacaaatccgggtctatgtcagggagaaaaatccaacaaacacgggaagcccttatcaagattctggacgacctctcacctcgggaccagttcaatttgatcgtgttctcaaccgaggccacccagtggagacctagcctggtacccgctagcgccgagaacgtaaataaagcaaggtcctttgctgcaggtatccaggctttagggggaacaaacattaacgacgcaatgctaatggctgtgcagctgctagacagtagtaaccaggaggaacggctgccagaggggtctgtttctctgataatcttgctgaccgacggcgacccaacagtgggggaaacaaatcccaggtctattcagaacaacgtgagagaggctgtgtccggaagatactcattgttctgcctgggttttggctttgatgtatcgtacgcctttttagagaaactcgcactggacaatgggggtctggccagacggatccatgaggactccgacagcgcactacagctgcaggacttttaccaggaggtagccaatcccctccttactgccgtgacttttgagtatcccagcaatgcggtcgaggaagtcacacagaataacttccggcttctgttcaaaggctccgaaatggtagttgccggaaaactgcaagatcggggaccagatgtcctcaccgccaccgtctcaggcaagcttcctacccagaatatcacctttcagaccgaatcttctgtcgctgaacaagaagcagaattccagtcaccaaagtatattttccataacttcatggagaggttgtgggcttatcttactattcagcagctactggagcagaccgtatccgctagtgatgccgatcaacaagctttgcgcaatcaagctctcaacttatcactggcctacagcttcgtcacgcccttgactagcatggtggtgactaaacctgatgatcaggagcagagtcaagttgccgagaaacccatggaaggcgagtctcggaaccgcaacgtgcattccgccggagccgctggatcccgcatgaatttccggccaggggtacttagctcaagacaactgggtctcccaggtccacctgacgttcccgaccatgctgcctatcaccccttcagacgcctcgcaatcctgcccgcttcagctcctccagccaccagcaatcctgatccagccgtgagtagggtcatgaacatgaaaatagaggaaacaacgatgacgacccaaacacctgcctgccccagctgcagcaggagtcgagcccctgctgtacctgcgcctatccaggccccatctgccatcctgcctctgccaggacagagcgtcgaaaggttgtgtgtagatccccgacacagacaaggacccgtcaacctcctgagtgatccggagcagggcgtggaggtgaccggccagtacgagagggaaaaggcgggatttagctggatcgaagtgacgtttaaaaacccccttgtctgggttcacgcttccccagagcacgtagtggtgacacgcaaccgcaggtcgtcagcctacaaatggaaggagacactgttctcagttatgcctggattgaagatgacaatggataaaaccggattattattgttgtcagaccctgataaggttactatcggtctgttgttctgggacggccgaggtgaaggcctgcgtctgcttctgagggacacagatagattttcctcacacgtaggcggaaccttaggacaattctaccaagaagtgctgtggggcagccctgctgccagcgatgatggacgtcgtaccttgagagtgcagggcaatgatcattcagccacaagggaaaggcggcttgactaccaggaaggccctccaggcgttgagatttcctgttggtctgtggaactgtag

SEQ ID NO: 227002 - DNA, 2703 bp, synthetic construct
  misc_feature 1..2703: note = Description of Artificial Sequence: Synthetic coding sequence
  source 1..2703: mol_type = other DNA
atgaagccacctagaccagtacggacgtgctcaaaggtcctggttcttctgtccttgctagctattcaccagacaactacagctgagaaaaacgggatcgatatctacagcctgaccgtcgactcacgagtctcttcaaggttcgctcacacagtggtaactagtagggttgtcaaccgtgccaacaccgtccaagaggccacatttcagatggaactaccgaaaaaggccttcatcactaatttctctatgattattgacggtatgacttaccccggaatcatcaaagaaaaggctgaggcgcaggcccagtactccgccgcagtggctaaggggaaaagcgctggcctggtaaaggccacaggcagaaacatggagcagtttcaggtgagtgtttctgtggctcctaacgctaaaatcacctttgaactggtctacgaggagctcctgaaacgtcgcctgggtgtatacgagttgctgctgaaggtgcgtccccaacaactcgtcaagcacctgcagatggatatccatatctttgagccccagggtattagttttctggagacagagtctaccttcatgacaaaccagttggtcgatgctctcaccacctggcagaataagacaaaggctcatatccgctttaagccaacactgagccagcaacagaaatcgcccgagcagcaagaaaccgttctcgatggtaatctgattatccgatatgacgtggacagggctatatccggtggctccatccagatcgaaaacggttacttcgtccattacttcgcgcctgaagggttgaccactatgcctaagaacgtcgttttcgtgatcgacaagtctggctccatgtcgggcaggaaaattcagcagactagagaagccttgatcaaaattttggacgatctctcccccagggaccagtttaacttgatagtgttctcgaccgaggctacgcagtggcgccctagcttggtccccgcttctgcagaaaatgtgaacaaggcaagaagttttgccgctggaatacaggcactggggggtacgaatattaatgacgctatgctgatggcggttcagcttctggatagctcaaaccaggaagagagactgccagaaggcagtgtcagcttgattatactgctgactgacggggatcccacagtcggggaaactaacccaaggtcgattcagaacaacgttagggaagcagtgtcaggtcgttacagtctgttttgtctaggttttgggttcgatgtttcatatgcgtttttagaaaaactggcacttgataatggtggcctcgcccgacgcattcatgaagacagcgatagcgccttgcagttgcaggacttctaccaggaggtggcgaaccctctcctgacagccgtgacttttgagtatccaagcaacgccgttgaggaagttacgcagaacaacttccgattactgttcaagggaagcgagatggtcgtggccggaaagctgcaggatcgcggtccagacgtgctgaccgcaacagtgtccggaaagctgccgacccagaacattacattccagacggagagctcggttgccgagcaggaggcagaattccagagcccaaaatatatttttcacaatttcatggagcgtctgtgggcctatttgaccatccaacagttgctggaacagaccgtatccgcgagtgacgcggaccagcaggccctgagaaaccaggcactgaacctgagcttggcttattccttcgtgaccccactcacctctatggtggtcaccaaacctgatgatcaggaacaaagccaggttgccgaaaaacctatggagggcgagtccagaaaccggaacgtccacagcgctggggctgcaggaagcaggatgaatttccggccaggggtgctgagctcccgccagttgggcctgcccggacctcctgatgttcccgatcacgctgcttaccacccatttagacgcctagccatcctacccgcttctgcacctcctgcaacctctaatcctgacccagctgtgtctcgtgtcatgaacatgaaaatcgaggaaaccaccatgactacccagacaccggcacctattcaggcccctagcgccatcctgcccctgcccggacaaagtgtagagcggttgtgtgttgatcccagacatcgtcaaggccctgttaacctcctctccgatcctgagcaaggcgtggaggtcactggccaatacgaaagagaaaaggcgggatttagctggatcgaggtcacttttaagaaccccctggtgtgggtgcatgcgtcccccgagcacgtggtagtgacccgaaaccgccgtagctctgcctataaatggaaagagacactattcagcgtaatgcccggactgaaaatgacaatggataaaaccgggcttctgctgctaagcgatccagataaagttaccattgggctgcttttctgggatggacgtggtgaagggttgcgacttctgttgagggacacagacagatttagcagtcacgttgggggtacgctgggccaattttatcaggaggtgctatgggggagtcccgcagcaagtgacgacggcaggcgcactttgcgtgtacaggggaacgatcactcagccacaagggagaggaggctggactaccaggagggacccccaggcgtcgaaatcagctgctggtccgtcgagctgtag

SEQ ID NO: 227003 - DNA, 1683 bp, synthetic construct
  misc_feature 1..1683: note = Description of Artificial Sequence: Synthetic coding sequence
  source 1..1683: mol_type = other DNA
atgacataccctggtatcatcaaggagaaagcagaggcccaggctcaatacagcgctgccgtggccaagggaaagtccgctgggctggtgaaagcaaccggaagaaatatggagcagttccaggtctccgtttccgtggccccaaatgcaaagattacttttgagttagtctacgaggagttgctgaagcgacggctcggagtatacgaactgcttttaaaggttaggccgcagcagctcgtgaaacacctgcagatggatatacatatcttcgaaccccagggtatatcatttctggaaactgagagtacgtttatgaccaatcagttggtagatgctctgacaacctggcaaaataaaaccaaagcccatattagattcaaacctacactgtctcagcagcaaaaatcccctgagcaacaagaaacagtgctcgatgggaatcttattataagatacgatgtggaccgagctatctcgggcggatcaatccaaatagagaatggctacttcgttcattacttcgcaccagaggggttaactacaatgccaaagaacgtggtatttgtgatcgacaagtcgggatcaatgagcggcagaaaaatccagcaaactagggaggctctgataaagattctcgatgacctgtctcctcgtgatcagttcaatctgatagtatttagcactgaggcaacccagtggaggccatcccttgtgccggcttccgccgagaatgtgaacaaagcccgtagcttcgccgctggcattcaggcactgggtgggactaacatcaacgatgcgatgctaatggcagtgcaattactcgattcctcaaatcaggaggaaaggctccccgagggtagcgtcagtctgatcattctgctaacagacggagaccctaccgtgggagagacaaaccctcggtctatccagaataatgttagggaagccgtttccggaagatattcgctcttttgtctaggttttggatttgacgtttcctatgccttcctagaaaaactcgctttggataatgggggtctggctcggaggatacacgaggactcagatagtgctttgcagttgcaggatttttatcaggaggttgccaaccccctgcttactgcggttacatttgaatatccaagcaacgcagttgaggaagttacccaaaacaattttaggctcctatttaaaggttcggaaatggtcgtcgccggtaaactgcaggaccgcggacctgatgtcctcacagccacagtatcaggaaagttgccaacacaaaatattacttttcagactgaatcttccgtagctgagcaagaggctgagttccaatctcctaagtatatatttcataacttcatggaaaggctctgggcctacctaacgattcaacagctgctggagcagactgtgagcgcttcagacgctgatcagcaggccctgagaaaccaggccctaaacctcagtcttgcttattctttcgtgacgcccctaacttccatggtcgtgaccaagcccgacgaccaggaacaaagccaagtggccgaaaagcctatggaaggagaatctcgtaacaggaatgtgcatagcggcagtacttttttcaaatactacctgcaaggcgcaaagatccccaagcctggagacaaggtcgggggtggcggaagaggagactag

SEQ ID NO: 227004 - DNA, 2667 bp, synthetic construct
  misc_feature 1..2667: note = Description of Artificial Sequence: Synthetic coding sequence
  source 1..2667: mol_type = other DNA
atgaaaccccctcggccagtaaggacttgtagcaaagtactcgtcttactctcattattagccatacaccagacgacaaccgctgagaagaatggcatcgatatctattctttgacagtcgactcgcgagtgtcgtctcgctttgctcatactgtggtcacgtctagggttgtgaacagagccaacactgtgcaagaagcaacatttcagatggaactacccaagaaggcttttatcactaatttcagcatgatcattgatggcatgacttatccaggtattatcaaggagaaagccgaagcgcaggcccagtactctgccgcagtagccaaaggaaagtccgccggactggtcaaagccactgggcgtaatatggagcaatttcaggtcagcgtgagtgtggcacctaacgcaaaaagacgtttaggggtgtacgaactgctgctgaaagtccgaccacagcagctggtcaaacacctccagatggacatccacatcttcgagccccaggggatctcctttctggaaactgagagtacttttatgacaaaccagttagtggatgctctgaccacgtggcagaacaagacgaaggcccatatacgttttaaacctactctgtcacagcagcagaagtcacctgagcagcaagaaacagtgcttgatggtaaccttattattcgttatgacgtggatagagctatatcaggcggaagtatccagattgaaaatggctacttcgtgcattacttcgctccagaaggcctgaccacgatgccaaagaatgtggtgtttgtcatagataagtcaggcagtatgagcggacgtaagatccagcaaactagagaggcactgataaagatcctggatgatctctccccccgagaccagtttaatctaatcgtattcagcactgaggccactcagtggaggcctagcctcgtgcctgctagcgccgagaacgtgaacaaagctagatcatttgctgcaggaatccaggccctaggcggaaccaatattaacgacgccatgctaatggcagtacagttgcttgatagttccaaccaggaggaaaggttgccagagggttcagtttctctgatcatccttctgacagatggagacccaacggtcggcgagactaaccctcggagtatccagaacaatgtccgcgaagccgtgagtggtcgctatagtctcttttgtctgggttttggatttgacgtgtcgtacgccttcttggaaaagctcgccttggataatggaggtcttgctaggcgaatccatgaggatagtgacagcgctctgcagctgcaggacttctatcaggaggtcgctaatccgcttctgacggctgttacattcgagtatccgtcaaacgccgttgaggaggtgactcagaacaatttcaggctcttatttaagggcagcgagatggtggtcgctggtaaactgcaggacagagggcctgatgtgcttacggccacagtgtcgggcaagctccccacacagaacatcacttttcagactgaaagcagcgttgcggaacaggaagcagagttccagtcgcctaaatacatctttcataacttcatggaacgtctatgggcgtacctcaccatccagcaattactggaacagaccgtctcagcaagtgacgccgatcagcaggcactacgcaatcaggccctgaacctttcactggcctattctttcgtcaccccactgacttccatggtcgtgaccaagcccgacgaccaggagcagagccaggtggcggaaaagcctatggaaggcgagagccggaaccggaacgtccatagtgcgggagccgctggatcaagaatgaattttcgcccaggggttctgtccagccggcaattgggcttgcccggtccacctgacgtacccgatcacgcagcctatcatccttttcgacggctggcaattctccctgcatcagcccctccagcaacatctaaccccgatccagccgtgtcccgagtaatgaacatgaagatagaagagactactatgactactcagacacccgctcccattcaggctccgtccgccatccttccactgcctgggcaaagcgtggagaggctgtgcgttgatcctcgccaccggcaggggcctgtcaatctcctgtccgatccggagcagggagttgaagtaacggggcagtatgagcgggagaaagctgggttctcctggatagaggttacgttcaagaatcccctcgtgtgggtacatgcatcaccagagcacgtcgtggtgactaggaatcgcagatctagcgcttataagtggaaggagaccttgttttcagtgatgccgggactaaaaatgacaatggacaagacaggactgcttctgctgagcgacccagacaaggtgactattggtctcctgttctgggacggtcggggtgagggcctgcggctgctgctccgagacacagaccgtttcagctcccacgttggtggaacgctgggacagttctatcaagaggtgctgtggggttcccctgccgcttctgatgatggtcgccgaaccctcagggtacagggtaatgatcacagtgcaacccgagagaggcgcctcgactaccaggagggccctccgggagtggagatcagctgttggagtgtagagctctag

SEQ ID NO: 227005 - DNA, 2871 bp, synthetic construct
  misc_feature 1..2871: note = Description of Artificial Sequence: Synthetic coding sequence
  source 1..2871: mol_type = other DNA
atgctgctcctgctcggactctgcctggggctgagtctgtgtgtgggttcccaggaggaagcgcagtcttggggccatagcagtgagcaggacggattacgggtcccaagacaggttaggttgctgcaaaggttgaaaacaaaaccccttatgacagagttcagtgtcaagtcaactattattagcagatacgccttcactactgtgtcctgtaggatgctcaaccgcgcatctgaggatcaggacattgagtttcagatgcagattcccgctgccgcttttatcaccaactttacaatgctgatcggcgataaggtgtaccagggtgagatcacagaacgggaaaagaagagcggagatagggtgaaagagaagagaaataagactacggaagagaatggggaaaaagggactgaaattttccgtgcttctgcagtaataccaagcaaagacaaggctgcttttttcttgagctacgaagaactactccagcggagactcggaaagtacgagcactcaattagtgtgcggccacagcagcttagcggaaggctcagcgtcgacgtgaatatcttggaaagcgctggaatcgccagcctggaagtgctccctctccataattcacgtcaacgcggatcgggaagaggagaagacgacagcggccctcctccgtctaccgtaatcaatcaaaacgaaacattcgcaaatatcatctttaaaccaacagtggttcagcaggccagaatagcccagaatggcatcctcggagacttcatcattaggtatgacgttaaccgggaacagagcataggtgatattcaggtattgaatggttatttcgtacactatttcgcacctaaagatttgccaccgttgcctaagaacgtggtgttcgtgttagattcaagcgcctccatggttggaacaaaactccggcagacaaaggatgcactgttcacaatccttcatgatctgaggcctcaggaccgcttttcaattattgggttttccaataggatcaaagtctggaaagaccacttgataagcgtgaccccagattctattagggatggaaaagtgtacatccaccacatgtctcctacagggggaacagacattaacggtgcactgcagagagctattcgactgttaaacaagtatgttgcccacagtggaattggagatcggagcgtcagcctcatcgtatttctgactgatggcaaacctacggtcggagagacacacacactaaaaatccttaataacacccgcgaagccgcaagagggcaggtctgcatcttcactattggaataggtaatgacgtcgacttcaggctgctggagaaactatccctggagaattgtggtctaacccggagagtgcacgaagaagaggatgccggatctcagctgataggattttatgatgagattaggaccccgcttctgtctgacatccggatagactacccaccaagcagcgtagtccaggcgacaaagacactattccctaattactttaacgggtcagagattattatagcaggcaaactggtagacaggaagctcgaccatttacacgtagaggtaaccgccagtaattctaagaagtttatcatcctgaaaactgatgtccccgttcggcctcagaaggccggaaaggacgtgaccggaagtccacggccagggggtgatggagagggagacaccaaccacatcgagcgactctggtcgtatctcacgacaaaggaactactttcttcctggcttcagtctgacgacgagcccgaaaaagagagactccgccaaagagcccaagcactcgctgtgagttatcgattcctgactcccttcacaagtatgaagttgaggggccctgtccccagaatggacgggctggaggaggcgcatggtatgtccgctgcgatgggacctgaacccgttgtccaaagtgtacgaggagcaggcacacagccaggacccttattgaagaaaccataccagcctcgcattaaaatcagtaaaacatctgtcgatggggatcctcacttcgtagtcgacttccccctgtcgagactgaccgtatgtttcaacattgatggacagcccggagacatcctccgccttgtgtctgaccatcgggattctggcgtgacagtcaatggtgagctgatcggtgctcccgctccccctaatggacacaaaaagcagcggacctatctgaggaccattacgatcctaatcaacaaaccggaacgctcctacctggagattactccatcccgcgtcatcctcgatggcggtgaccgcttggtgctaccctgcaaccaatccgtcgtggtggggtcctggggacttgaggtgtcagtgagcgcaaatgccaacgtgacagtaaccattcagggctcaattgccttcgttatcctgattcatctgtacaaaaagcctgcgccatttcaaaggcatcacctagggttctacatcgccaattccgagggactgagttcaaattgtcatggtctgctcggacagtttctgaatcaagacgcccgtctgacggaagatccggctggaccatcccaaaacttgacacacccactgctcctgcaagtgggagagggcccagaggccgtcctcactgtgaagggacaccaagtccctgtggtttggaaacagaggaaaatttataacggcgaggaacagatcgattgctggttcgctcgcaataatgccgctaagcttatcgatggagagtacaaggattatctcgccttccacccctttgatacgggcatggatacctggcccggaaatgtgcagggtgcactgaaactggccgcactgaaaatgcaagtacacgagggacagtag

SEQ ID NO: 227006 - DNA, 2229 bp, synthetic construct
  misc_feature 1..2229: note = Description of Artificial Sequence: Synthetic coding sequence
  source 1..2229: mol_type = other DNA
atgcgcaattatgactccggtccgcctccttctaccgtgatcaatcagaacgaaacattcgcgaatatcatcttcaagcctaccgtagtacagcaagccagaattgcacaaaacggaatactgggcgacttcatcatacggtacgacgtgaatcgtgagcaatcgattggagatatccaggtgttgaatggctacttcgtccactatttcgctcctaaggatttgccccctctgcctaagaacgtggtttttgtgcttgactcatcagcatccatggtgggaactaagttgcggcagacaaaagacgccctgttcaccattcttcacgaccttaggccacaggacagattctcaataattggattcagcaaccggataaaagtctggaaagatcatctcatctccgtgactcccgactccatccgcgacggcaaagtatacatacatcacatgtctcccacagggggaaccgacataaacggagcactccagcgggcaattaggctgttaaataagtacgttgcccactccggaatcggcgaccgctccgtttcgctaatcgtgttcctgactgacggcaaaccaacagtgggcgaaacgcacactctcaaaatactcaataataccagagaagcagcacggggacaggtatgtatttttaccattggcattggcaacgatgttgatttcaggctgctggaaaagctgtcattagagaactgcggcctgaccagaagggtgcatgaggaggaggatgctgggagccagctcatcggcttctatgatgagattcgcaccccactgctgtccgacatccgtatcgactatcctccgtcatctgttgttcaagccacaaagacgcttttcccaaattattttaacggatctgaaattatcatcgctggcaaactcgttgatcgaaagctggatcacctgcatgttgaagtaacagcctccaattcaaagaaattcattatactaaaaaccgatgtgcccgttcggcctcagaaagctggaaaagatgttacaggctcacccaggcctggaggtgacggagagggggacactaatcatatcgagagactgtggtcgtaccttactactaaagagttgctgagtagctggcttcagagcgacgatgaacccgaaaaggaacgcctgcgccagcgcgctcaggcactagctgtaagctaccggttcctgacccctttcacctcaatgaaactgagaggcccagtgccacgtatggacgggctcgaagaagcccatggcatgagtgccgctatggggccagaacctgtcgtccagtcagtccgtggggctggtacccaaccaggccctctcctgaaaaagccttaccagcctcgcataaagatttccaagactagcgtggacggggatcctcacttcgttgtggacttcccactctcacgcctgacggtctgctttaatatcgacggacagcctggagacatcctgagactggtgtctgaccatcgggactcaggggtgaccgtgaacggagagcttatcggcgcaccagcaccccctaacggacacaaaaagcaacgtacatacttgcgaacaataaccatcctgattaataagccagaaagatcttacctcgagattacaccaagcagggtcatactggatggcggtgaccggctcgtattaccctgcaaccagtctgtggtggtcggatcatggggcctggaggtttctgtttccgctaatgctaacgtgacagttacgattcaggggagcattgccttcgtcatcctgatccacttatacaaaaaacctgcaccattccagagacaccacctcgggttctatattgctaatagcgaaggcctgagcagtaattgccacggactccttggacaattcttaaaccaagatgcaagactcactgaggacccagctggcccaagccagaaccttacccatccactactactccaggtgggagaagggcctgaggccgtactgaccgtcaagggtcaccaggtgcccgttgtctggaaacagaggaagatctataacggggaggagcagattgattgctggttcgcaagaaacaacgcggcaaagctcatagacggggagtacaaggattacctggctttccatcctttcgatacgggaatggacacgtggcccggaaacgtgcaaggggcactgaagctagctgcgctcaagatgcaggtgcacgagggtcagtag

SEQ ID NO: 227007 - DNA, 2109 bp, synthetic construct
  misc_feature 1..2109: note = Description of Artificial Sequence: Synthetic coding sequence
  source 1..2109: mol_type = other DNA
atgcttcttctcctgggtctgtgcctaggactcagtttgtgcgtcgggtcccaagaagaagcccagtcttggggtcatagcagcgaacaggatggtctccgcgttccccgacaagttagactgctgcagcgcctcaaaacaaagcctctgatgacggaattcagcgtcaaatcaactatcattagccgatatgccttcaccaccgtaagttgccggatgcttaatcgtgcatccgaggaccaggatattgagtttcagatgcagattcctgcagcagccttcatcaccaactttacaatgttgataggcgacaaggtgtaccagggagagattaccgagagggaaaaaaagagtggggaccgggtgaaggagaagcgcaataaaaccacagaggagaatggtgagaaggggactgagatttttcgagctagcgctgttattccatctaaggacaaggccgcattttttcttagctacgaggagttactacagcggaggctgggaaaatacgagcacagcatctctgtccggccacagcagctctctggacgtttgtccgtggacgtgaacattctggaatctgctggtatagcctcattggaggtgctaccactgcataattcaagacaacggggatccggacgtggagaggacgattcgggacctccaccttctaccgtcatcaatcaaaacgagacatttgctaacattatctttaaacctacagtagttcagcaggctcggattgctcagaacgggatcctcggggacttcatcattaggtacgacgttaatcgcgagcagagcataggcgatatacaggtgctaaacgggtatttcgtccactactttgctcccaaggaccttcctccgttgcccaagaacgttgtcttcgtactggacagctccgcttctatggtcggcacgaagctgcggcaaaccaaggacgcactgtttaccattctgcatgacctgagaccccaggaccgatttagtattattggatttagtaatcggattaaggtgtggaaagatcacctgatctccgtgactcctgactccataagggacggaaaggtttacatccatcacatgtcacctactgggggaacagacatcaacggggctctgcagagggccatacgcctcctgaataaatatgtcgcacattccggcattggcgatcgttctgtgagcctcatagtgtttttaacagacggaaaacccaccgtgggcgaaacccacaccctgaaaattctgaacaacaccagggaggcggctcgtggacaggtctgcattttcactatcgggatcggcaacgatgtggattttcgacttttggaaaagctgagtttggaaaattgtgggctgactaggcgtgtgcacgaggaggaggacgcaggatcccaactgattgggttttatgacgagatccgcaccccgctgctcagcgacatccgaatcgattatcccccttcttcagttgtgcaggctactaagacactgtttcctaattattttaacggatccgaaattatcattgcaggcaagttggttgatcggaaactggatcacctccatgtggaagtcacagcttccaattcaaaaaaattcatcatcctgaagactgatgtccctgttcggcctcagaaagcagggaaggacgtcactgggtcacccaggcctggaggcgacggagaaggcgacaccaatcacatcgagcggctgtggtcctaccttacaaccaaagagttgctgagtagctggttacagagtgatgatgaaccggagaaggagcgcttaagacagcgcgctcaggcactcgccgtctcttataggttcctgacaccctttacctccatgaaactgaggggcccagtgcctaggatggacggactggaggaagctcacggcatgtcggctgctatggggccagaaccagtggttcaatctgtcaggggtgccggtactcagccaggacccttactcaaaaaaccttaccaacctcgaatcaagattagcaagacttcagtccgcggattccggagagaggagcagatattctctaatgtcatgaagttcccatttgcctctattctggagctgtag

SEQ ID NO: 227008 - DNA, 2088 bp, synthetic construct
  misc_feature 1..2088: note = Description of Artificial Sequence: Synthetic coding sequence
  source 1..2088: mol_type = other DNA
atgctgctcctgttggggctgtgtctcgggctgtccctatgcgttgggtcccaggaggaggcccaaagctggggtcactccagtgaacaggacggtctgagggtgccccgtcaggttagactgctccagcgactcaagacaaaaccactgatgaccgagttttccgtcaagtcaaccatcattagcaggtacgctttcactaccgtgtcttgtcgcatgttaaatcgagcatctgaggatcaggacatagagtttcagatgcagattccggcagctgcctttatcaccaactttacaatgctgatcggcgataaggtctaccagggcgaaattaccgaacgcgaaaagaagtcaggcgacagggtgaaggagaaacgcaacaaaactaccgaagagaatggcgagaaaggcactgaaatcttccgagcctccgctgtcataccctccaaggacaaagccgctttttttttatcctatgaggaacttctccagagaagattagggaaatacgaacatagcatctcagtcaggcctcagcagttatctgggaggctttcagttgatgtcaacatcttggagagcgccggaattgctagcttggaggtgttacctcttcataactcccgacagagggggtctgggaggggcgaagacgactcagggcctcctcccagcactgtcataaaccagaacgagacctttgcaaacatcatctttaagcctacggtcgtccaacaggctagaattgcgcaaaacggaatcctgggcgactttattatacggtacgatgtgaacagagagcagtctatcggcgatattcaggttctgaacggatacttcgtgcactacttcgccccaaaagacttacccccattgcccaaaaatgtcgtgttcgtcctggatagtagtgcctcgatggtgggcacaaagctgagacaaacaaaggacgccctctttacgattctgcacgacttgaggccacaggacagattttctatcattggcttcagcaaccgcatcaaagtgtggaaggaccatttgatctctgtcactcctgatagtatccgggatgggaaagtatacatccaccacatgtctccgacgggcggtaccgacattaatggagccctgcagcgcgcaataagattgcttaacaaatacgttgctcacagcggaataggagaccggagtgtatcgctgattgtgttccttaccgatggtaagccgactgtaggcgagactcacacgctgaagatcctgaacaacaccagggaagccgctcggggacaggtctgtatctttaccatcggcatcggaaatgacgtggactttaggctgctggaaaagctcagcctggaaaattgcggactgactcgccgagtacatgaggaagaagatgcgggttcgcagctgattggcttttatgatgagataagaactcccttgctgtccgatatccgcattgactaccccccaagcagtgtcgtccaggcgacgaagacgctcttccctaattactttaatgggagcgagattatcatcgccggaaagctagtcgatagaaaacttgaccatcttcatgtggaagtgaccgccagcaattccaagaagtttataatcttaaagaccgatgtgcctgttaggccccagaaggctggaaaagatgtgacaggaagcccgaggcccggaggcgatggcgaaggggatacaaaccacattgaaaggctgtggtcatacctgacgacaaaggaactgctgagcagttggctgcagtcagatgacgaaccggagaaagagaggcttcgacagcgggctcaggctctagccgtctcctatcgctttctgacgcccttcacttctatgaagctgcggggtcctgttccacggatggatggcctggaggaagcccatgggatgtcggcagcaatgggccctgagcctgtagttcagtcagtgcgcggagcaggaactcaaccaggacccctgctgaaaaagcctcccaattcggtgaagaagaaacagaataagacaaaaaagcgacacgggcgtgacggcgttttccctctgcaccacttggggatcaggtag

SEQ ID NO: 227009 - DNA, 2172 bp, synthetic construct
  misc_feature 1..2172: note = Description of Artificial Sequence: Synthetic coding sequence
  source 1..2172: mol_type = other DNA
gactctgggccaccccctagtacagtgatcaaccagaatgagacttttgcaaacataatcttcaagccaactgtggtgcagcaggcccgaatcgcccagaatggaatactgggggactttataattcggtacgatgtgaaccgtgaacagtcaattggggacatccaggtgttaaatgggtattttgttcattacttcgcaccaaaagatcttccacctctgccaaagaacgtggtgtttgtgttagacagcagtgcctccatggttggcacgaagctgcgtcagacaaaagatgcgctgttcaccatattgcacgatctgcggcctcaggacaggttctcaattattggtttttcaaatcgtattaaggtttggaaggatcatctgatttcggtgacacctgattctatccgcgatggaaaggtgtatattcaccatatgtcgcctacgggcggaaccgacattaatggtgccctccagagggccattagactgctcaacaagtacgtcgcccattctgggatcggagatcgctctgtgagtctgattgtctttctgactgatgggaagcccactgttggggaaacccatacacttaaaattctgaataacaccagagaggcggcacgcggacaggtctgcattttcactattggaataggaaatgacgtggattttcgccttcttgaaaaactgtctcttgagaactgcggcttaactaggcgcgtccacgaggaagaggatgctggctctcagttaatcggcttttacgacgagattcggacacccctcttaagtgacattcgtattgactacccaccttcaagtgttgtacaggcaactaagacccttttcccaaactacttcaatggatccgagatcattattgctggcaagcttgtggatcggaagctcgatcacctccacgtcgaggtcacggcttcgaattcgaaaaaatttatcatcttaaaaacagacgtgcccgtgagaccccagaaggctggtaaggacgtgacgggaagtcctagaccaggcggagacggagaaggggatacgaatcatattgagcggctatggtcctatttgacaaccaaagaactgctgtcatcttggctgcagagcgacgatgagcccgagaaggagcggctgcgacagagagcccaagccttagctgtatcctatcggttcctcacaccttttactagtatgaagttgaggggtccagttcccaggatggatggcttagaggaggctcacgggatgtccgctgccatgggcccagagcctgtcgtgcagtcggtaagaggcgctgggactcagcccggaccactgctgaaaaagccataccagcccagaatcaaaatatcgaagaccagcgtggatggtgacccccactttgtggtggatttcccactttcacgcctgaccgtctgttttaacattgacgggcagcccggagatatcttaaggctagtgagtgatcatcgtgactccggtgtcactgtcaacggggagctcattggcgcacccgcaccaccaaacggtcacaaaaagcagaggacatatctccgaaccataacaatacttataaataaacccgagcgttcatatctggagatcaccccctcccgggtaatcctggatggcggtgatagattagtcttaccttgcaaccaatcagtggttgtaggaagctggggtcttgaagtgagtgtgagcgctaacgccaacgtaaccgtgacgatccagggctcaattgccttcgttatactgatccatctgtataaaaagccagccccttttcagaggcatcaccttgggttctacatcgccaattctgaaggtctttccagcaactgtcatggactgttagggcaatttctgaatcaggacgcgcgtctgacggaagaccccgctggcccttcccagaatctgactcatcccctgttgctgcaagtaggcgaggggccagaagcagtgcttacagtgaaggggcaccaggtcccagtggtttggaaacaaaggaagatctacaacggagaagagcagatagattgttggttcgccaggaacaacgccgctaaattaattgatggggaatataaggattacctggcctttcaccccttcgatactggcatgttaggtcgagggatgagcagggagttatag

SEQ ID NO: 227010 - DNA, 1599 bp, synthetic construct
  misc_feature 1..1599: note = Description of Artificial Sequence: Synthetic coding sequence
  source 1..1599: mol_type = other DNA
atggccccaagcagcccaagaccggctcttcccgcactgctggtcctgttaggcgcactcttccccggacccggtaacgcacagacaagcgtaagcccaagcaaagtaatccttcccaggggagggagcgtcttggtgacgtgtagtacatcgtgtgaccagccaaagcttctcggtattgagacgccccttccaaaaaaagaactgctcttgccaggaaacaatagaaaagtttatgaactgtccaacgtgcaggaggattcccaacctatgtgttactcaaattgtcctgacggtcaatctacagcgaagacctttttgaccgtctactggaccccggagcgggtcgagttagccccactcccctcctggcagcccgtggggaaaaacctgactctgaggtgccaggtggagggaggcgctcctagagccaacttgacagttgtacttctgaggggggagaaagaattaaagagggaacctgctgtgggcgagccagcagaggtcaccactactgtgttggtccgacgcgatcatcatggggctaacttttcgtgtcgaacagaactggacctccgcccacagggactcgagctgttcgagaacacgtctgctccctatcagctgcaaaccttcgttttaccggctacgccaccccagctggtctcacctcgtgtcctggaggtggacacacagggaaccgtggtttgttccctcgacggtctgtttccggtgtcagaggctcaggtgcacctggcgctgggggatcagaggctgaatccaacagtgacctacggcaatgattcgtttagtgccaaagcttccgtgtctgtgaccgccgaggacgaggggactcagcgattgacttgtgctgttatactgggaaaccagagccaggagacattgcagaccgtcaccatatattcctttccagcccctaatgtcatcctgaccaagccagaagtatcggagggcacggaggtgacagttaagtgtgaagcccatcctcgagcgaaggtcacgctgaacggagtgccagctcaaccactgggcccacgtgcccagctgctgctcaaagccactcctgaagataacggccgaagcttttcctgcagcgctaccctcgaagtcgccggacagctaatacataagaaccagacccgcgaactgagagtcctgtatgggcctaggctggatgagagggactgcccaggcaactggacttggcctgagaattcacagcagactccaatgtgccaggcctggggtaatccactacccgagttaaaatgcctgaaagatggcacattccccctccctattggagagagtgtaaccgtaacgcgggacctggagggaacctacctatgtcgggctcgcagtacgcagggagaggtaactaggaaggtgaccgtcaacgtgctttctccgagatatgagatcgtcatcatcactgttgtcgccgctgctgtgattatgggaacagccggtctcagcacatatctctacaacagacaacgcaagataaagaagtatagactgcaacaggctcagaaaggcaccccgatgaaacccaacacccaggcaaccccaccctag

SEQ ID NO: 227011 - DNA, 933 bp, synthetic construct
  misc_feature 1..933: note = Description of Artificial Sequence: Synthetic coding sequence
  source 1..933: mol_type = other DNA
atggcaccttccagtccccgacccgcactccccgctctgctggttctactgggggcactcttccccgtctccgaagcccaggtccatctggcacttggtgaccaaagactgaatccaaccgtgacgtacgggaatgacagtttcagcgccaaagccagcgtgtccgtcactgctgaagatgagggtactcagcgcctgacttgcgcagtcattctgggcaaccaatcccaagagaccttacagaccgtgaccatttactcttttccggctccaaacgtgatcctgaccaaacctgaggtctcggaaggcacagaagtcacggtgaagtgtgaagcccacccgagggctaaagtgaccctgaatggcgtgccagctcagccacttggacccagggcgcagctcctgctcaaggccacacccgaagacaacggaagaagttttagctgctcggctaccctcgaagtagctggacagctgatacacaagaaccagacaagggagctgcgcgtgctctacgggccaagacttgacgagagggactgcccaggtaactggacatggccagaaaattcacaacagaccccaatgtgccaggcatggggcaaccctctacccgagctaaagtgcctcaaagatggtacattccctcttccaattggtgagagcgtgaccgtgacccgggacctggagggcacttatttgtgtcgggcacgaagtacacagggagaagtaacccggaaagtgactgtaaacgtgctatcaccccgttacgagatcgtgatcattacggtggtcgcagcagcagttattatgggcaccgccggactcagcacttacttatacaatagacagcggaagatcaagaaatacagacttcagcaggcccagaaaggcacgccgatgaaacccaatactcaggccacgcctccatag

SEQ ID NO: 227012 - DNA, 828 bp, synthetic construct
  misc_feature 1..828: note = Description of Artificial Sequence: Synthetic coding sequence
  source 1..828: mol_type = other DNA
atgtccagtttcggctatcggaccctgaccgtggctctcttcacccttatatgctgtcctggttcggatgagaaggtttttgaagtgcatgtgcggcctaagaagctggccgtggaacctaaagggtcactcgaggttaattgcagcaccacgtgtaaccaacccgaagtgggcggtttagaaactagcctggataagattcttctggacgagcaggctcagtggaagcactatctggtctccaacatttcccacgatacagtgcttcagtgccacttcacctgctccggcaagcaagaatccatgaacagcaatgtgtctgtttaccagccccctcgccaggtgatactcactctacagccgaccctggtcgccgtgggtaagtctttcacaatcgaatgtagagtccctactgtggagcccctggatagccttactcttttcctttttcgcggtaacgaaactctgcattacgaaacgttcgggaaagcagcgcctgcccctcaagaagccactgctacttttaactccacggcagatcgtgaggatggtcacagaaatttttcgtgtctggctgtgctggacttgatgtcgcgcggaggcaatatatttcataagcattcagcccctaagatgttagagatctacgaacccgtttctgactcccagatggtcattattgtcaccgtcgtatcggtgttgctttcactgttcgtgacatcagtgctgctgtgtttcattttcggccagcacctgaggcagcagcggatggggacttacggggtgcgtgccgcttggcggcgactgcctcaggcttttagaccatag

SEQ ID NO: 227013 - DNA, 828 bp, synthetic construct
  misc_feature 1..828: note = Description of Artificial Sequence: Synthetic coding sequence
  source 1..828: mol_type = other DNA
atgtcctcctttggctatagaacacttaccgtcgcactattcacactaatctgctgccccggttctgatgaaaaggtctttgaggtgcatgttcgccctaaaaaactggctgtggaaccaaaagggtcactcgaggtaaactgcagtacgacctgcaatcaacctgaggtaggcggactagaaacgtctctagataagattttactcgatgaacaggcacagtggaaacactacctggtctcgaatatttcgcatgacacagtgctacagtgtcactttacctgcagcggaaaacaggagtctatgaactctaacgtctctgtctaccaacctcccagacaggtgattttaaccctccaacctacgcttgtcgccgtgggcaagtcctttaccattgagtgccgcgtcccaacggtcgaaccactcgatagtcttacattgtttctgtttcggggaaatgaaacgcttcactatgaaacttttgggaaagccgctccagcaccccaggaggccactgctacctttaactccaccgcagatcgcgaggatggccatcggaattttagctgcctcgctgttctggacctcatgtccagaggcggtaacattttccataaacattcagcccctaagatgctggaaatttacgaaccagtttctgattcacaaatggtcattatagtgacggtggtgtccgtcctgttgtccctgtttgttaccagcgtgctgttgtgttttatttttggtcagcatctccgtcagcagcgcatgggcacttatggagttagggccgcatggcggcgtttgccacaggctttcaggccttag

SEQ ID NO: 227014 - DNA, 828 bp, synthetic construct
  misc_feature 1..828: note = Description of Artificial Sequence: Synthetic coding sequence
  source 1..828: mol_type = other DNA
atgtccagctttgggtaccggactctgacggtggctcttttcactctaatttgttgtccgggatcagatgaaaaagtattcgaggtccacgttagacccaaaaagctagccgtagagcctaaagggtctcttgaagttaattgttccacaacatgtaatcagccagaggtggggggtctggagacatctctggataagatcctcctggacgagcaggcgcaatggaaacattacctcgtgagtaatatctctcatgacactgtcctgcaatgccactttacctgttccggtaaacaggagagtatgaacagtaacgtctctgtgtaccagccaccacggcaggtaatcctgaccctgcagcccacgctcgtagccgtcggaaagtcattcactatagaatgcagggtgcctacagtggaacctctggattccctaaccctgttcctattcagggggaatgagactctccactacgaaactttcggaaaagctgcccctgccccacaggaagcaaccgctaccttcaattcaaccgccgatagagaggacggccatcggaactttagttgtcttgcagtgcttgatttgatgagtcgtgggggaaacatctttcataagcacagcgcgccaaaaatgctggagatctatgagcctgtttcggattcccaaatggtcataatagtcaccgtggtgtctgtgttgctgtccctctttgtgacgagtgtcctgttatgctttatcttcggacaacacttgcggcagcagagaatgggcacatacggtgtgcgagccgcatggagacgccttccgcaagcgtttcgcccttag

SEQ ID NO: 227015 - DNA, 828 bp, synthetic construct
  misc_feature 1..828: note = Description of Artificial Sequence: Synthetic coding sequence
  source 1..828: mol_type = other DNA
atgagctcattcgggtaccggactctcacggtggcgctctttaccctcatctgctgtccaggtagtgatgagaaggttttcgaagtacatgttagacccaaaaagttggctgtggagcctaaaggaagcttggaggttaattgcagtacaacttgcaatcagcccgaggtcggcggtctcgagacgtctctggataagatcctgttagatgagcaggctcaatggaagcattacttagtcagcaacatttctcacgatacggtgcttcagtgtcactttacatgcagtgggaagcaagagtcaatgaacagcaacgtgagcgtataccaaccacctcgccaggtgatactgactctccagccaactttagtggccgtgggcaagtcttttactatcgagtgtcgagttccgaccgtggaaccccttgactccctgactctcttcctattccgaggtaacgaaactctgcactatgagaccttcggcaaagctgcgcctgccccacaggaggccaccgcgacattcaactcaacagccgacagagaagacggacacagaaacttttcctgtctcgctgttctggacctcatgagtaggggcggtaacatctttcataagcactccgcccctaagatgttggaaatctatgagcccgtgagtgacagtcagatggtgattatcgttacggtcgttagcgtgctcctcagcctcttcgttacgagcgttttgctctgttttatatttgggcagcatttgagacaacagagaatgggcacctacggcgttcgcgcagcttggcgaaggctcccccaggctttccgtccatag

SEQ ID NO: 227016 - DNA, 828 bp, synthetic construct
  misc_feature 1..828: note = Description of Artificial Sequence: Synthetic coding sequence
  source 1..828: mol_type = other DNA
atgtcttccttcggatacaggacactgactgttgctctgttcaccctaatctgctgcccaggtagcgacgagaaggtcttcgaggtgcacgtacggcctaagaaacttgctgttgagccaaagggatcactggaagtgaattgcagtacaacatgtaaccagccggaagtcggaggactggaaacatctctcgacaagatcctcctggacgaacaggcccagtggaagcactatctggtctcaaatatatctcatgacactgtgctgcagtgtcattttacctgctcaggaaagcaggagtcaatgaacagcaacgtatctgtgtaccaacctcctaggcaggtgattcttacgcttcagccaacacttgttgccgtgggtaagtccttcaccatcgagtgcagagtccccaccgtggagcctttagactccctgaccttgttcctgttcagaggaaatgagactttgcactatgaaacatttggcaaagctgcacccgctccccaagaagcaactgccacgtttaatagcactgcagatagggaagatggacacaggaatttttcatgcctggccgtccttgacttgatgtctcgagggggaaatattttccacaagcacagcgctccaaaaatgttggagatctacgaacctgtttccgattcacagatggtcattatagttaccgtcgttagcgttcttctaagcctgttcgtgacgtctgtgctcctctgtttcatctttggtcaacacctgcggcagcagcgtatgggtacttacggagtcagggccgcttggcgcagactcccccaggcttttagaccgtag

SEQ ID NO: 227017 - DNA, 1644 bp, synthetic construct
  misc_feature 1..1644: note = Description of Artificial Sequence: Synthetic coding sequence
  source 1..1644: mol_type = other DNA
atggcgaccatggtaccatccgtactatggccacgggcatgctggacacttttagtatgctgtctccttacgcccggtgtccaagggcaggaattcctgcttcgagtggagccacagaatcccgtgctgtctgctggcggatccctgttcgtcaattgctcaactgactgtccctcctccgagaagatcgcactagagacaagtctgtcaaaagagctagtagcgtcaggtatgggctgggccgcattcaacctgtccaatgtgaccggaaacagtcggattctatgttctgtgtattgcaacgggagccagataaccgggtccagcaacataactgtttatcgtctgcctgaacgggtggagctggcgcctttgccgccttggcaaccggtagggcaaaattttaccctgaggtgccaggttgaggacggaagtccgcgtacttcccttacagtggtgcttctacgatgggaagaagaactcagtcggcaacccgctgtggaagaaccagctgaggtcacggcaactgttctggccagccgcgatgatcatggcgctccatttagttgtcggaccgagctggacatgcagccccaggggttaggcctttttgtcaacacatctgctccccgtcagctgcgaacatttgtcctcccggtgacccccccacgattggtggcaccccgattccttgaagtcgaaacatcatggccagtggactgtacactagacggccttttcccagcatccgaggcacaggtgtaccttgccctaggagaccagatgctaaatgctaccgtcatgaatcacggggacactctcaccgctacagctacagccactgcaagggccgaccaggagggtgctcgtgaaatcgtgtgtaacgtaacactcggaggggaaagacgcgaagcgagagagaacctgaccgttttttcttttctgggtcctattgtgaacttaagtgaacctaccgcacacgagggatctaccgtcaccgtgagctgcatggccggagccagagttcaggtgactttagacggggtccctgcagcagcccctgggcagcccgcacagcttcaactcaacgccaccgaatccgacgatggcaggtcatttttctgtagcgcaactttggaggtggatggcgagttcctccacaggaacagtagtgtgcagctgcgcgttctgtacgggcctaagattgaccgtgcaacctgcccacaacacttgaagtggaaggacaaaacaagacacgttctgcagtgccaggccagaggcaacccttacccagaactgcgctgcctgaaggagggttcctccagagaagttcctgtggggatccctttcttcgttaacgtgacacataacggcacctatcagtgccaggccagctcaagcagaggcaagtatactttagtcgtcgtgatggacatagaggcaggctctagtcacttcgtgcctgtgtttgtggccgttctcttgaccctgggtgtagtgacaatcgtactcgccctcatgtacgtgttcagagagcatcaaaggagcgggagctaccacgtgagggaggaatctacttatctccctctcacatccatgcaacccaccgaagctatgggggaggagccctcccgcgcagaatag

SEQ ID NO: 227018 - DNA, 819 bp, synthetic construct
  misc_feature 1..819: note = Description of Artificial Sequence: Synthetic coding sequence
  source 1..819: mol_type = other DNA
atgggatctctctttcccctcagtctgctgttctttctggctgcagcttatccgggtgtggggtctgcactgggcaggcgaacaaagagggcacagagcccaaaagggagccctttggctccctcgggcactagcgttccgttttgggtccggatgtctccagaattcgttgctgtccagccaggcaaaagcgtgcaattgaattgcagtaactcttgcccccagccgcaaaactctagcctgagaactcccctgaggcagggcaagacactaagagggcctggttgggtgtcctatcagttactggacgtgagagcgtggagctcacttgcgcattgtctcgttacctgtgctggaaaaacacgttgggcgacctcacgcattacagcctactcagttccagggggactgctcggcggagaccctgaggcgtggaagcctggccacctgttccggaagcccggtgcgctacacagaccaggatcgggtcagagggatcttgatctccgcgtttgttgctggacaccgaggttactggcagctagagatctgcctcgggctcctcagtcccgccgacctgggggaccacaacagctgggaactcattacacggatgcgaggttagagcccagggcacattctttcgggctgcggttccacaggtgtccttgtcgtgatccacctcactgcggacgctgcgtgcctatgcaggttcctagctacgaagttcctggagtcaagggggacgttctgtgccgactttcggaaaagaagaggaatatgaagcagtcaggcgagatggcgatccatggcggttag

SEQ ID NO: 227019 - DNA, 816 bp, synthetic construct
  misc_feature 1..816: note = Description of Artificial Sequence: Synthetic coding sequence
  source 1..816: mol_type = other DNA
atggggtcccttttccctctcagcctgctattttttttagcagcagcgtacccaggggttgggagtgcactgggtaggcggaccaagcgggcacagtcgcctaaggggtctccattggccccttcaggtaccagtgtgccattctgggtcagaatgtcgccggaatttgtagccgtgcaacccggtaagtccgtgcagctgaattgtagtaatagctgtccccagccccaaaactcgtctcttcggactccactcaggcaaggcaaaacgttgaggggtccgggatgggttagttatcagctgctagacgtcagggcctggagcagcttggcacattgtcttgtgacgtgtgctgggaagacacgatgggctaccagtaggattaccgcctacaagccaccccacagcgtgatccttgagccccctgtcctgaagggacggaagtatacgcttagatgtcacgttacccaggtctttcctgtgggttacctcgtggtaaccctgcgccacgggtcccgcgttatctacagcgagagcctcgagaggtttaccggtttggatctggccaatgtgacgctgacttatgagttcgctgcaggccctcgcgacttttggcagccggtcatctgccatgccaggctgaacctggacggcctggtcgtgaggaattctagcgcgcctattaccttaatgctggcctggtccccagccccaacggcactggcgagcgggtccatcgcagccctggttggcatcctcctcacagtgggagctgcgtacctgtgtaagtgtttggctatgaagtcccaggcttag

SEQ ID NO: 227020 - DNA, 714 bp, synthetic construct
  misc_feature 1..714: note = Description of Artificial Sequence: Synthetic coding sequence
  source 1..714: mol_type = other DNA
atggggtcactcttccctttaagcctgctgttttttctggctgccgcatatcccggagtgggaagtgctttaggcaggcggacaaagcgagcccagtcacccaagggttcaccgttggctccgtcaggtacaagtgtcccattctgggttagaatgtcgcctgagttcgttgctgtgcagccaggcaaaagcgtccagctgaactgttcgaattcttgccctcagccacagaatagctctttgcgaaccccccttagacaagggaagacgctaagaggccctgggtgggtatcctatcagctgttggacgtgagagcctggagtagcctcgctcactgtctcgtgacatgtgcgggtaaaacccgatgggcgaccagcagaatcacggcctacaagccccctcacagcgtgatcttggaaccccctgttcttaagggacgcaagtataccctgaggtgccacgtgacccaagtgttccccgtcggatatctcgtggtgaccttgcgacatggatctagagtcatttactctgaaagcctggaaagattcaccgggctggatctggcaaatgtgacacttacgtatgaatttgcggcagggccacgggacttctggcagcccgttatttgtcacgccagactgaatcttgatgggctggtcgtaagaaatagctccgcccctattactctcatgctcggagaggcccctctctag

SEQ ID NO: 227021 - DNA, 498 bp, synthetic construct
  misc_feature 1..498: note = Description of Artificial Sequence: Synthetic coding sequence
  source 1..498: mol_type = other DNA
atggaactatgcaggagtttggcgctgctgggaggtagtttgggcctgatgttctgcctcatcgctctgagtaccgatttctggttcgaggcagtgggacccacccactcagcccacagcgggctctggccaaccggccatggcgacattatttcagggtatatccatgttacacaaaccttttccatcatggccgtgctttgggctctagtttccgtatcttttttggtgctgagctgcttcccctccctgtttcctcctggccatgggccactggtgtcaactaccgcagctttcgcagccgctatctccatggtcgttgcaatggccgtgtatacctccgaacgctgggatcagccaccgcatcctcagatccagactttcttctcttggagcttctatctgggctgggtatcggccattcttctgctatgtaccggcgcactctcccttggggcacattgtggcggacctagacctggatatgagactctgtag

SEQ ID NO: 227022 - DNA, 1674 bp, synthetic construct
  misc_feature 1..1674: note = Description of Artificial Sequence: Synthetic coding sequence
  source 1..1674: mol_type = other DNA
atgatggtcgtactcttgggtgccacaaccttggtgctggtggctgtcgccccttgggtgctctcagctgctgctggcggaaagaacttgaagtctcctcagaaggtggaggtggatatcatcgatgacaattttatcctgcgctggaatagaagcgacgagtcagtgggaaatgtgacattcagctttgactatcagaagacaggcatggacaactggatcaagttgtctggatgtcaaaatattacctcaacaaagtgcaattttagctcccttaagctgaacgtgtacgaggagattaagctccggatccgcgcagaaaaggagaatacctcttcctggtatgaggtggattcctttacgccatttcggaaggctcagatcggacctcctgaggtgcatcttgaagctgaggataaagcaatcgttatccatatatcgcctggaacgaaagactctgttatgtgggctctcgacggactgtcatttacatactctctcgtcatctggaaaaacagctccggtgtcgaggagagaatcgagaatatttattccaggcacaaaatctataagctgagtcctgaaaccacttattgtctaaaagtgaaggccgcactactgacatcatggaagattggagtctacagtccggttcattgtattaaaacaaccgttgaaaatgagttaccccctccagagaatatagaggtgtctgttcagaatcagaactatgtgttgaagtgggattacacgtacgccaatatgaccttccaggtacaatggctgcacgcatttttaaaacggaatcccggaaaccatttgtataagtggaaacagatccccgactgtgaaaacgttaaaacaactcagtgcgtgtttccacagaatgtcttccagaagggcatctacttgttaagagtccaggctagcgatggcaacaatacttcattctggagtgaggagataaaattcgataccgaaattcaggcattcctgctgcccccagtattcaatatcagatctctgagtgattccttccacatctacatcggagctcctaaacagtctgggaatacccctgtaatccaggactatcccctcatatatgagatcattttttgggagaatactagcaatgcagagagaaagataatcgagaaaaagaccgacgtaaccgtcccaaatctaaagcctctgaccgtgtactgtgtcaaagcccgtgcccacactatggatgagaagcttaacaagtcctccgtcttctcagatgccgtgtgtgagaagaccaagcctggcaacacttcaaagatctggctgattgtgggcatatgcatagcactgtttgcactgccattcgtgatctatgcggctaaagttttccttcggtgcattaactatgttttctttccttctctaaagccgagttcttctattgatgaatacttcagcgagcagcctctgaaaaatctgctgctgtccacttctgaggagcagattgagaaatgcttcatcatcgagaatatctccaccatagctaccgtggaagagacgaaccagacagacgaggaccataagaaatacagcagccaaactagtcaggattccggcaactactcaaacgaagacgagagtgagtccaagaccagcgaagagttgcagcaggatttcgtgtag

SEQ ID NO: 227023 - DNA, 1467 bp, synthetic construct
  misc_feature 1..1467: note = Description of Artificial Sequence: Synthetic coding sequence
  source 1..1467: mol_type = other DNA
atggataattggattaaattaagcggatgccagaatatcacttcaactaagtgcaatttctccagtctaaagctgaatgtgtacgaagagattaaacttcggataagagctgaaaaagagaacacttcttcatggtacgaagttgattcattcacacccttccggaaagcccaaatcgggccacccgaggtgcacctagaagccgaggacaaagcaatcgtgattcatattagtcccggaacaaaggattcggtcatgtgggcactggacgggctcagtttcacatactcactggtcatatggaagaactccagtggagtcgaggaaagaattgagaacatatatagtcgtcacaaaatatacaagctctccccggagaccacctattgccttaaggtgaaagccgcactattgaccagttggaagatcggagtctactctcccgttcattgcattaaaaccactgtggagaacgaactgccgccacctgaaaatattgaagttagcgtacaaaatcagaattacgtcctgaaatgggattacacatacgccaacatgacttttcaggtgcagtggttgcacgccttcttaaaaaggaatcccggtaatcacctctacaagtggaagcagattcctgactgcgaaaacgtgaaaaccacgcagtgtgtgtttccccagaatgtattccagaagggcatatatctgctgagagtgcaggcaagcgatggcaataacacatctttttggtcagaggaaatcaagtttgacaccgaaattcaagctttcttattgcccccagtatttaatatcagaagcctgagcgacagttttcacatatacatcggggctcctaagcagtctggtaacacgcccgtgatccaggactaccccctgatatacgagatcattttctgggaaaacaccagcaatgccgagagaaaaataatcgagaaaaaaacggatgtcacagttcctaacctcaaaccgttaactgtttattgtgtaaaagccagagcgcataccatggacgagaagttaaataagtcgtcagtttttagcgacgcagtttgcgaaaagaccaaaccaggaaataccagcaagatttggctgatcgttggaatctgcatagcactgttcgcacttccttttgtgatttatgctgctaaggtttttctgcgatgtatcaattatgtattcttcccaagtctgaagccctcgtccagcattgacgagtatttcagcgagcagcccctcaaaaacttgctgttatccacgtcggaagaacagatcgagaagtgtttcataattgagaatattagcactatagccacggtcgaagagactaatcaaacagacgaagatcataaaaagtattctagtcagacttcccaggatagcggcaattactcgaacgaagatgaatcagaaagcaaaacaagcgaggagttgcaacaggactttgtttag

SEQ ID NO: 227024 - DNA, 1491 bp, synthetic construct
  misc_feature 1..1491: note = Description of Artificial Sequence: Synthetic coding sequence
  source 1..1491: mol_type = other DNA
atgatggtcgtgctacttggagctactaccctagtgcttgtggcggtggccccttgggtcttgtcggcagctgccggaggcaagaacctgaagtctccccaaaaagtggaagtggacatcatagatgacaatttcatcttgcggtggaatcggtccgatgaaagtgtcgggaacgtgacctttagctttgactatcaaaagacgggcatggacaattggataaagctgtcaggttgccagaatattacttctacaaaatgtaactttagctccctaaaactcaatgtgtacgaggagataaagctccgaatacgggcagaaaaggagaacactagttcctggtatgaggtggacagtttcacgccctttagaaaagcccagattggcccacctgaagtgcacctggaggcagaggataaggccattgttatccatatttctcctggaacaaaagattccgtgatgtgggccctagacggactgtcctttacttatagcctggtgatttggaagaactcaagcggggtggaggagaggatagagaatatttatagccgccacaagatctataaactgagtccagaaactacatattgcttaaaggtaaaggccgcactgcttaccagttggaagattggcgtttactcacccgtgcactgtattaaaactactgtggagaatgaactgccccctccggaaaacatcgaagtgagtgtacagaaccagaactatgttcttaagtgggattacacatacgccaatatgactttccaggtccagtggctccatgccttcttaaaacgtaacccgggtaaccacctgtacaagtggaaacagattcctgactgcgagaacgtgaagacaactcaatgtgttttcccacaaaatgtctttcagaagggcatttacctactgagagtgcaggcctcggatgggaacaacacctccttctggtctgaagagattaaattcgacaccgaaattcaagcctttttgcttcccccagtctttaacatcaggtccctgagtgactcatttcacatttacattggcgcacccaaacagtccggaaatacacctgtgatccaggactatcctctaatttacgagatcattttttgggaaaatacctccaacgccgaacgcaaaataattgagaaaaagaccgatgtaaccgtgccgaatttgaagccactaaccgtttactgcgtcaaagctagggctcataccatggacgagaacgacgccgtgtgtgagtacttcagcgaacagccactaaaaaatctgctgctttctacatctgaagagcagattgagaagtgtttcataattgaaaacatatctactatagcgacagtcgaagagaccaaccagaccgacgaagatcataagaagtactcttcccagacaagccaggattccgggaactatagcaatgaagatgaatcagagagcaaaacaagcgaggagttacaacaagattttgtgtag

SEQ ID NO: 227025 - DNA, 1548 bp, synthetic construct
  misc_feature 1..1548: note = Description of Artificial Sequence: Synthetic coding sequence
  source 1..1548: mol_type = other DNA
atgctgctttcacagaatgctttcatttttaggtcgctaaatctagtgttgatggtgtatatttcattggtgttcggcatctcttacgattcaccagactacacagacgagtcttgcacctttaagatctcactcagaaatttcaggtctattttatcctgggagctaaagaatcactccattgtgcccacccactataccttgctctataccataatgtctaagccagaagatctaaaggtcgttaagaactgcgctaacacaaccaggagcttctgcgaccttacagacgaatggagatccacacatgaggcctacgtgaccgtacttgaggggttttcagggaataccaccctattttcctgtagccacaacttttggctggcgattgatatgagtttcgagcctcccgagttcgagatcgtgggcttcactaatcacatcaacgtgatggtcaagtttcctagcattgtcgaagaagaactacagtttgacttaagccttgtaattgaggagcagtcagaagggattgtgaagaagcacaaacctgagatcaagggcaatatgagcggcaactttacgtacattattgataagctgattcctaatactaattattgtgtgtctgtctacttggaacattccgacgagcaggccgtaataaaaagtccactcaagtgtacattattaccccctggtcaagaaagcgagtcagccgaatccgccaagattggcggtatcattacagtgtttctgattgctctggtcctgacgtctaccattgtcacccttaaatggataggatacatatgtctccgcaatagcttgcccaaagtgttaaacttccacaatttcctggcttggccctttccaaacttgccacctttagaagctatggacatggttgaagtgatttatattaaccgtaagaaaaaggtatgggattataactatgatgatgaatcagacagtgacacggaagctgctcccagaacttccggcggaggctataccatgcatggactcaccgtcaggcccctaggccaggcctccgctacttccaccgaatcgcagctgattgacccagagtcagaagaagagccagatctgccggaggtcgacgtggagttgcctacaatgcccaaagacagtccccagcaactggagctgctgagtggcccttgcgagcgcaggaaaagtcccttgcaggaccctttcccagaggaggattatagctctactgaaggctcagggggtaggattacatttaacgtcgatttgaacagtgtgtttctgcgagtcttagatgatgaggattccgacgacctggaagcacccctgatgctgagctcccacctggaggaaatggtggacccggaggatcccgacaatgttcagtccaaccatcttttggccagcggggaaggcacacaacctactttcccgagtccgtcttctgaagggctgtggagcgaagatgctccaagtgatcagagtgacacgtcagagagcgacgtggaccttggtgacggatatattatgcgttag

SEQ ID NO: 227026 - DNA, 1548 bp, synthetic construct
  misc_feature 1..1548: note = Description of Artificial Sequence: Synthetic coding sequence
  source 1..1548: mol_type = other DNA
atgttgctttctcaaaacgcctttatttttcgcagtctaaaccttgtcctcatggtctacatatccctggtatttgggatatcctatgattcccctgactacaccgatgagagttgtacgttcaagattagtcttcgcaacttcagatctatcctgtcatgggagttgaagaatcattccatcgtccccactcattacacactgctgtacacgatcatgtccaaacccgaagacctcaaggtagtcaagaattgtgctaatacaacgagatccttctgtgatctgacagatgagtggagatcgacccatgaggcttacgtgaccgtgctggaaggattctctggcaatactacgctcttttcttgttctcacaatttctggctggctatcgacatgagttttgagcccccagaatttgagatcgttgggttcaccaaccatataaacgtgatggtgaagttccccagtatagtagaagaggaacttcagttcgatctttccctggttatcgaagaacaatccgaggggatcgtgaagaaacataagccagagatcaagggcaacatgtcggggaattttacctacataatcgacaagttgatccccaacacgaactactgcgtctcggtgtatctcgagcattcggacgaacaggccgtgataaagagcccccttaaatgcacccttctcccccctggtcaggagtctgagagtgctgagagcgcaaaaattggcggaattatcacagtgttcctgatcgctctggtcctgacgagtacgatcgttaccttgaaatggattggctacatctgcctgcggaacagtcttccaaaggtactgaattttcataatttcttggcttggccttttcccaacctgccccctctcgaagctatggacatggtggaggtgatttacattaaccggaaaaagaaagtctgggactacaactacgatgacgaatcagactctgacacggaagcggctcctaggactagcgggggaggatataccatgcatggcttgacagttcggccactggggcaggcctcggccacatccaccgaaagccagctgattgatcccgagtccgaagaggaacccgacctgccggaggttgatgtcgaactgccaaccatgcctaaagattcacctcagcaactggaactgttgtctggcccatgtgaacgacggaaaagtccacttcaggacccatttccagaggaagattactcttcaacagaaggcagcgggggaagaatcacatttaatgtggatctgaacagcgtatttctcagggtgctcgatgatgaggacagtgacgatttggaagcacctttgatgctgtcgagtcatctcgaggagatggtcgatcccgaggaccccgacaacgtgcagtcgaatcacctcctggcaagcggagaagggacccagcctacctttccgtcaccatcatccgaggggctgtggtccgaagacgctcccagcgaccagtctgacacatccgagagcgatgtcgacctgggcgacggatatattatgcggtag

SEQ ID NO: 227027 - DNA, 996 bp, synthetic construct
  misc_feature 1..996: note = Description of Artificial Sequence: Synthetic coding sequence
  source 1..996: mol_type = other DNA
atgctcctgtcccaaaatgctttcattttccgatctctcaacctggtcctcatggtgtatatcagtctcgtcttcggaatctcctacgatagccccgattatacagacgagtcatgtactttcaagattagcctccggaacttcaggagcatcctgagctgggaactcaagaaccattctattgtgccaacccactatacactgttgtatacaataatgtccaagccggaggacctgaaggtggtcaaaaattgcgccaacaccactcgctcattctgcgacctcacagacgagtggagatcgacacatgaggcttacgttaccgtcctcgagggttttagcggcaacactactctgttctcgtgttctcacaacttctggctggccattgacatgtcctttgagcctccagagttcgaaattgtcggtttcaccaatcatatcaacgtcatggtgaagtttccaagtatagttgaggaagaattgcaatttgacctcagtcttgtgatagaggagcagagcgaaggcatcgtgaaaaaacacaagccagagattaagggcaatatgagtgggaactttacttacattattgacaaactaatccctaacaccaactactgcgtgagcgtgtaccttgaacactctgatgaacaggccgtgatcaaatctcccctgaagtgcaccctactgccacccggtcaggaatctgagagtgctgaaagtgccaaaatcgggggaattataaccgtgtttctgatcgcactagtactcaccagcacaatcgtgactttaaagtggattgggtatatctgtcttcgaaactcactgccgaaagttttgcgccaagggttagccaagggatggaatgccgtcgccatccataggtgcagtcacaatgcactgcagagcgaaaccccagagcttaagcagtcctcttgtctgtcattcccttcatcctgggactacaaaagggccagcctatgcccatcagattag

SEQ ID NO: 227028 - DNA, 996 bp, synthetic construct
  misc_feature 1..996: note = Description of Artificial Sequence: Synthetic coding sequence
  source 1..996: mol_type = other DNA
atgctgctctctcagaacgctttcatttttaggtccctcaacctggtgcttatggtgtacatcagtctggtgtttggcatttcatacgactccccggattacacggacgaatcatgcaccttcaaaatcagcttacggaatttccgctctatcctcagctgggagctgaagaaccacagcatcgtgccaacacactatactcttctttataccattatgagcaagccggaggatcttaaagtggttaagaactgtgccaacactactcgctcattttgtgacctgactgacgaatggcgcagcacccatgaggcttatgtcacagttctagaggggttctccggcaatactacactattctcatgttctcataacttctggctggccatcgacatgtcattcgaaccaccggagttcgagatagtcggctttaccaaccatattaatgtcatggtcaaattcccttctatagtcgaggaagagttgcagttcgatctgtccctcgttatcgaggagcagagtgagggcattgtcaaaaagcataagccggagattaagggcaacatgagtggaaactttacctacataatagataaattgattcccaatacgaattactgtgtttctgtctatctggaacatagcgatgaacaggctgtgatcaagagccctcttaaatgcaccctgctcccccctggtcaagaatcggaatccgccgaaagcgctaaaatcggcggtatcatcacagtttttctgatcgcgctggtcctgacctcaaccattgtgactctgaagtggattggctacatatgtctcagaaactcactaccgaaggtgttgagacaggggctggcaaaaggatggaatgctgtggccatccataggtgctcccacaacgctcttcagtcagaaacaccagagctgaaacagtcgtcatgtctaagttttcccagctcttgggactataaacgagcatccctatgtcccagtgactag

SEQ ID NO: 227029 - DNA, 561 bp, synthetic construct
  misc_feature 1..561: note = Description of Artificial Sequence: Synthetic coding sequence
  source 1..561: mol_type = other DNA
atgttactgaaatcaccggagaattctctgctgcagttccaattcaagtacggtgtgccgacccccactaatgtaactatcgaaagttacaacatgaacccaatcgtctattgggaatatcagattatgccccaagttcccgtgttcacagttgaggtcaaaaactatggtgtgaaaaactccgagtggatagatgcttgtattaatatctcacatcactattgcaacatcagtgaccacgttggcgacccgtccaatagtctgtgggtacgcgtcaaagcccgtgtgggccagaaggagagcgcgtacgcaaagtctgaggagtttgcggtttgccgagatgggaagattggaccacctaagctagacataagaaaagaagagaaacagatcatgattgacatcttccatccctcagtctttgtgaatggagatgaacaagaggttgactatgatcctgaaacaacatgttatattcgcgtgtataatgtgtatgtgagaatgaatggctcagaaatcaaacgcagttgcgcattttctctgtttagcttttttatctag

SEQ ID NO: 227030 - DNA, 1470 bp, synthetic construct
  misc_feature 1..1470: note = Description of Artificial Sequence: Synthetic coding sequence
  source 1..1470: mol_type = other DNA
atggccttgctgtttttattacctttagtgatgcaaggcgtctccagggcagagatgggcacagccgacctgggaccatctagcgtcccaaccccaacaaatgtgacgattgagtcttacaacatgaacccaatcgtctattgggagtaccagataatgcctcaagtacctgtgttcactgtggaggtcaaaaactatggtgtgaaaaatagtgaatggatagatgcctgcataaatatctctcaccactattgtaacattagtgaccacgtaggggatcctagcaactcattgtgggtcagagtcaaagcacgagtaggacagaaagaatccgcttacgctaaatcagaggagttcgccgtctgcagggacggcaagatcggccctccgaaactggacatccgaaaggaggagaagcagataatgattgatatttttcacccgagtgtattcgtgaacggagatgaacaggaagtggactacgacccggaaacaacctgttatataagagtttacaacgtctatgtgaggatgaatggaagcgagatccagtacaagatattgacacagaaggaggacgattgcgacgagatccaatgccagctggccatccccgtgtcatcgctaaattcgcagtattgtgtatctgccgaaggcgtgcttcacgtttggggagtgaccactgagaagagcaaagaggtctgtatcactattttcaatagttcaatcaaaggctctttgtggattccggtggtggcagctcttttgctctttctggtgttatcccttgtattcatttgcttctacatcaaaaagataaatccgttgaaggagaagagcataatcctgccgaagtccctcatttctgtcgttcggagcgctactctggaaaccaagcctgagtcaaagtacgtttccttgataacaagctatcagcccttctcgctggaaaaagaagtggtatgtgaagagcccctctctcccgcaaccgtgcccggtatgcacaccgaagacaaccctggaaaggtcgagcataccgaggaactttcctctatcacagaagtggtgaccacagaggagaatatccccgatgtagtgcctgggagtcacctcaccccaatcgagcgggagagctcgtcaccccttagctctaatcagtcagagccagggtcaatcgcattgaattcatatcattcacgcaactgctccgagtccgatcatagcagaaatggcttcgataccgactctagttgcctggaaagccacagttcactgtccgactccgaattcccaccaaacaataagggggaaattaaaacagagggccaggagttgataaccgtgatcaaggcccctacctcgtttggatatgacaaaccccatgtgctcgtagatttgttagtagacgattctggcaaagagtctttgatcggatatagacccacagaggattcaaaggagttttcatag

SEQ ID NO: 227031 - DNA, 486 bp, synthetic construct
  misc_feature 1..486: note = Description of Artificial Sequence: Synthetic coding sequence
  source 1..486: mol_type = other DNA
atgttgctgaagtcaccagagaattcactcctgcagtttcagtttaagtatggtgtgcctacccctaccaatgtgaccattgaatcgtataacatgaacccaatagtttactgggagtatcaaattatgccccaggtgccagtcttcacggttgaagttaaaaactatggggtgaaaaatagcgagtggatcgatgcctgcatcaacatttcacatcactattgcaacatttctgaccatgtcggagatccatccaacagcctgtgggtccgtgtgaaggccagagtcggtcaaaaggaatcggcatatgctaagagtgaggagtttgcggtatgtagggacgggaaaatcgggcctcctaagttggacatacgtaaggaggagaagcaaataatgatagacatcttccacccaagcgtgtttgtgaatggggacgagcaggaggttgattatgaccctgagaccacatgttatattcgagtatag

SEQ ID NO: 227032 - DNA, 825 bp, synthetic construct
  misc_feature 1..825: note = Description of Artificial Sequence: Synthetic coding sequence
  source 1..825: mol_type = other DNA
atggctcttctgtttcttctgcccttggttatgcaaggcgtctctagagcggagatgggcacggccgacctcggtccttccagcgtgccgaccccaacaaacgtgactatcgagtcttataatatgaaccctatagtgtactgggaataccaaattatgccacaggtccctgtattcactgtggaggtgaaaaactatggcgtaaaaaactccgagtggatagatgcttgcataaacataagtcatcattactgtaacattagcgatcatgttggcgacccgtctaatagtctctgggtgcgagtcaaagccagggtaggacagaaagagagtgcctacgccaagtcggaggagttcgcagtctgtcgtgacggaaaaatcggccctccaaaattagatatccgcaaagaggaaaagcagatcatgatagacatttttcacccctcggtgtttgtgaacggagacgagcaggaggtggactatgatcccgagactacctgctacattcgggtctacaacgtctacgtacgaatgaacggatccgaaatccaatacaagatcttgacccagaaggaggatgactgcgacgagatccagtgccaactggccattcccgtctcaagcctgaacagccagtattgcgtctcagccgagggggtcctacatgtatggggggtgactacggagaagagtaaggaagtttgcatcacgatctttaatagtagcatcaaaggaagcctgtggataccagtggtggccgctctgcttctcttctgtcttgcctggtattcctctgtctttatcctgcgcaagttgattcactag

SEQ ID NO: 227033 - DNA, 633 bp, synthetic construct
  misc_feature 1..633: note = Description of Artificial Sequence: Synthetic coding sequence
  source 1..633: mol_type = other DNA
atggcactccttttcctactgcccttagtgatgcaaggcgtttcccgcgctgagatgggcaccgccgatctggggccttcttctgtacccacaccaacaaatgtgacaatagagtcttacaacatgaaccctatagtttactgggagtaccagataatgccccaggtgcccgtctttaccgttgaggtaaaaaattatggagtgaaggcacgtgtcgggcaaaaggagtctgcctacgctaagtctgaggagtttgccgtgtgtcgcgatgggaagatcggcccaccaaagctcgatatccgtaaggaggaaaagcagattatgatcgatatctttcacccctcagtgttcgtgaacggagacgaacaggaggtagattatgaccccgagaccacctgttatattagagtttataacgtatatgtccgaatgaatgggagtgaaatccagtacaagatactcactcagaaagaagatgactgcgacgaaatccagtgccagctcgcgattcccgtgagcagccttaactcccaatactgcgtgagcgcagaaggcgtgctgcatgtttggggggttaccaccgagaaatcgaaggaagtatgtattacgatcttcaactccagtattaagtag

SEQ ID NO: 227034 - DNA, 1386 bp, synthetic construct
  misc_feature 1..1386: note = Description of Artificial Sequence: Synthetic coding sequence
  source 1..1386: mol_type = other DNA
atgccgacccctacaaatgtaaccattgaaagctataatatgaatccaatcgtgtactgggaatatcagatcatgccacaggtgcccgtgttcactgttgaagtcaagaactatggggtgaaaaactctgagtggattgacgcttgtataaatattagccaccactactgcaacatatccgaccacgtcggcgacccttctaactctctgtgggtgcgtgtaaaagctcgggtggggcagaaagagtctgcctacgcaaagtcagaggagtttgccgtgtgcagagatgggaaaatcggtcctccaaaactcgacattcggaaagaagagaagcaaattatgatcgacatttttcacccatctgtgtttgtgaacggcgatgagcaggaagtggactatgacccggagaccacttgttatattcgcgtgtacaacgtttacgtaaggatgaacggctcggagattcagtacaagatcctgacacagaaagaagacgactgtgacgagatacagtgccaattggcgattcccgtctcctccctcaactctcaatattgtgtctcagccgaaggtgtcttacatgtgtggggagtgaccacagagaaatcaaaggaagtgtgcatcactattttcaattcctcaattaagggctccctgtggattccggtggtggcagccttgctcctgtttctggttcttagcctcgtttttatatgtttttacattaagaaaattaaccccctcaaggagaagagcatcatcctccctaagtctctcatctccgtggtgcgcagcgctacgcttgagacaaagcccgaatcaaagtacgtgtcgttgataacatcatatcaacctttcagcttggaaaaagaggtggtctgtgaagaaccgctgtctcccgctactgtgcctgggatgcacactgaagacaacccaggcaaagtggagcacaccgaggagctttcttctataaccgaagttgtcaccactgaggagaacatcccagacgtcgtgccaggatcacatttgacacccatagagagagagtcttcctcacctcttagtagcaaccaatcagaaccaggttctatcgccctgaacagttaccatagtagaaactgtagtgaatctgaccacagccgtaacggctttgacaccgattcctcctgtctcgaatcacacagctccctttccgattctgagttcccccctaacaataagggggaaatcaagacagagggtcaggaattgatcaccgtgattaaagcccctacttcctttggctacgataaacctcatgtccttgtcgacttgctggtcgacgactctggaaaagagtcccttatcggatacagaccaaccgaggacagtaaggagttctcttag

SEQ ID NO: 227035 - DNA, 1014 bp, synthetic construct
  misc_feature 1..1014: note = Description of Artificial Sequence: Synthetic coding sequence
  source 1..1014: mol_type = other DNA
atgcgccctacattgctgtggtcactgctcttactgctcggcgttttcgctgcagctgctgctgccccacccgaccccctctcccagctcccagcgcctcagcacccaaaaattcggctctataacgctgagcaggtcttgtcatgggagcctgtagccctctcaaattccacacggccagtcgtttatcaggtgcagttcaaatatacagactccaaatggttcacagccgacatcatgagtatcggagtcaattgcacacaaataacggctaccgaatgcgacttcaccgcagcatcaccatctgctggcttcccgatggactttaacgtaacactgcgactgcgtgccgagttgggagccttgcattctgcctgggtgactatgccctggttccaacactatcggaacgttacagtgggcccacccgagaacattgaggtcacgccaggagaagggtccttgatcattcgctttagctctcctttcgatatagccgacacgtccaccgcattcttctgctactatgtgcactattgggagaaaggtgggatccaacaggtaaaagggcctttcaggtccaactctatctctttagataatctgaaaccgagcagggtgtactgcctccaggtccaggcccagctgctgtggaacaagtccaacatcttccgcgtcgggcacctatctaacatttcttgttatgagactatggctgatgccagcaccgaactacagcaggtaatcttaataagtgtgggcaccttttctctcttgtctgtgcttgccggtgcctgtttctttcttgtattgaagtataggggcctaatcaagtactggttccacacacccccaagcatcccattacagatcgaggaatatttaaaggatccaacacaacccatacttgaggcactcgacaaggactcttcacctaaagacgacgtttgggactccgtctctatcatttcctttcccgaaaaggagcaggaggacgtgctgcagactctgtag

SEQ ID NO: 227036 - DNA, 378 bp, synthetic construct
  misc_feature 1..378: note = Description of Artificial Sequence: Synthetic coding sequence
  source 1..378: mol_type = other DNA
atgcataaggaagaacatgaggttgccgttctcgggccaccacctagcacaatcttgccaaggagcactgttattaacatacactcagaaacctcggtgccggaccacgtcgtgtggtctctgttcaatacattgttcctaaattggtgctgcctcggctttatcgcctttgcctacagcgtgaaaagcagagaccgtaagatggtgggtgatgtgaccggcgcacaggcctacgcctctaccgctaaatgtcttaacatctgggctttgattttgggtatcttgatgacgattggtttcattctgctcctggtttttggatcagttacagtttaccatattatgctccagatcatccaagaaaaacgcggttattag

SEQ ID NO: 227037 - DNA, 378 bp, synthetic construct
  misc_feature 1..378: note = Description of Artificial Sequence: Synthetic coding sequence
  source 1..378: mol_type = other DNA
atgcacaaggaggaacacgaggtggcagttttggggcctcccccatccactattcttccaagaagtaccgtcattaatatacactctgaaacatctgttcccgatcacgttgtttggtctctgtttaatacactttttctgaactggtgttgtctcggatttatcgctttcgcgtattcagttaaatccagggacaggaagatggtgggggacgtgacaggcgctcaggcatacgcatcgactgcaaaatgtttgaatatttgggctctgatcttggggattctgatgactattggcttcattctgctactggtctttggatcagtgacagtgtatcacatcatgcttcaaattatccaggagaaaagagggtattag

SEQ ID NO: 227038 - DNA, 300 bp, synthetic construct
  misc_feature 1..300: note = Description of Artificial Sequence: Synthetic coding sequence
  source 1..300: mol_type = other DNA
cctcaatctcagaagatgcacaaagaggagcatgaggttgctgtgctgggcccaccaccgtccacaatcctccccagatccacagtgattaacatccactctgaaacatccgtgcctgaccacgtggtggtacctgtccaacaccccttactcgagtgttgtttaggcttcatagcctttgcctattctgtcaagtcgcgagaccgaaagatggttggtgatgttacaggcgcacaggctctccatcgacaggtgccagagcacctggggccagactctggccacccacatgaccattag

SEQ ID NO: 227039 - DNA, 378 bp, synthetic construct
  misc_feature 1..378: note = Description of Artificial Sequence: Synthetic coding sequence
  source 1..378: mol_type = other DNA
atgcataaggaagagcatgaagtcgccgtactggggcctccgccttccacaatcctccctcgatctacagtgattaacatccattcagaaacctccgtgccagatcatgttgtgtggtctctctttaacacccttttcctgaactggtgttgtcttggcttcatcgcgtttgcttacagtgtaaaaagtcgggatagaaagatggtgggcgatgttaccggtgcgcaggcctatgcttcaaccgccaaatgtctgaatatctgggccctgattttggggatcctgatgacaatcgggtttatcctgctcttggtctttggtagcgtcacagtttaccacatcatgctgcagattatacaggaaaagaggggttattag

SEQ ID NO: 227040 - DNA, 495 bp, synthetic construct
  misc_feature 1..495: note = Description of Artificial Sequence: Synthetic coding sequence
  source 1..495: mol_type = other DNA
atgaatcacatcgttcagaccttctccccggtgaacagcggccagccacctaattatgagatgctaaaagaggagcaagaagtcgccatgctgggagtgccccacaaccctgcgccaccaatgtctaccgtgatccacattcgaagcgagacatccgtgccagaccacgttgttgtgcctgttcagcatccgttgcacgaatgctgtctgggctttatcgcattcgcatactctgtaaaatcccgggaccgaaagatggtgggggacgtaacaggcgctcaggctctgcatcgacaagtaccagaacatctaggccctgactttggccacctacatgaccacagtgcccatcaccaccctagcgtgggcagaccaggcccagccattgatcaggaagccagcctgagacctggagctcttcccgtaacctgcattcccaggaccctctctagtatccctcggccagccccaagaggccaggaattgtgtccatag

SEQ ID NO: 227041 - DNA, 399 bp, synthetic construct
  misc_feature 1..399: note = Description of Artificial Sequence: Synthetic coding sequence
  source 1..399: mol_type = other DNA
atgaaccacatcgtccagaccttcagccccgtgaactccggtcagccccctaactatgagatgctgaaggaagaacaggaagtagctatgctaggagttcctcacaatcctgccccaccgatgtctactgtcattcacatccgcagtgagacatcagtgcccgaccatgtagtgtggagtctgtttaacaccttgttcatgaacacctgttgtctcggattcattgcctttgcatattccgtgaaatctcgggacaggaaaatggtcggtgacgtgacaggagcacaggcctatgcatctactgccaaatgcctgaacatatgggccctgattttgggcatatttatgaccattctgctgatcattataccggtgctcgtggtgcaggctcagcgctag

SEQ ID NO: 227042 - DNA, 447 bp, synthetic construct
  misc_feature 1..447: note = Description of Artificial Sequence: Synthetic coding sequence
  source 1..447: mol_type = other DNA
ccaccaaattacgagatgctgaaggaggaacatgaagttgccgttctgggcgctccccataacccagcaccaccgacctccactgtcattcatatacgtagcgagacatccgtgccagaccatgtggttgtcccggtgcaacaccctctccatgaatgttgtcttgggtttattgctttcgcctacagcgtgaaatccagggatcgtaagatggtaggtgacgtcactggcgctcaggcgttgcatcgacaggtacctgagcatttgggcccagactcgggtcacccgcatgatcacagtgctcataggcatcctagcgcagaccttcctgggctgtggatcgatcaggaggctagcctgcgtccgggagcactgcccatgacatgcatcccacggacaccgacctcaatcccacggcctgccccaggcgctgagagctgtatctag

SEQ ID NO: 227043 - DNA, 402 bp, synthetic construct
  misc_feature 1..402: note = Description of Artificial Sequence: Synthetic coding sequence
  source 1..402: mol_type = other DNA
atgaaccacaccgtgcagaccttctttagcccagtgaactccggacaaccccctaactacgagatgttgaaagaagagcacgaggtggctgtgctcggtgcccctcacaatccagctccacctacctcaacagtcatccacatccgctctgagactagtgtccccgatcacgtggtgtggtccttgtttaacacgttgtttatgaatccatgttgcttgggattcatagcctttgcttattcagtaaaatcacgggatcgcaagatggtgggagatgtgaccggggcacaggcctatgcttctacagccaagtgtcttaacatttgggcattgatcctgggcatcttaatgaccattttgctcattgttatccccgtgctgatttttcaggcctacggatag

SEQ ID NO: 227044 - DNA, 3078 bp, synthetic construct
  misc_feature 1..3078: note = Description of Artificial Sequence: Synthetic coding sequence
  source 1..3078: mol_type = other DNA
atgagcaacggctatagcacggatgaaaacttccgatacctgatatcttgctttcgggctcgagttaaaatgtacattcaggtggaacccgtcttagactacctgactttcctacctgctgaggtcaaggagcagatccaaagaaccgtggcgacctctggcaatatgcaggccgtcgagctcctcttgagtacactagagaagggggtgtggcacctaggatggactcgcgaattcgtcgaggctctccggaggactgggtcccccctggccgcacggtacatgaatccggaactgacagatctgccaagccctagcttcgaaaatgcccatgacgaatatctgcagcttctgaatctcctacagccaacattagtagacaaactcctggtaagagacgttctcgataaatgcatggaggaagagctcctgaccatcgaagaccggaataggattgccgctgctgaaaataacggaaacgagtctggcgtacgagaattgctgaagcggattgtccagaaggaaaactggtttagcgcttttctaaatgtgctgcgccagactggtaataacgaactggtgcaggaactgaccgggagtgattgcagtgaatctaatgccgagatcgaaaacctttctcaggtagacggacctcaggtggaggaacaattactcagcaccaccgtccagcctaacctggagaaggaggtttggggcatggagaataactcctccgagtcttcttttgccgatagctccgtcgtaagtgagtccgacacatctcttgcggaagggagtgtgtcttgtctcgacgagtctctgggccacaactctaatatgggcagcgacagcggaactatgggtagcgactccgacgaagaaaacgttgccgcacgagccagtcctgaaccagagctccagctgcgcccttaccaaatggaggtggcacagcctgccttagagggcaagaatattatcatttgcctgcccacgggcagcggaaaaacaagggtggcagtctacattgccaaggaccatcttgataaaaagaaaaaggcctcagaaccgggtaaggtcattgtcttggttaacaaggttctgcttgtggagcaactgtttcgcaaggaatttcagccctttctaaagaaatggtatagagttattggactctctggagatacgcagctgaagatatcttttccggaggttgtgaaaagttgcgacatcattattagtaccgctcagatactggagaactccttactgaatctggagaatggagaagatgctggcgtgcagctgagcgatttttcccttatcataattgatgagtgccaccacacaaataaggaagcggtttacaacaatatcatgagacattatctgatgcagaaattaaagaataaccggctgaagaaggagaacaaaccagtgattcctctgcctcagatacttggcttgaccgcttccccgggagtcggcggagcaaccaagcaggccaaggcagaagagcatatcctcaagctgtgcgccaacctggatgctttcacaataaagacagtgaaggagaatctggaccagctgaaaaaccagattcaggaaccttgcaagaagtttgccattgctgacgccacacgggaggatccatttaaggaaaagctcctggagatcatgacccgtatccagacctactgccagatgtcacccatgtccgacttcggtacccagccttatgaacaatgggccattcagatggaaaaaaaagctgcaaaagagggcaaccggaaggaacgcgtgtgtgccgagcatctcaggaagtataatgaagcgttgcaaattaatgatacaattcggatgatcgacgcgtatacacaccttgaaactttttacaatgaagagaaagacaaaaaattcgctgtaatcgaggatgactccgatgaaggaggtgacgacgaatactgcgacggagacgaggacgaggatgacctgaagaagcccttgaagctggacgagactgataggtttcttatgacccttttctttgagaataataaaatgctaaagaggctcgccgagaatccagaatacgaaaacgaaaagctgaccaagctcagaaatacaattatggagcaatatactaggactgaggagagcgccaggggtatcatattcactaaaacccggcagtctgcctatgccctcagccagtggataacagaaaatgaaaagttcgcagaagtgggcgttaaagcgcatcatcttattggtgcagggcactcttctgagtttaagcccatgacacaaaacgaacagaaggaagtgatctctaagtttcgcactggaaaaataaatctcctgattgctacaactgtggccgaagaaggcctcgacataaaggagtgcaacatagttatccgttacggcttagtcacaaacgagattgctatggtgcaggccagaggcagggctcgggcagacgaatctacttatgtactcgtggctcactctggatccggggtgattgagcacgaaacggttaatgattttcgggagaagatgatgtacaaagcaattcactgtgtgcagaacatgaaacctgaggagtacgcgcacaagatactggaactgcagatgcagtccataatggaaaaaaagatgaaaacaaagcgaaatatcgccaagcattataaaaataatccctctcttattacattcctctgtaagaactgttctgtactagcttgcagtggtgaggatattcacgttattgaaaaaatgcaccatgtaaacatgaccccggagttcaaggagctttatattgtgagagagaacaaggcattgcaaaagaaatgtgccgactaccagattaatggagagattatctgtaaatgcggccaggcctggggcactatgatggtgcacaaggggctggatcttccttgccttaaaattaggaattttgtcgtcgtgttcaagaacaacagcaccaagaagcagtataaaaaatgggtcgaactgccaatcactttcccgaaccttgactacagtgagtgctgtctgttctccgatgaagactag

SEQ ID NO: 227045 - DNA, 666 bp, synthetic construct
  misc_feature 1..666: note = Description of Artificial Sequence: Synthetic coding sequence
  source 1..666: mol_type = other DNA
atgtccaacggctactccacagacgagaatttccgctacttgattagttgtttcagggcaagagtaaagatgtatattcaggtagagcccgtgttggattatctgacctttttgcctgctgaagtcaaggagcagatccaacggaccgtagctacctcaggtaacatgcaggccgtggaactcctgctcagcactctggagaaaggagtatggcatctgggatggacccgggagttcgtggaagccttacgaaggacaggctccccattggcagcacgatacatgaatccggaattaacagacctcccaagcccatccttcgagaatgcccacgacgaatatctgcagctccttaatcttctgcagcccaccctcgtagataagttactcgttagagatgtcctggataaatgcatggaggaggaacttttgacgatcgaggatagaaacagaatcgccgctgcggagaacaatgggaatgagagcggcgtgcgggaactgctgaagcgtatcgtgcagaaagagaactggttctctgcattcctgaacgtcctgagacaaaccggtaataatgaacttgtccaggagcttactgggtcagactgtagcgagagtaatgccggaatttgcaacttcacagaggaggattcgagtaatagtgcatag

SEQ ID NO: 227046 - DNA, 3078 bp, synthetic construct
  misc_feature 1..3078: note = Description of Artificial Sequence: Synthetic coding sequence
  source 1..3078: mol_type = other DNA
atgagtaatggttacagcaccgacgaaaacttcaggtatctcatttcctgcttcagggcgcgagtaaagatgtatatccaagtcgagcccgtgctggactacctcacatttctgcccgctgaagtgaaagaacaaattcagcggaccgtggcaaccagtggcaatatgcaggcggtcgaactccttctcagtaccctggagaagggagtgtggcatctgggctggaccagagagttcgtcgaggcactgagaaggaccgggagccctctggccgcaagatatatgaatcccgagctaacagacctgccgtcacctagctttgagaacgcacatgatgaatacctgcagctcttaaacctgctccagccaactcttgtcgacaaactgttagtgcgggacgttttggataagtgcatggaggaagagctgttaacaattgaggatcgaaaccgaattgctgccgctgaaaacaacggaaatgaatctggcgtccgcgagctgttgaagcgaattgtacagaaagaaaattggttttcagcattcctcaacgtgctgcgacagactggaaataatgagttagtacaggaactcacaggctcggattgcagtgagtcaaacgccgaaatcgaaaacctgtcccaggtcgatgggccacaggttgaggagcagctcctgagtaccacagttcaaccgaatctagagaaagaggtgtggggcatggagaacaactcttctgagtcatcctttgccgactcatccgtggtctcggagtcagacacttccctcgccgagggaagtgtctcatgcctggatgaaagtttgggccacaactccaacatgggcagtgatagcggcaccatgggcagtgactctgacgaggagaacgtcgcggctcgagccagtccagagccagagttacagttacggccatatcaaatggaggtggcacagcccgctctggagggtaagaacataattatctgccttcccaccggcagcgggaaaacccgcgtggccgtttacattgctaaggatcacctcgataaaaagaaaaaagcgagtgaacccggaaaagttattgttttagtcaacaaagtcctcttagtagaacagctcttcagaaaagaatttcaaccattcctaaaaaaatggtacagggtgattggactcagtggagatactcagctgaaaatcagctttcctgaggtagtgaaatcctgcgatattattatcagcaccgcacagatcctggaaaatagtctcttaaatttggagaacggtgaagacgcgggtgtccagttgtcagattttagtctgattataatcgatgagtgccatcacactaacaaggaggccgtatataataatattatgagacattacctaatgcaaaaacttaaaaacaaccgcctgaagaaggagaacaagcccgtgatccccctgccgcagattctaggtctcaccgcaagtcccggagtgggaggcgcaactaagcaagccaaggcagaggaacatatccttaagctctgtgccaatctggacgcgtttaccataaaaactgtcaaggagaatttggaccagttgaagaaccagattcaggaaccgtgcaagaagttcgccattgccgacgccactagagaagacccttttaaggaaaagctgttagagatcatgacaaggattcagacctactgtcagatgtcccccatgtccgactttgggacccagccgtacgaacagtgggcaattcagatggaaaaaaaagccgctaaggaagggaatcgcaaggaaagggtttgtgctgagcaccttaggaagtataacgaggccctgcaaataaatgacaccatcagaatgatagacgcctacacccatcttgaaaccttttataacgaggagaaagacaagaagttcgctgtaatcgaggatgatagtgacgaaggaggcgacgatgagtattgcgacggagatgaggatgaggacgacctgaaaaaaccactgaaactagatgaaaccgaccggttcttgatgacactcttcttcgaaaacaacaagatgctcaaaagattggctgaaaacccagaatacgagaacgaaaaactcacaaagctgcggaacactataatggagcagtacacccgaaccgaagaaagcgccagagggattatcttcactaagacgcgccagtcggcttatgctctctctcagtggatcacggagaacgagaaattcgcggaggtgggcgttaaagcacaccaccttatcggcgctgggcacagcagcgagttcaaaccaatgacgcagaacgagcaaaaagaggtaatttcaaagtttcgcacgggcaaaatcaacctgttgatcgccactaccgtggccgaggaaggtttggatatcaaggagtgtaatattgtgattagatatgggttggtcaccaatgagatcgctatggtccaggctcggggacgagcgagagcagacgagtcaacatacgtgctggtagctcactctggtagcggagtgattgagcacgagactgtgaacgactttagggaaaagatgatgtacaaagctatacattgtgtccagaacatgaaaccagaagagtacgcccacaagattctcgaactgcagatgcaaagcattatggagaaaaagatgaaaaccaagcgaaacattgctaagcattacaaaaacaacccttccctgattacttttctgtgtaagaactgcagcgtcctagcgtgctcaggtgaagatatccatgtgatcgaaaaaatgcaccatgtcaacatgactccggaattcaaggaactctacattgtccgcgaaaataaagcactgcagaagaagtgcgctgactaccagatcaacggcgaaatcatctgcaagtgcgggcaagcttgggggacgatgatggtccataagggactggacttgccctgcctcaaaatccgtaactttgtagtagtatttaagaataacagcaccaagaaacaatataagaagtgggtcgagctcccgatcaccttccctaacttggattattcagagtgttgtctgtttagtgatgaggattag

SEQ ID NO: 227047 - DNA, 1050 bp, synthetic construct
  misc_feature 1..1050: note = Description of Artificial Sequence: Synthetic coding sequence
  source 1..1050: mol_type = other DNA
atgccagtggagcggatgcgaatgcgaccgtggcttgaagaacaaatcaattcgaataccatccccggtctgaagtggctgaacaaggagaagaagatcttccagattccctggatgcacgctgccagacacggatgggacgtggaaaaggatgcacctctctttcggaactgggcaatccataccgggaaacatcaaccaggtgtagacaagccagatccgaaaacctggaaagctaacttccgctgtgccatgaacagcttgcctgacatcgaagaagttaaggataagtccatcaaaaaaggcaataatgctttccgggtgtacaggatgcttcctctcagcgagcgccctagcaaaaaggggaagaaacctaaaacagaaaaagaagacaaggttaagcatatcaaacaggagcctgttgagtcaagtttgggcttatccaatggggtgtccgatctttcccctgagtatgcagtgctcacaagcacaattaagaatgaagtagattctactgtgaatatcatcgttgtcggccagtctcatttggactcaaacattgagaaccaggagatcgtgaccaacccccctgatatttgccaagtagtggaagtgaccactgaatcagatgaacaacccgtgtccatgtctgagctgtatccactgcaaatcagcccagttagctcctacgcagagagtgaaacgactgactcagtgccaagtgatgaagaatctgcagagggacgaccacactggcggaagagaaacattgaagggaaacagtacctgagcaacatgggtacccgcggtagctacctcttaccaggcatggcatcttttgtcacctccaataagcccgacctccaggtgacaatcaaggaagagagtaacccggtgccgtacaacagctcatggcccccatttcaggacctgccccttagttccagcatgactccagcttccagtagtagccggccagacagggagacacgcgcttcggtcataaagaaaactagcgacatcacacaggcgcgagtcaaatcatgctag

SEQ ID NO: 227048 - DNA, 414 bp, synthetic construct
  misc_feature 1..414: note = Description of Artificial Sequence: Synthetic coding sequence
  source 1..414: mol_type = other DNA
atgccagttgagcgaatgcggatgaggccgtggttggaggagcagatcaattccaacaccatccctggccttaagtggttgaacaaggagaagaagatttttcaaatcccttggatgcatgctgcgcgtcacggctgggatgtcgaaaaggacgccccactctttagaaactgggctattcacacaggcaagcaccagcctggggtcgataaaccagatcccaagacctggaaagccaatttccgttgcgccatgaactcactgcccgacattgaggaggttaaggacaaatccatcaaaaaaggcaataacgcctttcgagtgtatcgcatgctgcccctttctgaaagaccctccaaaaagggcaagaagcctaagaccgagaaagaagataaggtgaagcacattaagtag

SEQ ID NO: 227049 - DNA, 414 bp, synthetic construct
  misc_feature 1..414: note = Description of Artificial Sequence: Synthetic coding sequence
  source 1..414: mol_type = other DNA
atgccagtggaacgcatgcgaatgcggccatggctcgaggaacaaataaacagcaatacaattccgggtctgaagtggctcaataaggagaaaaagatttttcagatcccttggatgcacgccgctaggcatggctgggacgtcgagaaggatgccccactttttagaaactgggctatccacaccggcaagcatcaaccaggagtggacaagccggacccaaagacctggaaagctaattttaggtgtgctatgaactctttacccgatattgaggaggtgaaagataaaagcatcaagaagggcaacaatgcgttccgcgtgtaccgaatgttgcccctgagtgagcggccttccaagaaagggaagaaacccaagacagaaaaagaagacaaggtcaagcatataaagtag

SEQ ID NO: 227050 - DNA, 531 bp, synthetic construct
  misc_feature 1..531: note = Description of Artificial Sequence: Synthetic coding sequence
  source 1..531: mol_type = other DNA
atgcctgtggagcggatgaggatgaggccatggctcgaggagcagattaacagcaacacaatccctggattaaagtggctcaacaaagagaagaaaatattccagatcccctggatgcatgcggctcgccatggttgggacgtcgaaaaagatgccccactctttagaaactgggcaattcacacaggcaagcatcagccaggggtcgacaagccggaccctaagacctggaaggccaatttcaggtgcgccatgaatagcttgcccgatatagaggaagtcaaggataaatctatcaaaaagggcaacaacgctttccgggtctatagaatgctgcctcttagcgaacggccatcaaagaaagggaaaaaaccgaaaacagaaaaggaagacaaagtcaaacacataaaacaggagcccgtggaatcatctcttggactgtcaaatggagtctcagatttgtcaccagaatacgcagtcctcacctccacaatcaagaatgaagtggatagtacagtgaatatcatatag

SEQ ID NO: 227051 - DNA, 486 bp, synthetic construct
  misc_feature 1..486: note = Description of Artificial Sequence: Synthetic coding sequence
  source 1..486: mol_type = other DNA
atgcctgtcgaacgaatgagaatgaggccctggttggaagagcagatcaacagcaacacaatacccggactcaagtggttaaataaggaaaaaaagatctttcagattccctggatgcacgcagcacgccacggatgggacgttgagaaggacgcccctctctttcgaaactgggctatccataccggcaaacaccagcccggagttgacaaacccgaccccaagacatggaaggcaaactttcgatgtgccatgaattctttacccgatatagaagaggttaaggataagagcattaaaaaaggcaataacgcttttagagtttatcggatgctgccactctccgaacgcccaagtaaaaaagggaaaaaaccaaagacagaaaaagaggacaaggttaaacacattaaacaggagcctgtcgaaagctccttaggcctaagtaacggtgtcagtgatctatcaccagaatacgccgtgctttag

SEQ ID NO: 227052 - DNA, 1284 bp, synthetic construct
  misc_feature 1..1284: note = Description of Artificial Sequence: Synthetic coding sequence
  source 1..1284: mol_type = other DNA
atgggaacaccaaagccacgcattcttccctggctggtctcccagctagatttgggacagctcgagggagtagcttgggtgaacaagtctagaactaggtttcgaataccttggaaacacggcctgcgacaggacgctcagcaggaagattttggaatattccaagcctgggctgaggcgactggggcttacgttccaggcagagacaaaccagacctccccacttggaagcgcaactttcggtcagcccttaataggaaggaaggcctacgacttgccgaagatcgaagcaaggaccctcacgatccccataaaatatacgagtttgtcaattccggtgtcggagatttctcacaaccggataccagtcccgacactaacggcggtgggagcacaagcgatactcaggaagacatcctagatgaacttcttggcaatatggtgctggcgcctcttccagacccagggcctccttctctggctgtggcccctgagccttgtccccagcctttgaggtccccaagcctggacaatcctacacccttccctaatctcggcccatccgaaaatcctttgaagcgtctgctcgtgccaggggaggaatgggaatttgaggtgacagctttctaccggggacggcaagtgttccagcagaccatcagctgccccgagggcctcagattggtggggtctgaagttggagaccggacactccccggttggcccgttaccctgcctgatcccggaatgagcctgacagacagaggggtcatgagttatgtgaggcacgtactcagctgtctaggcggtggactcgccctgtggagggccggtcagtggctgtgggctcaacgtcttggccactgtcacacttattgggccgtatcggaggaactcttgcccaacagtggacacggtcctgatggtgaggttccaaaggacaaggaaggtggtgtgttcgacctgggcccattcatagtcgacttgattacgtttacggaaggttctggacggagccctcgctacgctctgtggttctgcgtaggagagtcctggccccaagatcagccgtggaccaagcgcctggtgatggttaaggtggttccaacatgcctgagagctcttgttgaaatggctcgggtgggcggtgcctccagtctggagaataccgtggaccttcacatcagtaattcgcacccactctcccttacctccgaccaatacaaagcatacttacaagacctggttgagggaatggacttccaagggccaggtgagtcgtag

SEQ ID NO: 227053 - DNA, 903 bp, synthetic construct
  misc_feature 1..903: note = Description of Artificial Sequence: Synthetic coding sequence
  source 1..903: mol_type = other DNA
atgggcaccccgaagccgcgtatcctgccgtggctggtttcccagctggatctcggtcaactggaaggcgtggcttgggtgaacaagtccagaactcgcttcagaataccctggaagcacggcctcagacaggacgcccaacaggaagacttcggtatttttcaggcttgggccgaagccaccggggcttacgtgccaggaagggacaagcctgatctccccacatggaagcggaattttcggtcagcgctcaatcgcaaggaggggctgaggctggccgaagaccggagtaaggacccgcacgaccctcacaaaatctacgaattcgtgaattcaggcgtcggagacttcagccagccagacaccagccctgatacaaatggtggaggcagtacatctgatacccaggaagacatactggacgagttgctcggtaatatggtgttagccccacttcccgatcccggtcccccaagtctggccgttgcgcctgaaccttgtccccagccattacgttccccgagcttggacaatcctacacccttccctaatctgggaccttcagaaaacccactgaagagactgctggtgcctggcgaggacttgatcacctttaccgaaggtagcgggaggagccccagatacgctctgtggttctgtgtgggagagtcctggccgcaagatcagccgtggacaaagcgcctggtaatggttaaagtggtgcccacctgtttgagagctctggtcgaaatggctcgagttgggggagcctcaagtttggaaaacacagtggatcttcacatctccaacagtcatccactgtccctgacttccgaccagtacaaggcctatctacaggatcttgtggagggcatggacttccaggggcctggggagtcctag

SEQ ID NO: 227054 - DNA, 1284 bp, synthetic construct
  misc_feature 1..1284: note = Description of Artificial Sequence: Synthetic coding sequence
  source 1..1284: mol_type = other DNA
atgggtactccgaaacccagaatactgccgtggctggtgagccagctagacctcggccaattagagggagtggcttgggtgaataagagccggacgagatttaggatcccttggaagcacgggttaagacaggacgcacagcaggaggacttcggcatttttcaggcctgggcagaggctacaggcgcatacgtaccgggtagggacaaacccgaccttcctacgtggaaaagaaactttaggagtgctttgaaccgtaaggagggcctccgcctcgccgaagatagaagcaaggatccccacgatccccacaagatctatgaattcgtgaattccggagtgggcgacttttcccaacctgatacaagtccagacactaatggcggaggaagtacctcagatacgcaggaggacatactggacgagctgctcgggaacatggttcttgcacctctccctgatcctgggcctccttccctggccgttgccccagagccatgccctcaacctctgagatcccccagtcttgataatcctaccccattcccgaacctgggtccttcagagaaccccctcaagaggctgctggttccaggagaagagtgggaattcgaagtgaccgcattttaccgaggcagacaagttttccaacaaaccatcagctgccctgagggcttaaggctggtgggctcagaggtgggggataggacactgccaggttggcccgtcacattgccggacccagggatgtcattgaccgataggggagtgatgtcctatgtaagacatgtgctgtcctgtctcggaggtgggctcgccctgtggcgcgctggacagtggctttgggctcagcgtctggggcattgccacacatattgggcggttagcgaagagctcttgcccaacagcgggcacgggcctgacggcgaggtcccaaaggataaggagggtggtgtgtttgatctcggacccttcatcgttgatttaatcacatttacggaaggcagcgggagaagtccacgctatgcactctggttctgtgtcggcgaaagttggccccaggatcagccctggaccaagagactggtgatggtgaaggtggtgcctacgtgccttcgagccctagtagaaatggctcgggtgggaggtgcctctagcctggaaaacactgtggaccttcacatcagtaatagccaccctctctctcttacgtctgaccagtataaggcctatctccaggatcttgtggaggggatggactttcagggccctggcgaatcctag

SEQ ID NO: 227055 - DNA, 315 bp, synthetic construct
  misc_feature 1..315: note = Description of Artificial Sequence: Synthetic coding sequence
  source 1..315: mol_type = other DNA
atgggaactcccaagccgaggatcctcccatggctggtgtcccagctggacctgggccagctcgaaggcgtggcgtgggtgaataagtcacggactagatttcgcattccctggaaacacggactgaggcaggacgctcagcaggaggactttggcatttttcaagagctcggcacatttccatcgcagacacctctccgcactccgatggtggaggctgtcctcctcatacccaggaaaactttttggatgtcctattgggtcacttggtgttggccccacagccagatcagagaccctcaggcctggctttag

SEQ ID NO: 227056 - DNA, 846 bp, synthetic construct
  misc_feature 1..846: note = Description of Artificial Sequence: Synthetic coding sequence
  source 1..846: mol_type = other DNA
atggtcctcgcgccattgccggatccaggaccaccttctttggcggtggcaccggaaccttgtccacagcctctccgctccccgtccctcgataatccgacaccctttcccaatctcgggccttctgagaaccctttaaagcgcctcctggtgccaggcgaagagtgggaatttgaagtgacagccttttaccgaggtaggcaggtttttcagcaaacaatctcctgcccagaaggcctgaggctcgttggtagcgaggtcggagatcgcacactgcccggatggcctgtgactctacccgaccccggaatgagtctaacagaccgcggagtgatgtcatacgtgcgacacgtactctcttgcctgggtgggggtctggccctttggcgcgctggtcagtggctgtgggctcagagactcggtcattgtcacacatactgggccgtgtcggaggagctgctcccgaattcaggccacgggccagacggtgaggtgccaaaagataaggagggtggagttttcgacctcgggccttttatcgttgacttaatcacctttaccgaggggtctggcagatcccccagatacgcactgtggttttgcgtaggcgagtcttggccccaggatcagccatggacaaagcggcttgtgatggttaaggtcgtcccgacgtgtttgcgtgctttggttgagatggctcgggtcggtggagcgtcaagtctcgaaaataccgtcgatctgcacatttccaatagtcaccctctgtctttaacctccgaccagtataaggcttacttgcaggatttggttgaagggatggactttcagggacctggagaatcatag

SEQ ID NO: 227057 - DNA, 465 bp, synthetic construct
  misc_feature 1..465: note = Description of Artificial Sequence: Synthetic coding sequence
  source 1..465: mol_type = other DNA
atggtccttgccccacttcccgatcctggccctcccagtctcgccgtcgcccctgaaccatgcccgcagccactacgttcaccttcccttgataacccaacccccttccctaatttaggcccatccgagaaccccctgaagcgcctgttggttcctggtgaggacctcattaccttcactgagggttccggaaggagcccacgctacgccctgtggttttgcgtcggcgaatcctggccccaggatcaaccctggacaaagcgcctggtgatggtgaaggtggtcccaacctgtctcagagcgcttgtcgaaatggctagagtaggcggagcatcctctttggagaatacagttgatctccatattagtaatagccaccctctttcattaacaagcgatcagtacaaggcttatctccaggaccttgtagagggaatggacttccagggtccaggcgaatcatag

SEQ ID NO: 227058 - DNA, 846 bp, synthetic construct
  misc_feature 1..846: note = Description of Artificial Sequence: Synthetic coding sequence
  source 1..846: mol_type = other DNA
atggtgctagcccctttgcccgatcccggaccacctagtctggcagtggccccagagccatgtccgcagccgctcaggtctccctctctcgacaatcccacaccctttcccaaccttggaccctctgaaaatcctcttaagagactgctggtccccggagaggaatgggagttcgaggtgacggcattttatcgtgggaggcaggttttccaacaaacgataagctgccccgagggactgagactcgtggggagtgaagtgggagaccgtactttgcccggatggccagtgacacttcctgatcccggaatgtccctcaccgacaggggcgtgatgtcttacgtgagacacgtcctgagttgcctcggaggtggactggccctgtggagggcaggacagtggttgtgggctcaaagactgggccactgccatacctactgggcagtgtcagaggagcttcttcctaactccgggcatggtcctgatggagaagtcccaaaggataaagaggggggagtgttcgatctgggcccatttatagtcgacctgatcacctttacagaaggctccggcaggtcgcctcggtacgctctgtggttctgcgtaggggagtcttggcctcaggaccagccttggacaaagagattggtcatggtaaaggtcgtgcctacctgcctgcgggctctggtggaaatggcccgtgtcgggggagccagcagcctggagaatactgtggacctgcacatatcaaacagtcatcccctgagtctgaccagtgaccagtacaaagcctacctacaggatctggtagaaggaatggactttcagggcccaggagaaagttag

SEQ ID NO: 227059 - DNA, 903 bp, synthetic construct
  misc_feature 1..903: note = Description of Artificial Sequence: Synthetic coding sequence
  source 1..903: mol_type = other DNA
atgggtacccccaagcccagaatattgccgtggctcgtgagccagctggacttaggccaactcgaaggagtagcatgggttaataaatcccgtactcgtttcagaattccttggaagcacggactccgccaagatgctcagcaggaggactttgggatattccaagcctgggcagaagctactggagcttatgtgccaggacgggacaaacccgaccttcctacctggaaaaggaattttagatctgcactcaatcgcaaggaggggctacgcttggccgaggacagaagcaaggacccacatgatccccacaagatatacgagttcgtcaatagtggagtcggggacttctcccagcccgataccagtcccgacaccaacggcggagggagcacgtctgacacgcaggaggatattctggacgagcttctgggcaacatggttctggcccctctacctgaccccggacccccatcactggccgtcgccccagagccttgccctcagccgttgaggagcccatcactcgacaaccctacaccgtttcccaacttgggcccttccgagaaccctttgaagagactgcttgtacccggtgaagacctgattactttcactgaaggctcagggagatcacccaggtatgctctgtggttttgtgtgggagagtcttggccacaggatcaaccttggactaaacggctggtgatggttaaagtcgtgcctacctgtctcagagctctggtcgagatggccagggtcgggggtgcgtcttctctggaaaatacagtcgacctgcacattagcaacagccacccactgtcactgactagcgatcaatacaaagcctacctgcaagacctcgtcgagggtatggactttcaaggcccaggggaaagctag

SEQ ID NO: 227060 - DNA, 465 bp, synthetic construct
  misc_feature 1..465: note = Description of Artificial Sequence: Synthetic coding sequence
  source 1..465: mol_type = other DNA
atggtactggcgcctctgcccgacccaggccctccgtctctggctgtcgcgcctgaaccgtgcccgcagcccctgaggtcccctagcttggacaatcccactcctttccccaacctcggcccatctgagaatcctcttaagcgcttgttagtaccaggagaggacttgataacttttacggaaggttcagggagatcccccagatacgcattgtggttctgcgtcggggaatcctggcctcaagatcaaccctggaccaaacgactcgtgatggtgaaggtggtccccacttgcctgcgggcactcgtcgagatggccagagttggaggggctagctccctggagaatactgtggacttgcatatctctaattcccaccccctcagcctgactagtgaccagtataaagcatatctgcaggatctggtggagggcatggatttccagggacccggtgagagctag

SEQ ID NO: 227061 - DNA, 1404 bp, synthetic construct
  misc_feature 1..1404: note = Description of Artificial Sequence: Synthetic coding sequence
  source 1..1404: mol_type = other DNA
atggcattgcatcctcggagggtccggctcaagccctggttagtggctcaggtcgattctggactgtacccagggttaatttggctccacagggatagtaagcgcttccagataccttggaaacatgccacccggcattcaccccagcaggaagaggaaaacactatatttaaagcatgggctgtggaaacaggcaaataccaagaaggggtggacgatccagaccccgcaaaatggaaggctcagcttcggtgcgccctgaataaatcgcgcgaatttaacctcatgtacgatggcacaaaggaagtgccaatgaaccccgtcaagatatatcaggtgtgtgatatcccgcagccgcaggggtcgataatcaatcctggatccacaggcagtgctccctgggatgaaaaagataatgacgtagatgaggaggatgaggaggatgagcttgatcagtcccagcaccacgtgccaatacaggatacattcccctttctgaacatcaacggctctcctatggcaccagctagcgtcggaaattgtagtgtaggcaactgctctcccgaagcggtttggccaaagacagagcccctcgaaatggaagtccctcaggcccctattcagcctttttacagtagcccagagctgtggatatcatctctgcccatgacagacctggacatcaagtttcagtataggggaaaagagtatgggcagaccatgactgtgtctaatccccagggctgccgtctgttttacggagacttggggcctatgcccgatcaggaagagctttttggaccagtgtccctcgagcaggtgaagttccctgggccagagcacattaccaacgagaagcagaagctctttaccagcaagctcctcgacgttatggatcggggtttgattctcgaagtatcgggacacgccatttacgctatcagactctgccaatgtaaagtgtattggagtggtccgtgcgcaccaagcctggtggcccctaatctgatcgaacggcagaaaaaagtgaaacttttttgtttggaaacattcctctctgatctgatcgcacatcagaagggtcaaatcgaaaaacaaccaccctttgagatctatctttgcttcggggaggaatggcccgacggaaagccacttgaaagaaagttaatcctggtgcaggtcattcccgtggtcgcccgaatgatttatgagatgtttagcggggatttcaccagatctttcgatagtgggagcgttcgcctgcaaatcagtacgcctgacatcaaggataacattgtggcacagctgaaacagctctatcgcattctccagacccaagagagttggcagcctatgcagcccacccccagcatgcaactgcccccagcattgcctccacagtag

SEQ ID NO: 227062 - DNA, 831 bp, synthetic construct
  misc_feature 1..831: note = Description of Artificial Sequence: Synthetic coding sequence
  source 1..831: mol_type = other DNA
atggccttacatcctaggcgggtccggttgaagccatggctggtcgcccaggtggactcgggcctctacccagggctgatttggctgcatagggattcaaaacgatttcaaatcccatggaagcacgcgaccaggcactctcctcagcaggaggaagaaaacacaattttcaaggcctgggcagtggaaaccggcaaataccaggagggggtggatgaccccgaccccgctaaatggaaggcacagttacgttgcgctctaaataaatctcgggagtttaatctgatgtacgatggcacgaaggaggtaccgatgaaccccgtgaaaatataccaagtgtgtgatattccgcagccgcaagggtctatcatcaacccgggtagcaccggctctgcaccttgggatgagaaggataacgacgtagacgaagaggatgaggaggatgaactggaccaatcgcaacaccacgtcccaattcaggacaccttcccattcctcaatatcaatggcagcccaatggcccctgcctccgtgggtaattgttctgtggggaactgtagccctgaggccgtctggcccaagaccgaacccctggagatggaggtgccccaagcccctattcaacctttctactcaagcccagagctctggatttcctcactgcccatgacagatcttgacataaagtttcagtacagggggaaggaatacggccaaaccatgactgtgtctaatccccaggggtgtcgtttgttttacggcgacttggggccaatgccagaccaagaggagctgttcggacccgtttcccttgaacaagtgaaattttag

SEQ ID NO: 227063 - DNA, 1119 bp, synthetic construct
  misc_feature 1..1119: note = Description of Artificial Sequence: Synthetic coding sequence
  source 1..1119: mol_type = other DNA
atgtacgatggtactaaagaggtacccatgaatcccgtgaagatctatcaagtatgcgacatcccccagccacagggcagcatcattaacccgggttcaactggctcagcgccatgggacgagaaagacaacgatgttgacgaagaggatgaggaggacgaactggatcaatcccagcaccatgtcccaatccaagacacttttccctttttgaacatcaacgggtcacctatggctcccgcatccgtaggaaattgtagtgtcgggaattgtagtcctgaagcagtctggcccaagactgagcctcttgaaatggaggtaccccaggcacccatccaaccgttttacagctcaccagagctctggatttcatccttgccaatgacagaccttgacattaagttccagtataggggcaaagagtatggtcaaactatgaccgtgtctaacccccagggatgccgcctcttctacggcgacctaggccctatgccagatcaggaagaactcttcggcccagtgtcactggagcaggttaagtttccgggtccagagcatattactaacgaaaagcagaagctttttaccagtaaactgttagacgtaatggacagggggctgattctggaagtgtccggccacgccatctacgcaattaggctgtgccagtgcaaggtatattggtccggaccatgtgcccctagccttgtcgcaccaaatctaattgagcgtcagaaaaaagtgaagctgttctgtttagagacattcctcagcgatctcatagctcatcagaagggacaaattgagaagcaacccccttttgaaatctatctgtgttttggggaggaatggccggatggaaaacctttggagcggaaactgattctcgtacaggtgatcccagtggttgctcggatgatctacgagatgtttagtggtgatttcacccgcagtttcgactccggatccgtgcggctccagatctcgactccagatattaaggataatatcgtcgcgcagctgaaacagctgtaccggatcctgcagacacaagagtcttggcagccaatgcagcccaccccttctatgcagctccccccagcccttcctccccagtag

SEQ ID NO: 227064 - DNA, 1281 bp, synthetic construct
  misc_feature 1..1281: note = Description of Artificial Sequence: Synthetic coding sequence
  source 1..1281: mol_type = other DNA
atgtgcgatagaaatgggggacgcagactcagacagtggctgatagaacagattgatagctctatgtatcctggcctgatctgggagaatgaggagaagtcgatgttccggataccttggaagcacgcagggaagcaagactataaccaggaggttgacgcaagcattttcaaagcatgggctgtgtttaaagggaaatttaaagagggtgataaggccgaaccggctacttggaagactcggctgcgttgcgctctgaacaagtcacctgacttcgaggaggtgaccgaccgctctcaattagatatcagcgaaccttataaggtgtaccggatcgttccagaggaagaacagaaatgtaaactgggggtggccacagcgggttgcgttaatgaagtcacagagatggaatgcgggaggagtgaaatcgatgagctgattaaagaacctagcgtcgacgactatatgggaatgatcaagagatccccaagcccgccagaggcgtgccgatcccagctgctccccgattggtgggcacagcagccatctacaggtgtgccattggtgacaggttacacaacatacgacgctcatcacagcgcgttttcgcagatggtcattagcttctactacggtggtaagttggtgggacaagcaaccacaacttgtcctgagggctgtcgcttatccctgtcacagccagggcttccaggtaccaaactctatggcccagaggggcttgagttggtcagatttcctcccgcagacgcgatcccctccgagcgccagaggcaggtgacaagaaaacttttcgggcacctggaaaggggggtattacttcatagctctaggcagggcgtcttcgtgaagcgcttatgccagggccgtgttttctgttctgggaacgccgtcgtctgtaagggacggccaaataagttggagcgagacgaggtagtgcaggtgttcgacacatcacagttcttcagagagttacagcagttctacaacagccagggtaggttgccagatggaagggttgtcctttgtttcggggaggaattccctgacatggccccactgagaagcaaactcattctagtccaaatcgagcagttgtatgtgcggcagttggccgaagaggctgggaagtcctgtggagctggctcagtcatgcaggcacccgaagagcctccaccagatcaggtattcaggatgtttcccgacatctgtgcttcccatcagcgatctttcttccgggaaaaccaacagattacagtttag

SEQ ID NO: 227065 - DNA, 546 bp, synthetic construct
  misc_feature 1..546: note = Description of Artificial Sequence: Synthetic coding sequence
  source 1..546: mol_type = other DNA
atggccggaagccgggaagttgtggctatggactgcgaaatggtcggccttggccctcatcgggaaagcgggctcgcccgatgctcgctggtgaatgtacacggggctgttctctacgacaaattcataagacccgagggcgagatcacagactaccgcacgagagtgtctggagtgacaccccaacatatggttggagcgacaccatttgctgtggccaggctggagatcctgcagctactgaaaggaaaactggtggttgggcatgatctcaagcacgacttccaggctcttaaagaggatatgagtggttatactatttacgatacgagcacagataggctgctctggcgggaggctaaactggaccattgccggagagtgtctcttcgcgtgctgtctgaaaggcttctgcacaaaagtatccagaattcacttctgggccattccagcgttgaagatgcacgggcaacaatggagctataccagatctctcaaaggattagagcaaggaggggactgccccgtctggccgtgagcgactag

SEQ ID NO: 227066 - DNA, 546 bp, synthetic construct
  misc_feature 1..546: note = Description of Artificial Sequence: Synthetic coding sequence
  source 1..546: mol_type = other DNA
atggcaggatctcgtgaggtggtggcaatggactgcgagatggtggggctgggtccacaccgggaaagtggcctggcaaggtgttcccttgtgaatgttcatggggctgtgctctacgataagttcattcggccagagggggaaattaccgactatcgaacacgggtgagcggtgtcaccccccagcacatggtgggtgcaacacctttcgccgttgctcgcctcgagatactgcaactgttgaagggcaagctagtggtgggccacgaccttaagcatgatttccaggcgttaaaggaagatatgagcggttacactatctatgacacttccacagacagactcctctggcgtgaggccaagctcgaccactgccgcagagtaagtctcagggtgttaagcgagaggcttctacataaatctatccaaaattcactactggggcactcgagcgtggaggacgctcgtgctaccatggagttgtaccaaattagccagcggatacgggctcggagaggactgccacgtcttgccgtgtctgactag

SEQ ID NO: 227067 - DNA, 1062 bp, synthetic construct
  misc_feature 1..1062: note = Description of Artificial Sequence: Synthetic coding sequence
  source 1..1062: mol_type = other DNA
atgagcaccctactgctgaatctggacttcggcgagccgccacccaaaaaagcactggaggggaacgcgaagcaccgaaacttcgtaaagaaacgcagattgctggagagacgcggttttttaagcaagaagaaccagcccccatctaaggcacccaaactccactctgagccatctaaaaaaggtgagacacctactgtggatggaacctggaagacccccagcttccccaagaaaaaaactgccgcaagcagcaatggcagcgggcagccacttgataaaaaggcagccgtgtcctggttaacacccgctccatcaaaaaaggccgattctgtcgctgccaaggtggatctgttaggcgagttccagtcagctctccccaaaatcaacagccatcccaccagatcccagaagaagtcctctcaaaaaaaaagctcaaaaaagaaccatccccagaagaacgcaccgcaaaactctacccaggcacattccgagaacaagtgctcaggcgcttcacagaagctaccgagaaagatggttgctatcgactgcgaaatggtcggcacaggcccaaaaggccacgtatccagcttggctcgatgctccattgtcaactataacggcgatgtcctctatgacgagtacattctgccgccatgccacattgttgactatcgcactcggtggtctgggatccgcaagcagcatatggtgaacgctaccccttttaagatcgcccgaggacaaatcttgaaaatactcaccggaaaaatagtagtgggccatgcgatccataacgatttcaaggcactccagtactttcatccaaagagtctcacacgcgatactagtcacattccacctttaaaccgcaaggccgattgccctgaaaacgcaacaatgagcctgaaacatctcacaaagaagctgctgaatcgtgatatccaggtcggcaagagcggacacagctctgttgaagatgctcaggcaacaatggagctgtacaagctcgtagaggtggaatgggaggaacacctagctcgcaacccacctactgattag

SEQ ID NO: 227068 - DNA, 1062 bp, synthetic construct
  misc_feature 1..1062: note = Description of Artificial Sequence: Synthetic coding sequence
  source 1..1062: mol_type = other DNA
atgagcacactgttgctgaaccttgactttggggaacctcccccaaaaaaagcacttgaagggaacgcaaaacaccggaatttcgttaagaaaaggcggctgctggaacgacgcggattcctgtcgaaaaagaatcagccaccttcaaaggccccaaagctgcactctgaaccttcgaaaaagggagaaactcccacagttgacggcacctggaagaccccatccttcccaaagaagaaaaccgcagccagttcaaacggaagcggacagccactggataagaaggctgctgttagctggctgacccctgccccttctaagaaggctgactccgttgctgctaaggtagatctccttggcgagtttcaaagcgctttacccaaaattaacagtcaccccactaggtctcagaaaaaatcatcgcagaaaaaatcaagcaaaaagaaccatccacagaagaacgcaccacagaatagtacccaagcgcactctgagaacaagtgttccggggcatcccagaaacttccccgaaagatggtcgccatagactgcgagatggtaggtacaggccctaaggggcacgtaagctccctcgcacgttgcagcattgtgaattataacggggatgtcctctatgatgagtacatacttccaccctgccacattgttgattacagaacgaggtggagcgggatcaggaaacagcacatggtgaacgccactcccttcaaaatcgctcggggacaaatcctgaagattctgactgggaaaatagtggtgggacacgcgattcacaacgacttcaaggcgctgcagtattttcatcccaaaagcctgactcgggatacctcccatatcccccctctcaatcgcaaagcggactgcccagaaaatgcaacaatgtcactgaagcatctgactaaaaaacttctcaacagggatattcaggtcggcaagtctgggcactctagcgttgaagacgcgcaggcaacaatggaactgtataaactggtggaggtagagtgggaggaacatttggcgcgtaacccacctacagactag

SEQ ID NO: 227069 - DNA, 360 bp, synthetic construct
  misc_feature 1..360: note = Description of Artificial Sequence: Synthetic coding sequence
  source 1..360: mol_type = other DNA
atggaggcctccgctttgacttctagcgctgtgacaagcgtcgctaaggtcgtgcgcgtcgcttctggcagtgctgtggtgctgcctctggctcggattgcaactgtagtcattggaggtgtcgtggccgtccctatggtcctgagtgctatgggattcaccgccgcaggaatcgcaagttcgtctatcgccgcaaaaatgatgtctgccgctgctatagccaacggcggaggggtggccagcggtagtctagtggcgaccctccagagcctgggtgcgaccggactcagtgggctcaccaaattcatcctgggctctattgggagcgctattgccgcagtgatcgctagattctattag

SEQ ID NO: 227070 - DNA, 369 bp, synthetic construct
  misc_feature 1..369: note = Description of Artificial Sequence: Synthetic coding sequence
  source 1..369: mol_type = other DNA
atggaggcaagcgctctcacatcaagtgccgtcacctcagttgcgaaagttgttagagtcgccagcggttccgccgttgtgctgcccttggctaggattgcaaccgtagtgattggaggtggtgagtccgtggttgctgttccaatggtgctcagcgctatgggcttcaccgccgcaggaattgcatctagctccatcgcagcaaagatgatgagcgctgcggcaattgcaaatgggggtggtgtggctagtggatcactagtcgctaccttacagagcttaggcgcaacaggcctaagcgggctcactaagtttattttgggttccataggctccgcaattgcagcggtgatagccaggttttattag

SEQ ID NO: 227071 - DNA, 369 bp, synthetic construct
  misc_feature 1..369: note = Description of Artificial Sequence: Synthetic coding sequence
  source 1..369: mol_type = other DNA
atggaggcctccgccctcactagctcagccgtaaccagcgttgctaaggtcgtgagagtagcatcagggtccgcagtagtactgccactcgctcgcattgcaaccgtggtcatcggaggtgtggcaagcatcgttgctgtgcccatggtgttgtcagctatgggttttacagccgctggtattgcgtcttcctcaatcgcggctaaaatgatgtctgctgccgctatcgccaacgggggtggtgtggcaagcggatcgttggtggccacgctccagagccttggcgcaaccggcctgtcagggctgaccaagtttattctgggctccataggctccgccatcgcagctgtcatcgcaaggttctactag

SEQ ID NO: 227072 - DNA, 189 bp, synthetic construct
  misc_feature 1..189: note = Description of Artificial Sequence: Synthetic coding sequence
  source 1..189: mol_type = other DNA
atggaagcttcagcattgacctcctccgctgttaccagtgttgctaaggttgtccgcgtggcatccgggtccgctgtcgtgctgcctctggctagaatagcaactgtagtgatcggtggggtggtagccgttcccatggtcctgtctgccatgggtttcacagctgcgggtatcgcttctagctcctag

SEQ ID NO: 227073 - DNA, 174 bp, synthetic construct
  misc_feature 1..174: note = Description of Artificial Sequence: Synthetic coding sequence
  source 1..174: mol_type = other DNA
atggaagccagcgcgctcacttctagcgccgttacctcagtggctaaggtggtgcgagttgcttctgggtccgccgtcgtcctgccactagctagaatcgctaccgtggtaatcggtggcgtggtggctgtcccaatggtgctctccgccatggggttcactgccgcagggtag

SEQ ID NO: 227074 - DNA, 360 bp, synthetic construct
  misc_feature 1..360: note = Description of Artificial Sequence: Synthetic coding sequence
  source 1..360: mol_type = other DNA
atggaagcaagcgccttaacctcttcagcagtgacctctgtggccaaggtggtgagagttgccagtggctccgctgtggtgcttccccttgccaggatcgctaccgtagtcattggtggggtggtcgccgttccaatggtgcttagcgctatggggttcacagcagcaggaattgctagttccagcatagcagcgaaaatgatgagtgcagcagcaatagcgaatggtggcggtgtcgcctccggatcgctggtcgccacactgcaatctttaggtgccaccggcctttcagggctgactaaatttatcctggggagcatcggctcagccattgcagctgtaatcgccaggttttactag

SEQ ID NO: 227075 - DNA, 123 bp, synthetic construct
  misc_feature 1..123: note = Description of Artificial Sequence: Synthetic coding sequence
  source 1..123: mol_type = other DNA
atggaggcgtctgcactgacaagctctgctgttacctccgtggcaaaagtggtgagggtggcaagcggatcagcggtggtgctgccgttggctcgaatcgcaacagtcgtcattggaggctag

SEQ ID NO: 227076 - DNA, 282 bp, synthetic construct
  misc_feature 1..282: note = Description of Artificial Sequence: Synthetic coding sequence
  source 1..282: mol_type = other DNA
atggaagcctctgccttgacaagctcggctgtgacttctgtggccaaggtggtgcgagtagcttccggcagcgctgtggtactgcctctggccaggatagctaccgtggtgatagggggagtcgtggctgtgcctatggtgcttagtgctatggggttcaccgccgcaggaatcgccagcagtagcattgccgctaagatgatgagcgcagctgccatagcgaatggcggaggagtggcctcaggttctttagtggccacactgcagtcacttggagcctag

SEQ ID NO: 227077 - DNA, 2358 bp, synthetic construct
  misc_feature 1..2358: note = Description of Artificial Sequence: Synthetic coding sequence
  source 1..2358: mol_type = other DNA
atggggaaaaaatacaagaatattgttctcctcaaaggcctagaggtgattaacgactaccatttcagaatggtgaagtccctcctgtctaacgacttgaaactgaatctgaagatgagggaagagtatgataagatacaaatcgctgatctgatggaagaaaagttccgcggagatgctggcttaggaaagctcatcaagatttttgaagatatcccaacactggaggacctggctgagaccctcaaaaaagagaaattaaaggtcaaaggcccagctctctctcggaagagaaagaaagaagttgacgccactagccccgcaccctccacctccagcactgtgaagacggaaggggcagaagctacgccaggggcacagaagagaaaaaagtccactaaagaaaaggcgggtcccaagggaagcaaagtttctgaagagcagactcagcccccatcacccgctggtgccggaatgagcaccgccatgggcagatctccgtcccccaaaacctccctttctgccccaccaaattcatcatcgaccgagaatcctaaaaccgtggctaagtgccaggtcactcctcggcgtaatgtattgcagaaaaggcccgtgatcgtcaaggtgttatctaccacaaaaccctttgagtacgaaactcccgagatggagaagaaaatcatgttccacgcaacagtggcgacccagactcagttttttcacgtaaaagttctgaatacatcgctcaaggaaaagttcaacggcaaaaagattatcattatctcagattacctggagtacgattccctccttgaagttaatgaggagagcacagtctctgaggccggacctaatcagacttttgaggttccaaacaaaattattaaccgcgctaaggaaaccttgaaaattgatatcctccacaagcaagcctctggcaatattgtgtacggcgtgtttatgttgcacaaaaagaccgtaaatcaaaaaacaaccatatacgagatccaagacgacagaggtaagatggatgtagtcgggaccgggcaatgccacaacattccctgtgaggagggcgacaagttgcagttgttctgtttcagacttagaaagaaaaaccagatgtccaagctcatctccgagatgcactcttttatccagatcaagaagaagacaaatccaagaaataatgatcctaagagcatgaagcttccacaggagcaacgccagctgccctacccatctgaggcttccactaccttcccagagagccatttgcggacccctcaaatgccccctactacccccagttcttcctttttcaccaaaaaatccgaggacacaatttcgaaaatgaatgacttcatgagaatgcaaatcctaaaagaggggtctcatttccccggacccttcatgacaagcatcgggccagctgaatcgcacccccatactcctcagatgcccccatcgaccccctcaagctcatttctgacgaccaagagcgaagacaccatctccaaaatgaacgatttcatgcggatgcaaatcctaaaggaaggcagccactttccgggtcctttcatgactagcattggacctgcagagtctcatccacatactcctcaaatgcctcccagcacaccatcctccagtttcctgaccaccctgaaaccgagactcaagactgaaccggaagaggtgtcaattgaggactcggctcaatcggatcttaaagaggtgatggtgctgaatgccactgagagcttcgtgtacgaacccaaagagcagaagaagatgtttcacgctacggtggccacagagaacgaggtgtttcgggttaaggtcttcaacatcgatctcaaagagaagttcacacctaaaaaaatcatcgccattgcaaactatgtctgccggaacggctttctggaggtttacccctttacgctggtggcagacgtcaacgctgaccgcaacatggaaattcctaagggccttatcagatctgcctccgtgactcctaagatcaatcagctgtgtagccaaactaagggaagtttcgtgaatggcgtcttcgaagtgcacaaaaagaacgtgagaggtgagttcacttattacgagattcaagataacaccgggaagatggaggtggtagtacatggtcgactcacaacaataaactgcgaagagggggacaagctcaagcttacatgcttcgaactcgctcccaagtctggcaatacaggagagctgcgttctgtcattcacagccatataaaagttattaagacacgaaagaacaaaaaggatattttaaatcctgattcatccatggaaactagccctgactttttcttctag

SEQ ID NO: 227078 - DNA, 2022 bp, synthetic construct
  misc_feature 1..2022: note = Description of Artificial Sequence: Synthetic coding sequence
  source 1..2022: mol_type = other DNA
atgggaaagaagtacaaaaacattgtgctcctgaagggactggaggtcatcaatgattaccactttaggatggtcaagtctctcctgtccaacgatctgaagttgaatctgaagatgagggaagagtatgataaaatccagatcgcagatctgatggaagaaaaattcagaggggacgccggtctggggaagcttattaagattttcgaggacatcccgaccctcgaggacctggctgaaactcttaagaaagaaaagctgaaagttaagggtcctgccctgtcacgcaaaaggaaaaaggaagtcgacgctacaagcccggcaccatccacatctagtacagtaaagactgaaggggctgaagccacacctggcgctcagaaaaggaaaaagtctacaaaggagaaagccggaccgaagggaagcaaagtatccgaagagcagacccagccacctagtcccgctggagcaggcatgagcacggccatggggaggtctccctcccctaagacctccctcagcgctccaccgaattcctcgagcacagagaaccctaagacagttgctaagtgtcaagtcacccctaggcgcaacgtattacagaagcgtcccgttattgtaaaggtgctctctacgacaaagccgttcgagtatgagaccccagagatggaaaagaaaattatgttccatgcaaccgtggctacccagacgcaatttttccacgtcaaggtcctgaacacctccctcaaggaaaaattcaatggaaagaagatcattattatctccgattatctggaatatgatagcctcctcgaagtgaatgaagagagcactgttagtgaagcaggtcctaatcagacgttcgaagtaccaaacaagatcataaatagagccaaggagacattgaaaattgacattctgcacaaacaggctagcggtaacatagtatacggagtgttcatgcttcacaaaaagacggtgaatcagaagaccaccatctacgaaattcaggatgacaggggcaagatggatgtggtgggcacagggcagtgtcataacatcccctgtgaagagggagacaagctccagctgttctgtttcaggctgcgcaaaaaaaatcagatgtcaaaactgatcagtgaaatgcacagctttatccagattaagaagaaaaccaacccccgtaacaacgatccgaagtctatgaagcttcctcaagagcagagacaactcccataccccagtgaggcgtcaaccacgttccccgaatcccacttgcgcactccacagatgccccctacaacacctagttcctcattcttcacgaaactgaaaccaaggttaaagacagagcccgaagaagtgtccatcgaggactctgcacagtccgacttgaaggaggtgatggtcctcaacgccactgaatcattcgtatacgaacctaaggagcaaaaaaaaatgtttcatgccaccgttgccacggagaatgaggtgttccgcgtcaaggtgttcaacattgatctgaaagagaagttcacacccaaaaaaattatagctatcgctaactatgtctgcagaaacggattcctggaggtgtacccatttacccttgtagcagacgtgaacgccgacagaaatatggagattccgaaaggacttatcagatcggcatcagtgacgcctaagatcaatcagctgtgttctcaaacaaagggaagttttgtgaacggagtctttgaggtccataagaaaaacgtgcgcggagagtttacctattacgagatccaggacaacaccggcaagatggaggtcgtggttcacgggaggcttaccaccataaactgcgaggagggagacaagctaaagctcacatgcttcgagctcgcaccaaaatctggaaacacgggagaactcaggtctgttatccactctcatattaaagtgattaaaacacgcaagaacaagaaggacatcctgaacccagatagtagtatggagacctcccccgacttctttttctag

SEQ ID NO: 227079 - DNA, 1245 bp, synthetic construct
  misc_feature 1..1245: note = Description of Artificial Sequence: Synthetic coding sequence
  source 1..1245: mol_type = other DNA
atgggcaagaagtataaaaatatcgtgctgttgaaagggctggaagtgatcaatgactatcatttccgaatggtgaaatctcttttgtcaaatgacctgaaactgaacctgaagatgcgcgaggaatatgataaaattcagattgccgacttaatggaagaaaagttccggggtgacgcagggctcgggaaattaataaaaatctttgaggatattcccactctcgaggacctggccgaaacattgaagaaggaaaagttaaaagttaaggggccagccctgagccggaaacgtaaaaaagaagtggatgctactagtcctgccccatctacatcttccaccgtcaaaactgagggagctgaggctacccccggtgcccagaagcggaaaaagtctacaaaagaaaaggctggtcctaagggcagcaaggtgtctgaggaacaaactcagccaccgtctccagcaggtgcgggtatgtctacagccatgggccgaagtccctccccgaagacaagtctctctgctccccctaactctagcagtactgagaacccaaagacagtcgctaagtgtcaggtaacccctagacgaaatgtgctgcaaaagagacctgttatcgtaaaagtactatcgactacaaaaccctttgagtacgagactccggaaatggagaaaaagattatgttccacgctacagtcgccacccagacccagttttttcacgtgaaggttctcaacacatcattaaaggaaaagttcaccccgaagaagatcattgccatcgcaaattacgtgtgccgcaatgggtttttagaagtgtatccattcacactggtggccgatgtcaacgccgatcggaacatggaaatccccaagggactgattaggagcgccagcgtgacgcctaaaatcaatcagctctgttctcagactaagggaagcttcgttaatggcgtctttgaggtgcataaaaagaatgtgagaggggagtttacgtattacgagattcaagacaatactgggaagatggaggtagttgtccacgggcgactcactaccattaattgcgaagagggagataagcttaagctgacttgcttcgagctggccccaaagagcggcaacaccggggaattacggagtgtcatccactctcacattaaagtaatcaagacccgcaagaacaaaaaggacatacttaatcccgactcttctatggaaacgtcaccagacttcttcttttag

SEQ ID NO: 227080 - DNA, 2190 bp, synthetic construct
  misc_feature 1..2190: note = Description of Artificial Sequence: Synthetic coding sequence
  source 1..2190: mol_type = other DNA
atgggcaagaagtacaagaacatcgtgttactgaagggacttgaggtaatcaacgactaccattttagaatggttaaatcgctgctgtcaaacgatttgaaactgaacctgaagatgcgcgaggagtacgataagatccagattgctgacctgatggaggaaaagtttcggggtgatgctggcttgggtaagctgatcaaaatatttgaggacataccgacacttgaggacctcgctgagacactgaagaaggaaaagctcaaggtgaagggacctgcacttagtaggaaaagaaagaaagaagtggatgctacatcacccgctccatcaacatcttcaactgtgaaaactgagggggctgaagcgacccccggagcgcagaagaggaagaagagcacaaaagagaaagcgggacctaagggttccaaggtttcagaggagcagacccaacccccaagtcctgcaggcgcagggatgtccaccgctatggggaggagccccagccctaaaacctcactgtctgctccccctaacagctccagtaccgagaacccaaagaccgtagctaagtgccaggtgaccccacgcagaaatgtactccagaagcggcctgttattgtgaaagtgctgtccacgacaaagccgtttgaatacgagactcccgaaatggagaagaagattatgtttcatgctaccgtcgccacccagacacaattctttcacgtgaaggtattgaacacctccctgaaggaaaaatttaatggaaagaagattatcatcatctccgattaccttgaatacgacagtctcttggaagtaaatgaagagtcaactgtctccgaagccggtcccaatcagacgtttgaagtcccaaacaagattatcaatcgtgcgaaggaaaccctgaagatcgacatcctccataaacaagcatccgggaacatcgtgtacggagtcttcatgctccacaaaaagacagtgaatcaaaagaccacgatctatgagatacaagacgacagggggaaaatggacgtggtgggaactgggcaatgccataacattccttgtgaagagggggataagctgcagttgttttgcttcaggctacgcaaaaagaaccagatgtcaaagctgatctcagagatgcactctttcatccagataaaaaaaaaaaccaaccccaggaacaatgacccaaagtctatgaaactgccacaggagcagcgccagttgccttatcccagtgaagcaagcactacctttccagagagccacctgaggaccccccagatgcccccaacaacgccatcatcatccttttttactaaaaagtcggaggacacgatctcaaaaatgaatgacttcatgagaatgcaaatcctcaaagagggatctcacttcccgggacctttcatgacctccatcggccctgctgagtcgcacccacacaccccgcagatgcccccttcaacgcctagcagcagctttctgaccactctgaaaccccgtctgaaaaccgagcctgaggaggtatccatcgaggactcggcccaatctgatcttaaagaggttatggtgctcaacgctaccgaatcatttgtctacgaacctaaagagcaaaaaaagatgtttcacgcaacagtagcgacggagaacgaagtgttccgagttaaggtgtttaacatagatctgaaggagaagtttacaccgaaaaaaatcatcgcgattgctaactatgtatgcagaaacggctttctggaagtatacccatttaccctggtggccgacgtaaacgcggataggaatatggagatacctaaaggcctcatccgaagcgcttcagtcacacctaaaataaaccaactctgctctcagaccaagggaagctttgtcaatggtgtgtttgaggtgcacaagaaaaacgttcggggtgaattcacttattacgagatccaggataacaccgggaaaatggaggtcgtcgtgcatgggcgactgaccactattaattgcgaggaaggtgacaagctgaaattgacctgttttgagctagcaccaaaaagcggtaacactggcgagttgcggagcgtcatacatagtcacattaaagtcatcaagaccaggaagaacaaaaaggatattctgaatcccgacagctccatggaaacttctccagactttttcttctag

SEQ ID NO: 227081 - DNA, 2190 bp, synthetic construct
  misc_feature 1..2190: note = Description of Artificial Sequence: Synthetic coding sequence
  source 1..2190: mol_type = other DNA
atgggcaagaaatacaaaaacatcgtgctcctgaaggggctggaagtcatcaatgactaccactttcgaatggtgaaatcccttctgagtaatgaccttaaattgaacctgaaaatgcgggaggaatacgataagatccagattgccgatctgatggaagagaagttccggggtgacgccggactggggaaactcatcaaaatctttgaagacattccaactcttgaggacctggccgagacattgaagaaggagaaattgaaagtgaaaggcccagccctgagtagaaagagaaaaaaggaggttgacgcgacgtcaccggcaccctcaactagctcgacagtgaagacagaaggtgcagaagcgaccccgggagcacaaaaacggaagaaaagtactaaagaaaaggccggaccaaaaggttcgaaggtgagcgaagagcaaacccagcccccatctccagccggagcgggaatgagcactgccatggggcgatcaccttcacctaaaactagtctgtcagcacctcctaatagctcttcaacagagaacccaaagacggtggcaaaatgtcaagtgacccccagaagaaacgtgttacaaaagcgcccagtgattgttaaggtactctccaccactaagcctttcgagtatgagactcccgaaatggagaaaaaaatcatgttccatgccactgtcgctactcagacacagtttttccacgtaaaggtgctgaatactagcctgaaagaaaaatttaatggcaaaaagattatcattattagtgactatcttgaatatgacagtctgctcgaggtgaacgaagaatcaactgtttccgaagccggacccaatcagacttttgaagttccaaataaaattataaatcgcgctaaagagacactcaaaattgatattctgcacaaacaggcctctggcaatatcgtttatggcgtgttcatgctccacaagaagaccgtgaaccagaagactaccatctatgagatccaggatgataggggcaagatggacgttgttggaacaggacagtgtcataatataccctgcgaggagggcgacaaactccagctgttctgcttcaggctgaggaaaaagaatcaaatgtcaaagttgatcagcgagatgcattcatttatccaaattaaaaaaaaaacgaaccctaggaataatgaccccaagtccatgaaactcccccaggagcagcgacaactgccttatcctagtgaggcatctaccacttttcctgagtcccatctgcgaactccccaaatgcctcctacgacccctagcagctcattcttcacaaagaaaagcgaggacacgataagcaagatgaatgactttatgcgcatgcagatcctcaaggagggcagtcatttccctggcccttttatgacaagtatcgggccagctgagtcacatcctcatactccacaaatgcctccctccactccctcatcaagctttttaacgactttaaagccaagattaaaaaccgaaccggaggaggtgtctattgaggacagcgcccagtcagacctgaaggaagtgatggtgctgaacgccacagaaagttttgtttatgaacccaaagagcagaagaagatgttccatgccacggtagccaccgaaaacgaggtcttcagagtcaaggtcttcaacatcgatctgaaggagaaatttacccctaaaaagattatagccattgccaactacgtgtgtcgtaatggctttcttgaggtctacccattcaccctagttgcagacgtcaatgcagaccggaacatggagatccctaagggcttgattagaagtgcctcggtcacgcctaagatcaaccagctttgctctcaaacaaaaggcagttttgtgaatggcgtctttgaggtgcataagaagaacgtaaggggcgagttcacctattatgagattcaagacaacacaggcaaaatggaggttgtggtgcacgggaggctaaccacaatcaactgtgaagaaggagataagctcaaactgacttgctttgagcttgccccaaagagtggcaacaccggcgaacttaggtctgtgattcattcacacattaaagttattaagactcggaaaaacaagaaggatattctaaatcccgacagctcgatggagacgtccccggatttctttttttag

SEQ ID NO: 227082 - DNA, 384 bp, synthetic construct
  misc_feature 1..384: note = Description of Artificial Sequence: Synthetic coding sequence
  source 1..384: mol_type = other DNA
atgggcaagaagtacaaaaacattgtgctcttaaagggacttgaagtcatcaacgactatcatttccggatggtgaagagtctccttagcaacgacctgaagctgaatctgaagatgcgggaggagtacgataaaattcagatcgccgatttaatggaggaaaaatttaggggagacgccggtctgggcaagttgattaagattttcgaagacatcccgacattagaggacctggccgagacactgaagaaggagaaacttaaagttaaaggtcctgcgctgtccagaaagcgtaagaaagaagtggacgcaactagtccagcgccaagcacctcatccaccgtgaagactgagggtgccgaagcgacaccgggagctcagtag

SEQ ID NO: 227083 - DNA, 2202 bp, synthetic construct
  misc_feature 1..2202: note = Description of Artificial Sequence: Synthetic coding sequence
  source 1..2202: mol_type = other DNA
atgtccgtgaagatgggcaaaaagtataagaacatagttctgctgaagggtctggaggtgatcaacgattatcatttcaggatggtcaaaagccttctttctaatgacctgaaactcaaccttaagatgagggaggagtatgataaaatccagattgcagacctgatggaggagaaattcagaggcgacgccggactcgggaagctaattaagattttcgaagatatccccaccttggaggacctggcagaaactttgaagaaggaaaagctgaaagttaaaggtcccgctttaagtagaaagcgcaagaaagaagtagacgctacaagtccagcccctagtaccagctcaacggtaaagactgagggcgctgaggctactcccggtgcccagaacccgaaaaccgtcgctaagtgtcaggtgacacctcgcaggaacgtgctccaaaaacgtcccgtgatagtgaaggtgctctcaacgaccaaacctttcgagtatgagaccccagagatggaaaaaaagataatgtttcatgccacagtggctactcagactcagttctttcatgtgaaggtcctcaatacaagtcttaaagaaaagttcaatggcaagaaaattatcattatatcagactatctcgagtacgactcattgctcgaagtgaatgaagagtcgaccgtgtcagaagccggaccaaatcagaccttcgaggtgcctaataaaatcattaatcgggcaaaagagactctaaaaattgatatcctgcataagcaggcatctgggaatatcgtttatggagtctttatgctgcacaaaaaaactgttaaccagaagaccacaatttatgaaatccaggatgatcgcggaaagatggacgtcgtgggcaccgggcagtgccacaatatcccctgcgaagagggcgataagctacagttgttctgtttccgcttgaggaaaaaaaatcagatgtctaagctgatttcagagatgcatagttttattcagatcaagaaaaagaccaaccccagaaataatgatccaaaaagcatgaagctgcctcaggaacagagacagctcccctacccatccgaggcatccactacctttccggagagtcatctccgcactccccagatgccgcctaccacaccatccagctcgtttttcaccaagaagagcgaggatacgatctccaaaatgaacgactttatgagaatgcagatcctgaaagaggggtcccactttcctggccctttcatgacaagcataggccctgcagaaagccatccacatactcctcagatgccaccatctacaccctcgtccagcttcctcaccaccaagtctgaggatacaatatctaaaatgaacgactttatgaggatgcagattctgaaggagggctcccacttcccaggaccgttcatgacttccattgggccagcagagagccacccacacactcctcagatgccccctagcacccccagctccagctttttgaccacccttaagcccaggttgaagacagaaccagaggaagtaagcattgaggacagtgcacagtcggatctgaaagaagtgatggtcttgaatgccaccgagtcttttgtgtatgaacctaaggagcaaaagaagatgttccatgccaccgtggcgaccgagaacgaggtcttcagagtgaaagtttttaatatcgatctgaaagagaagttcacccctaagaaaattatcgccatcgcaaactacgtctgtcggaatggctttctcgaggtctacccatttaccctcgttgccgacgttaatgccgacagaaacatggagattccaaaggggctgattcgtagcgcgtctgtgaccccaaaaataaaccagctgtgtagccagactaagggatcctttgttaatggcgtttttgaggtacataagaagaacgtgcgcggagaatttacatactacgagattcaagacaatacagggaagatggaagtggtggtccatgggaggctaacaaccataaactgcgaggagggagataaactgaagctgacctgtttcgagctcgctccaaaatctggcaataccggggagctccggagtgttattcacagccacatcaaggtgatcaagacacgcaaaaataaaaaggatattctcaaccccgattcctctatggagacttctcctgacttctttttctag

SEQ ID NO: 227084 - DNA, 543 bp, synthetic construct
  misc_feature 1..543: note = Description of Artificial Sequence: Synthetic coding sequence
  source 1..543: mol_type = other DNA
atgggcaagaagtataagaatatcgtgctactgaagggtctggaggtcatcaatgactatcactttcgcatggtcaaatcacttttgtcgaatgacctgaagctgaatttgaaaatgcgcgaggagtacgataagatacagattgccgacctgatggaggaaaaattcagaggcgatgcagggcttggcaagctgatcaagatctttgaagatatccccacacttgaggatttagccgaaacactaaagaaagaaaagttaaaagtgaaaggcccagccctatcacgtaagagaaagaaggaggtggacgctactagtcctgcccctagcacaagctccactgtgaagactgagggagcagaggctacccctggcgctcagaagcggaaaaaaagtactaaagaaaaagctgggcctaaaggctccaaggtgtccgaagaacagacccagccaccttcacccgcaggggcaggcatgtccacggcaatgggcagatccccttctccaaaaacatcactgtcagctcccccaaatagcagctag

SEQ ID NO: 227085 - DNA, 1485 bp, synthetic construct
  misc_feature 1..1485: note = Description of Artificial Sequence: Synthetic coding sequence
  source 1..1485: mol_type = other DNA
taaagcaccgagaatccaaagaccgtcgcaaaatgtcaggtcacccctagacgcaacgtcctgcagaaacgtcctgttatcgtcaaggtgctctcaacaaccaagccgttcgagtatgaaactccggagatggaaaaaaaaataatgttccacgcgacagtagccactcagacccagttttttcacgtgaaggtgctcaatactagcctgaaagagaagtttaacgggaagaaaataattatcatctcagactatttggaatacgactcactgcttgaggtgaacgaggagtcgaccgtcagcgaggcagggcctaatcagacttttgaggttcccaacaaaatcataaaccgtgcgaaggagacacttaagatcgatatcctgcacaaacaagcaagtggaaacatcgtctatggcgtgtttatgctgcacaagaaaaccgttaaccagaagaccactatctatgagatccaggacgatcggggaaagatggacgtggtagggacagggcagtgccacaacattccatgcgaggagggggacaagcttcagttgttctgctttcgactgagaaagaagaatcagatgtctaagcttattagtgagatgcactccttcatccagattaagaagaaaaccaaccccaggaataacgaccctaagtctatgaagctgccacaagaacagaggcaactgccctatccttctgaggcttcaactactttcccggaaagtcacttgagaacccctcagatgcccccaaccactccctcatcaagtttttttacaaagctcaaaccaagactcaaaactgaacctgaagaggtcagcatcgaagacagcgcccagagcgatctcaaagaggtgatggtgctaaatgccaccgagagctttgtgtatgagcccaaggagcagaaaaagatgttccatgccacggtggctaccgagaatgaggttttcagggttaaagttttcaacatcgatctgaaggagaaatttacccctaaaaagatcattgcaattgcgaattacgtctgccgcaatggattcctggaggtgtacccattcaccctcgtggcggacgtgaatgctgacagaaacatggaaatccccaaaggcctcattcggagcgcctctgtcacacctaagatcaaccagttgtgttcacagacaaagggcagtttcgtcaatggagtattcgaagttcataaaaaaaatgttaggggcgaattcacttactatgagatccaagacaacacgggtaaaatggaggttgttgttcatgggagattgacaacgatcaattgcgaggagggggataaattaaagctcacatgcttcgaactggctcctaagagtgggaacaccggcgaacttaggtccgtgattcattctcatattaaagttatcaaaacccggaaaaacaagaaggatatcctgaatccagacagcagtatggagacatctcccgacttcttcttctag

SEQ ID NO: 227086 - DNA, 753 bp, synthetic construct
  misc_feature 1..753: note = Description of Artificial Sequence: Synthetic coding sequence
  source 1..753: mol_type = other DNA
atgacgctttccccactcctcctttttttgccaccacttctgttgctgctggacgtgcctaccgccgctgtccaggcctcacccctgcaggcactggacttctttggcaatggtcctcctgtcaactataagaccgggaatctatacctgaggggacctcttaagaaatctaatgcaccacttgtgaacgtgaccctgtactatgaagccttgtgcggcggatgcagggcatttctaattcgggaattgttcccgacatggctgcttgtgatggaaatcctcaacgtgaccctggtgccttacgggaatgctcaagagcagaacgtctctgggcgatgggagttcaagtgccagcacggcgaggaggagtgcaagtttaataaggtggaggcttgcgtattggacgaactggacatggagctggccttcctgactatagtgtgcatggaagagttcgaagacatggagcgctccctgcccttatgtttgcagttgtatgccccaggattatctccggatacaattatggagtgcgccatgggcgaccggggtatgcaacttatgcacgctaacgcacagcgtacagatgcactgcaaccaccccatgagtacgtgccttgggtcaccgtcaatgggaagccgctggaagaccagacacaactcctgacccttgtgtgccagctttaccagggaaagaagcccgacgtgtgtccttcgagcacgagctctctgagaagtgtctgcttcaaatag

SEQ ID NO: 227087 - DNA, 588 bp, synthetic construct
  misc_feature 1..588: note = Description of Artificial Sequence: Synthetic coding sequence
  source 1..588: mol_type = other DNA
atggcacttttgttcccactcctcgccgctctggtgatgacctcttacagccctgttggaagccttggctgcgatctaccacagaaccatggattactctctcgtaatacactggtcctccttcaccagatgcgccgaatcagtcctttcttgtgcctgaaggatcgtcgggatttccgctttccccaggagatggttaaaggcagtcagctgcaaaaagcacacgtgatgtcagttctccacgagatgctgcagcagatcttctccttgtttcacacagagcgaagctctgccgcttggaacatgacactgctagaccagttgcataccgggttacaccaacagttacagcacctggagacctgcctactccaggtggtgggcgaaggtgaaagtgccggagcaattagttctcccgcattgacactcagacgatactttcagggcatcagagtctatctgaaggaaaagaaatattctgattgtgcgtgggaggtcgtgcggatggagattatgaagtcactgttcttatccacaaacatgcaggaacggcttagatcgaaagaccgcgatttaggctcgtcttag

SEQ ID NO: 227088 - DNA, 861 bp, synthetic construct
  misc_feature 1..861: note = Description of Artificial Sequence: Synthetic coding sequence
  source 1..861: mol_type = other DNA
atgtccgctcccctcgacgctgccctacacgcactccaggaagaacaggctcgcctgaaaatgagactctgggacctccagcaactcaggaaagaattgggggactctccgaaagacaaagtgcctttttcggtgcctaagatcccactggtcttccggggacacacgcagcaggatcctgaggttcccaagtccctggtcagcaatctccggatccactgtcccctcctggcaggcagcgccttgattacctttgatgatccaaaggtagctgaacaagtgctgcagcaaaaagaacacacaatcaatatggaagagtgtaggctccgggttcaggtgcagccactcgaactgcccatggtcacaacaatccaaatgtcctcccaactttcgggccgacgtgtactggtcacaggattcccagcgagcctgcggctgagcgaggaggagttgttggacaagctggaaatcttttttggaaagaccagaaacggaggcggagacgtggatgtgagggagctcctgccaggaagcgtgatgctggggtttgccagagatggtgtcgctcagcgcttgtgccagatcggtcagttcacagtcccacttggcggacagcaggtgcccctgagggttagtccctatgtgaatggcgagatccagaaggctgaaattaggagccaacccgtaccaaggagcgttctcgtgctgaacatcccagacattctggacggccctgagctccatgatgtcctggaaatccactttcaaaaacccacacgcggtggaggcgaagtagaggctttgaccgtggtacctcagggccagcaaggcttagccgtgtttaccagcgaatctggctag

SEQ ID NO: 227089 - DNA, 867 bp, synthetic construct
  misc_feature 1..867: note = Description of Artificial Sequence: Synthetic coding sequence
  source 1..867: mol_type = other DNA
atgtctgcccctctggacgctgccttgcacgccttgcaggaggagcaggcccgactcaagatgagactgtgggatcttcagcagctgcgaaaggaacttggggattctcccaaggacaaggtacctttcagcgttcccaagataccactggtgtttagggggcatacgcagcaggatccagaagtgccaaaatctctcgtcagcaaccttcggatccattgcccgctgctcgctggctcagccctcatcacgttcgacgaccctaaagtggccgagcaggtgctgcagcagaaagagcacacaattaacatggaagagtgtaggctacgagtccaggtgcaaccactggaactgcccatggtcactacgattcaagtcatgatgtctagtcagctctcgggacggagggtgctggtgactggctttcctgcgtccctgaggctgagcgaagaagagctgctcgacaaacttgagatcttctttgggaaaacccgtaacgggggaggagatgtggacgtgcgggagctgctccctggttctgtaatgttagggttcgctagggacggtgtcgcccaaagactgtgccaaattgggcagtttacggtgccactcgggggacagcaagtgccgctgcgagtgtcaccctacgtgaatggtgaaattcagaaggccgagatccggtctcaacctgtgcccaggagcgtgctagtgctgaatattcccgacattttggacggcccagagttacacgacgtgttggagattcatttccagaaacctacacgtgggggaggcgaggtcgaggctttgacagtcgtcccccaaggccagcagggcttagcggtgttcacaagcgagtctggttag

SEQ ID NO: 227090 - DNA, 1335 bp, synthetic construct
  misc_feature 1..1335: note = Description of Artificial Sequence: Synthetic coding sequence
  source 1..1335: mol_type = other DNA
atggccgtgacaaccagactgacctggctgcacgagaagatcctacagaatcatttcggaggtaagaggctcagtctgctgtataaggggagcgtccacggattcagaaatggggtcctcctcgatagatgttgtaatcaaggacccacgctcactgtgatatattccgaggaccacataatcggggcatatgctgaggagtcttaccaagaaggtaagtatgcgagtatcatccttttcgcccttcaagatactaaaatctccgagtggaagctggggttgtgcacacccgagactctattctgctgtgacgtgaccaaatataactcacccacaaactttcagattgatggacgaaataggaaagtaatcatggaccttaagacaatggagaaccttggtctcgcgcagaactgtacaatctcaattcaggattatgaagtctttcgatgcgaagatagcttagacgagagaaaaatcaaaggggtcatcgaactgcggaagtctctcttatccgcgctccgcacctacgaaccctatggaagtctcgtccagcagatcagaatcctgctcctcggtccaattggcgcaggcaaaagctccttcttcaactccgttaggtcggtttttcagggccatgtgacccatcaggcattggtgggcaccaacaccactggaatctcggagaaatacagaacatacagcatcagggacggtaaagatgggaagtatttgccatttatcctgtgcgacagtctcgggcttagcgagaaggaaggagggctctgtagggacgacatcttctacatcctgaacgggaacatccgggatcgataccagttcaatcccatggaaagcatcaaattgaaccaccacgattatattgacagccccagcctgaaagaccgcattcattgtgtcgcctttgtgtttgacgcctcttctatacagtatttttcctcacagatgatcgtgaaaatcaagaggattcgcagggaattagtaaacgccggtgtggttcacgtggctctacttacccatgtggactctatggacctgattaccaaaggagacctgatcgagatcgagcgctgcgagcccgtgagaagtaagctggaggaagtgcagcgaaagttgggtttcgccctctctgacatatctgtcgtaagcaactatagcagtgaatgggagcttgatccggtaaaagatgtcctcatcctgtctgccctaagacggatgctgtgggccgcagacgacttcttggaagacctgccatttgagcagattggaaatcttcgcgaggaaatcattaactgtgcacaggggaagaaatag

SEQ ID NO: 227091 - DNA, 588 bp, synthetic construct
  misc_feature 1..588: note = Description of Artificial Sequence: Synthetic coding sequence
  source 1..588: mol_type = other DNA
atggatcttaaaacgatggaaaatctgggcctggcccaaaactgcactatctcgatacaagattatgaggtgttccgctgtgaggattctttggacgagaggaaaataaaaggtgtgattgagctccgtaagtcgctgctaagtgcccttaggacctacgaaccctacggatccctggtccagcagatcaggattctattactgggcccaataggggctggcaagtcctcattcttcaattccgtgcgaagcgtatttcagggtcatgtgactcaccaggctctggtaggcacaaacacgaccgggatcagcgaaaagtaccgaacgtatagcatccgtgacgggaaggacgggaagtaccttccttttattctctgtgactccttgggactgtcagagaaggaagggggtctctgtcgggatgacatcttctacatcctgaacggcaatattcgtgatcgctaccaattcaaccctatggagtctatcaagttaaatcaccatgactacattgacagcccctcactgaaagaccgcatccattgcgtggctttcgtgtttgacgctagcagtatacagtacttctag

SEQ ID NO: 227092 - DNA, 231 bp, synthetic construct
  misc_feature 1..231: note = Description of Artificial Sequence: Synthetic coding sequence
  source 1..231: mol_type = other DNA
taactcagtgatatttccgtggtctctaactactctagcgaatgggagctggatcctgtcaaagatgtacttatcctctccgcactgcggagaatgctgtgggcagccgatgattttctggaggacctgccctttgaacagattgggcgttggttcggcggtgtggaggcctggaaacgttctggcaatctaagagaggaaattatcaattgcgcccaggggaagaagtag

SEQ ID NO: 227093 - DNA, 390 bp, synthetic construct
  misc_feature 1..390: note = Description of Artificial Sequence: Synthetic coding sequence
  source 1..390: mol_type = other DNA
atggaatctatcaagctgaaccaccatgactacattgactcccctagtctgaaggaccgaatacattgtgttgcgtttgtctttgacgctagctctatccagtactttagttctcagatgatcgttaaaatcaagagaataaggcgcgagcttgtaaatgcaggggtagtgcatgtggcactgctgacacacgttgactccatggatctgataaccaaaggtgatctgattgagattgagagatgtgagcctgtcagatctaaagtcatgaacgatgcccttaggaagcatattttctggggaatgcttctgcaatcccatacatctgtgtataaaaacaaaaacaagcagctgctgggattgcgcaggattactaaattactaaagtag

SEQ ID NO: 227094 - DNA, 585 bp, synthetic construct
  misc_feature 1..585: note = Description of Artificial Sequence: Synthetic coding sequence
  source 1..585: mol_type = other DNA
atgctgtgcgatacaatgggcctcgacggggctgaaggggctggtctgtgcatggatgacattcctcacatactgaaaggatgtatgcctgacaggtaccagtttaactcacgcaagcctatcaccccagagcacagcacattcattacctccccatctctgaaggaccggatccactgcgttgcctatgtgctggatatcaattccatcgacaacctatattcaaaaatgttggcaaaggttaagcaggtgcacaaagaggtgttgaactgcggcattgcttatgtcgccttgttaaccaaggtggacgactgttcagaggtgttgcaggataatttcttgaacatgtcccgctccatgacgagccagagccgggtcatgaacgtccataaaatgttgggtattccgatttcaaacatcctgatggtcgggaattacgccagtgatctcgaattagatccgatgaaggacattctgatcctttcagctttacgccaaatgctccgtgcagctgatgactttttagaagatctgcctctggaggagactggcgcaatcgaacgggcacttcaaccctgcatttag

SEQ ID NO: 227095 - DNA, 1359 bp, synthetic construct
  misc_feature 1..1359: note = Description of Artificial Sequence: Synthetic coding sequence
  source 1..1359: mol_type = other DNA
atggaggtgaccaccagattgacctggaatgacgagaaccaccttagaaagctgctcgggaacgttagcttgagcctactctacaagagttctgttcacgggggatcaatcgaggacatggtggaaaggtgcagccgacaaggatgcaccattaccatggcctacatcgactataatatgattgtcgctttcatgctaggtaattatatcaacttgcatgagagctcgactgaacccaatgatagcctatggttcagcctccagaaaaaaaatgatactacggagattgagactctgctgcttaacactgctcctaaaattatcgatgaacagctcgtgtgtcgcctttcaaaaactgacatcttcatcatttgccgggacaacaaaatctatctagacaaaatgatcacgcgaaatcttaaattaagattctacgggcacagacaatatcttgagtgtgaggtctttcgcgttgaaggaattaaagataacctggacgacatcaagcgcatcattaaggcacgcgaacaccgcaatcgacttcttgccgatatcagagactatagaccatatgcagacctggtgtcggagattaggatcctgctagtcggccctgttggatctggtaaatcctccttttttaattcagttaaaagtatattccatggccacgtgacaggccaagcagtggtaggcagcgatattactagtatcactgagagatatagaatatattctgtgaaagacggcaagaatggaaagagtcttccctttatgctctgcgatacgatggggcttgatggagccgagggagctggtttatgcatggacgacatcccacacatattgaagggctgcatgcccgatagatatcagtttaattcacgcaagcccatcactcccgagcattcaacgtttatcacttcgccatcgctgaaggatagaatccactgtgtggcttacgttcttgatatcaatagcattgacaatctgtatagtaaaatgctcgcgaaagtgaagcaggtacataaagaggtgctgaactgtggcatagcctatgtcgccctactgacaaaagttgacgactgttctgaagtactccaggacaacttcttgaacatgagccgttccatgacctcccagtctcgggtcatgaacgtgcacaagatgctggggatccctatctccaacatcctgatggttgggaattacgcatccgatcttgaactcgaccctatgaaggacatactcatcctatcggcactgcgacaaatgttgcgggcagctgatgattttttggaagatctcccgcttgaagagaccggggctatcgagagagcgctccagccctgcatctag

SEQ ID NO: 227096 - DNA, 294 bp, synthetic construct
  misc_feature 1..294: note = Description of Artificial Sequence: Synthetic coding sequence
  source 1..294: mol_type = other DNA
atggaggtcacaacacgcctaacttggaacgacgagaaccacctgaggaagcttttgggcaacgtgagtctgtccctgctgtataagtcaagcgtgcacgggggatccattgaggatatggtagagcggtgttccaggcaaggctgcacaattactatggcatatatcgactacaatatgattgtcgccttcatgctgggcaattacattaatctgcacgagtctagtactgaacctaacgacagcctctggtttagcctccagaaaaagaatgacacgacagaaatcgagtag

SEQ ID NO: 227097 - DNA, 1437 bp, synthetic construct
  misc_feature 1..1437: note = Description of Artificial Sequence: Synthetic coding sequence
  source 1..1437: mol_type = other DNA
atgagtacgaatggggatgatcaccaggtgaaagattcgctggaacaactcaggtgtcactttacctgggagctgagcatcgatgacgatgagatgccagacctggaaaaccgcgtgctagaccagatcgagtttctggatactaagtactccgtgggcatccacaacctgctggcgtacgtaaagcatctgaagggacagaatgaggaagctctgaagtccctaaaggaagccgagaatctcatgcaggaagaacacgataaccaggccaacgtgcgctcacttgtcacctggggaaattttgcatggatgtattaccatatgggcaggctcgcggaagcacagacctacctggacaaggtggaaaacatctgcaaaaaactaagcaatcctttccgttacaggatggagtgtcccgaaatagactgtgaggaaggatgggctctactgaagtgcggtggtaagaattatgaaagagccaaagcctgttttgagaaagtattagaggtggatccagagaaccccgagagctctgctggatacgctatctctgcttacagactggatggttttaaactggcaacgaagaatcataagccgttctccctcctgccacttcgacaggccgtgcggctcaatccagacaacggctatataaaagtcctgctcgccctgaagttgcaggacgaggggcaggaagccgagggtgaaaaatatatcgaagaggctcttgctaacatgtcgtcacagacctatgtgttccggtacgcagcaaaattctaccgacgaaagggcagtgtggacaaggccctggagctgctcaaaaaagcgttgcaggagactccaactagcgtgctgcttcaccaccagattggtctgtgctataaggcacagatgatccagatcaaagaggccaccaaggggcagcccagaggacagaaccgagagaaactcgataagatgatccgatccgcaatatttcacttcgagtcagccgtcgagaagaagcccacctttgaagtggctcacctcgatctagctagaatgtatatagaggctggcaaccaccggaaagctgaggagaactttcaaaagctcttgtgtatgaaacccgtcgtggaagagacgatgcaagacatccacttccactacgggaggttccaggaattccagaaaaaatccgacgtaaatgccatcattcactatctcaaggctatcaagatagaacaagcttccctcacgcgggacaagtccattaattcgctgaagaagttggtgttgcgcaaacttagaagaaaggctctggatctggagagtctgagtctattgggctttgtgtacaagcttgagggaaatatgaatgaagcactggagtattacgagcgggctcttagactggccgctgatttcgaaaattcggtgcggcaggggccatag

SEQ ID NO: 227098 - DNA, 1344 bp, synthetic construct
  misc_feature 1..1344: note = Description of Artificial Sequence: Synthetic coding sequence
  source 1..1344: mol_type = other DNA
atgcccgaccttgagaatcgcgtgctggaccagattgagtttctggatactaagtactctgttggaatccataatctgcttgcgtacgtaaagcatctgaagggccagaacgaagaagcactgaagtccctcaaagaagcggaaaatctgatgcaagaggaacacgacaatcaggccaatgtcagatcactcgtgacctggggtaactttgcttggatgtattaccatatggggagactggccgaggcacagacatacctcgacaaagtggagaatatctgcaaaaagcttagtaaccccttccgctaccggatggaatgtcccgagatagactgcgaggaggggtgggcactgctgaaatgtggcggaaaaaattatgaaagagctaaagcttgtttcgagaaggttctcgaagtcgacccggaaaatcctgaatcgtcagcgggatacgcgatctcagcataccggctggatggatttaaactggcaactaaaaaccacaagcctttctcgctcctgcctctgcgtcaggctgtgcggctgaatcccgacaatggctatatcaaagtcctcctggccctgaagctgcaggacgaaggacaggaagcagaaggtgagaaatacattgaggaagctctcgctaatatgtcgtcacagacgtatgttttcaggtacgcggctaaattttatagacgcaagggaagtgtggacaaagctttagagcttcttaagaaagctctgcaggagacacccacaagtgtgttattacatcatcaaattgggctctgttacaaagcccaaatgattcagattaaggaagcaaccaagggacagcctcgaggccagaatagagaaaaactggataagatgataagaagtgcaatctttcatttcgagtctgcggtggagaaaaagcctaccttcgaggtggcccacttggatctggcaaggatgtatatcgaagccggaaatcacagaaaggcagaggaaaatttccagaagcttctgtgtatgaaacccgtagtcgaggagactatgcaggacattcacttccattacggccgttttcaggagtttcagaaaaaatccgacgttaatgctattattcattaccttaaggccatcaaaatcgagcaggcgtcactaacgagagataagtctattaacagtctcaagaaacttgtcctgcggaaactccgaagaaaggctttagatctggaatctttgtctctgcttggatttgtgtacaagctggaaggaaacatgaacgaggcactggaatactacgagagggccttacggctggccgcagactttgaaaactccgtcaggcagggtccctag

SEQ ID NO: 227099 - DNA, 1419 bp, synthetic construct
  misc_feature 1..1419: note = Description of Artificial Sequence: Synthetic coding sequence
  source 1..1419: mol_type = other DNA
atgagtgagaacaataagaattctctggaatccagcctgcgccagctgaaatgccattttacttggaacctgatggagggcgaaaacagcctggacgatttcgaggacaaagtgttttatagaactgagttccagaatcgcgaattcaaagctacgatgtgcaacttgctagcatatctgaagcatttgaagggccagaacgaggctgctctcgagtgtctgaggaaggcagaagaactaattcagcaggagcacgcggaccaggccgagattaggtcactggtgacatgggggaactatgcttgggtctattaccacatgggcagactttcagacgttcagatctacgtggataaggtaaagcacgtctgcgagaaatttagctccccttatcgtattgaatcccccgaacttgattgcgaggaagggtggactcggctgaaatgtgggggtaaccagaatgagagagctaaggtgtgttttgaaaaagctctggaaaaaaaacccaaaaacccagagttcacttctggtctggccatagctagttatcgattagataattggcccccttcacagaacgcaatcgatcccctgcggcaggccattcggctcaaccccgacaaccaatacctaaaagtgttgctggcattgaagctgcataaaatgcgtgaggagggcgaggaggagggggaaggcgagaaactggttgaggaggccctggagaaggctcctggagtgaccgatgtcctccgctcagccgcaaagttctacaggcgcaaggatgagcctgacaaggctattgaattactgaaaaaggcactggagtacattcctaacaacgcatacctgcactgccagattggatgttgttaccgggcaaaggtgttccaagtgatgaatttaagggaaaacggaatgtatggaaaacgaaaactcctggagctgatcgggcacgcagtggctcatctcaaaaaggcagacgaagcaaatgacaacctattccgcgtttgttcaattctggcctccttacatgcattagcggaccagtacgaggacgcggaatactattttcaaaaagaattttcaaaagaactgaccccagttgccaagcagttactgcatcttagatacggcaatttccagctctatcagatgaagtgtgaagacaaggctatccatcacttcatagaaggcgtgaagattaatcaaaaaagcagagaaaaggagaagatgaaggacaaactgcagaagatcgcgaagatgaggctgtctaagaacggcgctgatagcgaagcactgcatgtcctcgctttcctacaagaacttaacgagaagatgcagcaggccgacgaagactccgaacggggtttggaatcaggctctctcattccctccgctagcagctggaacggggagtag

SEQ ID NO: 227100 - DNA, 1356 bp, synthetic construct
  misc_feature 1..1356: note = Description of Artificial Sequence: Synthetic coding sequence
  source 1..1356: mol_type = other DNA
atgcctaagaataagaagaggaacacaccccacagggggtcctcagctggtggcggtggaagcggggctgccgcagccacagccgcaaccgccggtggccagcaccggaatgtgcaaccattctccgacgaagacgcttctatcgagacaatgtctcactgttctggctactcagatccaagctcatttgccgaagacggccctgaggttttggacgaagaagggactcaggaggacctggaatacaagctcaaaggattaatagacttaaccctcgataaatccgctaagacaagacaagcggctctggaagggatcaaaaacgccttggctagcaagatgctgtacgagttcattctcgagaggcggatgactcttaccgacagcatagagagatgtctgaagaagggaaaatcggatgaacaacgagccgctgctgccttagcttcagtactatgtattcagcttggccctggaattgagtccgaagagatcctcaagacactcggacctatactgaagaagatcatctgcgacggctccgccagtatgcaggccagacaaacttgtgccacttgcttcggcgtgtgctgctttatcgccacagatgacataaccgaattatatagtaccctggagtgcttggagaatatttttaccaaatcatatttgaaagaaaaggataccaccgtcatctgttccacccccaatacggtgctccacatctcctcactgctcgcctggaccctgctgcttactatttgccccataaatgaggtcaagaaaaagctcgaaatgcacttccacaagctgccttccctcctctcttgcgacgatgtcaatatgaggattgccgctggcgaatcactggctctccttttcgaattggctcgcggaatcgaaagcgacttcttttacgaagatatggagtcattaacacagatgttgcgggctctggctacagacggaaataagcatagggccaaggtggataagcgcaagcagcgttcagtgtttcgggacgttctgcgcgctgtggaggagcgcgatttccccacagaaacgatcaagttcggtccagagcgcatgtacatcgattgctgggtgaagaagcacacatacgacacctttaaggaagtgttgggcagcggcatgcagtaccatctgcagtctaatgaattcctgcggaacgtcttcgagctgggccctcctgtcatgctcgacgccgctaccctgaaaacgatgaagataagtaggtttgaaagacatctgtataattcagctgcattcaaggcgagaacaaaggccagatctaagtgccgggacaagagagctgacgtgggtgagttcttctag

SEQ ID NO: 227101 - DNA, 1356 bp, synthetic construct
  misc_feature 1..1356: note = Description of Artificial Sequence: Synthetic coding sequence
  source 1..1356: mol_type = other DNA
atgccaaaaaacaaaaaacgcaatactcctcacagaggctcctctgcaggaggagggggttcgggtgccgcagcagccactgctgcgactgccggtggacagcacagaaatgtgcagcctttctccgatgaggatgcatcaatcgagactatgtcgcactgttctggttatagcgatccttcctcctttgccgaggacggccctgaagtgctcgacgaggaaggtacacaggaagatttggaatataagctgaaaggactcatcgacctgactttagacaaatctgccaaaacgaggcaggcagccctcgaaggcatcaagaacgcactggctagcaagatgctgtacgagttcattttggagaggcgcatgactcttaccgattcaattgaaagatgcctgaaaaaggggaagtcggatgaacagcgcgctgcagccgctttagcatctgtcctgtgtatccagctgggcccagggattgagagtgaggagatccttaagacgctggggccaatcctcaaaaagatcatctgcgatgggagcgccagcatgcaggcccgacagacatgcgccacctgtttcggagtgtgctgtttcattgcaacagatgacataacggagctatacagtacactagagtgcctggagaacatattcacaaagtcctatctgaaggagaaggacactactgttatctgttctacacccaataccgttctgcatattagctccctgctggcttggactctgcttctcacgatttgccccataaatgaggtcaagaaaaagctggagatgcattttcacaagctgcctagtctgttgtcttgtgacgatgttaacatgcgcattgctgcaggggaaagtctggcactgctgtttgaactggcacggggaatcgaatctgattttttctacgaggatatggaatcactcacacagatgctgagagccctagcaaccgatgggaacaagcatagagccaaggtcgataaacgcaagcagaggtctgtctttcgtgacgttctgcgcgcagtggaagaaagggatttccccaccgaaaccattaaattcggacccgagcggatgtacatagattgctgggtgaagaagcatacttatgatacttttaaggaggtcttaggatctggcatgcagtatcacttgcagtcgaacgagtttctccgaaacgtctttgaactgggtccgcctgttatgctagacgctgccaccctaaagaccatgaaaatcagtcggtttgagagacatttgtataatagcgcagcttttaaagcccgaaccaaagccagatctaaatgcagggataaacgtgcagatgtgggcgaattcttctag

SEQ ID NO: 227102 - DNA, 57 bp, synthetic construct
  misc_feature 1..57: note = Description of Artificial Sequence: Synthetic coding sequence
  source 1..57: mol_type = other DNA
atgcccaagaacaagaaacgtaacaccccccaccgaggatcttccgctggaggctag

SEQ ID NO: 227103 - DNA, 96 bp, synthetic construct
  misc_feature 1..96: note = Description of Artificial Sequence: Synthetic coding sequence
  source 1..96: mol_type = other DNA
atgccaaaaaacaagaagaggaacactcctcacaggggctccagtgccggaggagggggttccggagctgccgctgccaccgctgccacagcatag

SEQ ID NO: 227104 - DNA, 189 bp, synthetic construct
  misc_feature 1..189: note = Description of Artificial Sequence: Synthetic coding sequence
  source 1..189: mol_type = other DNA
atgcctaaaaataagaagcgtaataccccccaccggggtagtagtgcaggaggcggaggaagcggagcggctgcggcaacggctgcgactgctgggggacaacataggaacgttcaaccattcagtgatgaggacgcaagcattgaaacaatgtcacactgttctggctatagtgatccgagctcttag

SEQ ID NO: 227105 - DNA, 1206 bp, synthetic construct
  misc_feature 1..1206: note = Description of Artificial Sequence: Synthetic coding sequence
  source 1..1206: mol_type = other DNA
atgagccactgttcggggtacagcgacccaagctcttttgccgaagatggccctgaagtgctggatgaggaaggaacacaagaggatctagaatacaagctaaaagggttaatagacctgacacttgacaagagtgccaagacacgacaggccgcactcgagggaattaagaacgcactcgcgtcaaaaatgctttatgaattcatacttgagcggcgtatgacccttaccgattcaatcgagcgctgcctgaaaaaaggtaaatccgatgagcagagggccgcagccgctctggcctccgtactctgtatccagctgggaccgggaatcgagtccgaagagattctgaagactcttggtcctatcctgaagaagattatctgtgacggtagcgcttccatgcaggcacgccagacatgcgccacttgttttggggtttgttgtttcattgctacagacgacatcactgagctgtattccacactggagtgcttggagaatatattcactaaatcttacctcaaggagaaggatacaacagtgatctgctctacgcctaacactgtcctgcatatcagctcacttctggcctggaccctgttgttgactatctgccccatcaatgaagtcaaaaaaaagttggagatgcacttccataagctaccctcactcctctcctgcgatgatgtgaatatgaggatcgctgccggtgagagcttggctttgttgtttgagctcgctaggggtatcgagtcagattttttttacgaagatatggaatcattgacacagatgctccgggcattggctactgacggaaacaaacacagggctaaggtcgataagcgaaagcagcggtccgtgttccgcgacgtcctgcgcgcagtcgaggaacgggatttccccaccgagacgatcaagtttggaccagagagaatgtatatcgactgctgggtgaaaaaacatacctacgataccttcaaggaagtgctaggaagcgggatgcagtaccatttacagagcaatgaattcctccgaaacgtttttgagctgggacctcccgtgatgcttgatgccgctacacttaaaacaatgaagatatcccgctttgaacgacacctctataattctgccgcattcaaagccaggacaaaagccaggtcaaagtgtcgcgacaagagagcagacgtgggggaatttttctag

SEQ ID NO: 227106 - DNA, 474 bp, synthetic construct
  misc_feature 1..474: note = Description of Artificial Sequence: Synthetic coding sequence
  source 1..474: mol_type = other DNA
atgcacttccacaaactgccctcattgctgagttgcgacgacgtgaacatgaggatcgcagctggcgagagtttagctctgctgttcgaactcgcacgtggcatagaaagtgactttttctatgaagacatggaatcactgacccagatgctgcgggcactggctacagacggaaataagcaccgggctaaggtggataagcgcaaacagaggtccgttttccgggacgtgctccgagcagtcgaggaacgcgactttccaacggaaaccatcaagtttggccctgaacggatgtacattgattgctgggtaaagaaacatacctacgacacgtttaaggaggttcttggatccgggatgcagtatcaccttcagtcaaacgagtttctcagaaacgtgtttgaattgggcccaccagtgatgcttgacgccgctaccctgaagacgatgaagatctcacggtttgagcggtag

SEQ ID NO: 227107 - DNA, 1827 bp, synthetic construct
  misc_feature 1..1827: note = Description of Artificial Sequence: Synthetic coding sequence
  source 1..1827: mol_type = other DNA
atgggaccaaagaaatcctggagaagccattttttccccctccctgaggtctggctcctcctgctccttagtcaggcactatctccctcacacggaccacaaacacaggctggtgttgggttagtctggtcagtcccactacctagtgctcttagatctcagtcctgtctcggcgcaccactgagggacgctagtgagctgacaacagttcacctcttccccaccagaggatggggggctcgcagggcattgtgggtacactccagtgcttcagcctctagtgctgcaagtcgccgacgactgagggcccaggcgtccggtatcagcagtttttccctggtggatggtggtgcaccccgtgaggacggtggggcacgcggtgtttggctcccgtctagcggacaggtgtccgcccagagaactggaagaaggctggtcgggttggaaccaaccccgaccggttccctcacccctaggcccccaagaccagtacctgggatgccacgggctcgcaaaggcaatacactccgcaaaggtggccagagaaggggcggaggcgctcggtcatctgcacaggccgattcaggaagctccgacgacgaagccgcttccgaagctaggagcaccgcaagcgaatgcccatctctgctttcgaccacggctgaggacagcttaggcggtgatgtcgtcgatgagcagggacaacaggaggaccttgaagagaagctgaaagagtacgtagactgtttgacagataaaagtgctaagacacgacagggagcacttgagtctctaaggttggctctggcgtcccggctactgcccgacttcttactggagcgtcgcttaaccctcgccgacgccctcgaaaaatgtctcaaaaaaggtaaaggtgaggagcaggcactggccgcagccgtgttaggcctactctgtgttcagctaggaccgggtccaaagggagaagaattgtttcacagtctccagcctttgcttgtgtcagtgctgagcgattctacagcctctcctgcagctcgcctgcactgtgctagcgccctgggtctcggctgttacgtggccgctgctgatatacaggacctggtgagttgtcttgcatgtctcgagagtgtcttctccaggttctatggcctgggcggaagtagtacctccccggtggtgccagccagtctgcatggcctgcttagcgccgcactccaggcatgggcactcctcctgaccatttgtccatctactcagatcagtcatattctggatagacagctgcctagactgcctcagctgttatcgtccgaatctgtcaaccttagaattgccgcaggcgagactatcgctttgctgtttgaactcgctagggatctggaggaggaatttgtttatgaggacatggaggctctgtgttcagtgctacggacactggctacagacagcaataaatatcgcgcaaaagcagacaggcggaggcagcggagtacctttagagcagtcttgcacagcgtggagggaggggaatgcgaggaagagatcgtacgatttggcttcgaagtactctacatggattcatgggctcgacatcgaatttacgccgctttcaaggaagtcctgggttcggggatgcatcaccaccttcagaacaatgagctcctaagagatattttcggtctggggcctgtgctcctgttagacgcaaccgctttaaaggcctgtaaggtgcctcggttcgaaaagcatttgtacaacgcagcagcgttcaaggcaaggaccaaagctcgaagtcgcgttcgggacaaacgggctgatattctgtag

SEQ ID NO: 227108 - DNA, 1329 bp, synthetic construct
  misc_feature 1..1329: note = Description of Artificial Sequence: Synthetic coding sequence
  source 1..1329: mol_type = other DNA
atgccacgggcacggaagggtaacacattgaggaagggtggtcaaaggcggggaggtggggctagatcgtctgcgcaagcagactctggttccagcgacgatgaggccgcaagcgaggctagaagtaccgcttcggagtgtccttctttgctgtccacgaccgctgaggacagcctcgggggtgatgtagtggatgaacagggacagcaggaagatctggaggaaaagcttaaggaatacgtggactgcctgacagataagtctgcgaagacccgccagggagcgttggaatccctcagactggctctggcatctcggctacttcccgatttcctgctggaacgcaggcttaccctcgcggacgctttggagaagtgtttgaagaaaggcaagggggaagaacaagccctggccgcagcagttttaggtctgctgtgtgtgcaactgggccctggtccgaaaggagaagagctgtttcatagtctccagcccctcctggtcagtgtgctcagcgactccacagccagcccggcagcccgactgcattgtgctagcgcacttggtcttggatgttatgttgcggcagcggatatccaagaccttgtctcttgcctggcctgtctcgagtcggtgtttagtcgtttttacggactcgggggaagttcgacgtcccccgtggttccggcttccctgcacggcctactgtcagctgcactccaggcatgggcactgttgctgaccatatgcccatctacccaaatttcacatatactggacagacagttgccccgtttgcctcaactgctatcctctgagtccgtcaatcttcggattgctgcaggcgaaaccatagcattactcttcgaactggctagagatctggaggaggaattcgtgtacgaggacatggaagcgctttgttcagtgctcaggaccctcgctacggatagcaacaagtatagggcaaaggccgacagacggaggcaaaggtccaccttccgggctgttctacattcagtggaaggcggagagtgcgaggaggaaatcgtgaggttcggcttcgaggtactgtatatggattcctgggcaaggcaccggatctacgccgcttttaaggaagtgctgggatcaggcatgcaccatcacctgcagaacaacgaactgctgagggacatttttgggctgggaccagtgctcttgctcgatgcgactgctctgaaagcttgtaaggtcccgcgttttgaaaaacacctctataacgcagccgctttcaaggcacgtaccaaagcacgctcaagagtgcgggacaagcgagccgatatcctttag

SEQ ID NO: 227109 - DNA, 1521 bp, synthetic construct
  misc_feature 1..1521: note = Description of Artificial Sequence: Synthetic coding sequence
  source 1..1521: mol_type = other DNA
atggcatggaactccccatctagaaggccagtctggcagggaggggctccaagggaagacggcggagctagaggggtgtggctcccgtcctccggtcaggtgagtgcacagcgcaccggcaggcgcctggtgggccttgagcccacgccaacggggtcactgacacccaggcctcctcgacccgtgccaggtatgccaagggcgcgtaaagggaacaccctgcggaagggcggacagaggcgaggcggaggtgctcgttcgtctgcgcaagccgactctggatcttccgacgatgaagccgctagcgaagccaggtctactgcttcggagtgccccagcctgttaagtaccactgctgaagattcactggggggagatgtagtggatgaacagggtcagcaggaggacttggaggaaaagcttaaagaatacgtagactgtctgactgacaagtctgctaagacccggcaaggcgcactcgaaagcctgcggcttgccctggccagccggcttttacctgatttcctgttagaaagacggctgaccttggctgatgccctggaaaagtgtctgaaaaagggaaaaggagaggagcaagccctggcagccgcagtgctgggtctactttgcgtgcagctgggtccaggacccaagggagaagaactttttcactccctccaacccctgctcgtatccgtcttgtccgactccaccgcatcacctgctgctagactccactgtgccagcgccttggggcttggatgttatgtcgccgcagccgatattcaagacctggtgagctgccttgcgtgcctggaaagtgtattctctcgtttctacggtcttgggggatcgagcacgagtcccgtggtacctgccagcctacacggactcttatctgcagctctgcaggcatgggccctgctcctgacaatctgtccctcaacccagataagtcacattctggatagacagttaccacggcttccacagctattatcaagcgagtcagtgaatcttcgtatcgccgctggcgagacaatagccctgttgtttgaattggctcgcgacttggaagaagagttcgtttatgaggatatggaggcactgtgttctgtgctacgcactttggccacagattctaataaatatcgagccaaggcagataggcggagacagcgatctacattcagagccgtgctgcatagtgtagagggcggagagtgtgaggaagaaatcgtgcgttttggcttcgaggttctgtacatggattcctgggcaaggcatagaatctacgccgcattcaaggaagttcttggctctggaatgcatcaccacctgcagaacaatgagctgttaagggatatttttggtctgggacccgttttgctgctggatgcgacagcactgaaagcttgtaaggtgcccagattcgaaaagcatctttataatgcagctgccttcaaggcgagaaccaaagctcgctccagggtccgagacaagcgcgctgatatactgtag

SEQ ID NO: 227110 - DNA, 1329 bp, synthetic construct
  misc_feature 1..1329: note = Description of Artificial Sequence: Synthetic coding sequence
  source 1..1329: mol_type = other DNA
atgccgagagctcgtaagggcaacaccctcagaaaagggggacagcgcaggggtggaggggctcgcagctctgctcaagctgactctggctccagcgacgatgaagcggctagcgaagctcgctctactgccagcgagtgcccgagcttgctgtctacgactgctgaggattccctgggcggtgacgtagtggatgaacaaggacagcaggaggacctcgaggagaaactgaaagaatacgtggactgtcttacagataaatccgcaaaaactcgccagggagccctggagagtctgcggctggcccttgcgtccaggttactcccagattttttgttggaacgcaggctcacgttagcggacgcattggagaagtgtttgaaaaagggcaagggtgaggagcaggccctggccgcagctgtgctaggcttgctgtgcgtacagctgggcccagggcctaaaggggaggaactgtttcacagcctgcagcccctgctcgtgtccgtactctctgattctacagcaagtcccgctgcccgtctccattgcgcatccgccctgggtctgggctgctatgtagccgcagccgacatccaggacctggtgtcttgcctggcgtgtctagagtcagtattctctcgtttctacgggctgggtggatcgtctacaagtccagtcgtcccagcctccttgcatgggctgctgtccgctgcgctgcaagcgtgggcgctgttacttaccatttgcccttcaacacagataagccacatcttggaccgccaactgcccaggctcccacagctcctgtccagcgaaagcgtcaacttacggattgccgcaggggaaacaatcgctttgctgttcgagctggctagagatctcgaagaggagttcgtctacgaggatatggaagccctgtgcagtgtcctgaggactttggcaaccgacagcaacaaatatcgggcaaaggcagataggcggagacagcgctctaccttcagagccgtgttacactctgttgagggcggagagtgtgaagaggagattgtccggttcggcttcgaagttctttacatggattcctgggccagacaccgtatatacgccgcattcaaggaagtcttaggcagcggcatgcatcatcatttacaaaacaacgagctcttaagggatatttttgggctcggacctgtcctgctgctcgatgcaacagctttgaaggcctgcaaagtgccaagattcgaaaagcacttgtacaatgccgctgcattcaaggccagaaccaaggctaggtctcgggtcagggacaagagagccgacattctttag

SEQ ID NO: 227111 - DNA, 1713 bp, synthetic construct
  misc_feature 1..1713: note = Description of Artificial Sequence: Synthetic coding sequence
  source 1..1713: mol_type = other DNA
atgaccctcctgtggtgcgtcgtttccctgtatttttacggtatcttacagagcgacgcctccgagaggtgtgatgactggggcctggacaccatgcgacagatacaggtgtttgaggacgaaccagcgaggatcaagtgccccctttttgagcatttcctcaagttcaactacagcacagcacacagcgccggtctgaccctcatctggtactggacgcgccaagatcgagatctagaagagcctatcaatttccggctacccgagaaccggataagtaaagagaaagacgtgttgtggtttcgccctacgctgcttaatgacactggaaattacacgtgcatgctaagaaacactacatattgttccaaagtggcctttccgctggaagtggtacagaaagattcctgctttaactcccctatgaagctccccgtgcacaagctgtacatcgagtacgggattcaaagaatcacttgccctaacgtcgacgggtacttcccttcatccgtgaagcccaccatcacttggtatatgggatgttataagatacagaacttcaacaacgtgatccccgaggggatgaatctgtccttcctgatcgctttgatcagcaataatggtaattatacctgcgtcgtgacctaccctgaaaacggcagaacattccatctgaccaggacgctgacggtcaaggtggtggggagcccaaagaacgccgtgcctcccgtcattcacagccctaatgatcacgtggtatacgagaaggaacctggtgaggagctgctcatcccttgtactgtatatttttcattcctgatggattccagaaacgaggtttggtggaccattgatgggaagaagcctgatgatataaccatcgatgtcacaattaacgagtccatctcacacagcagaacggaggacgaaaccaggacacagatcctgtccattaagaaagtgacaagcgaggatttgaaaagatcctatgtgtgccatgccagatccgctaagggagaagtggcgaaagcggctaaagtgaaacagaaagtgccggctccacgttacactgtagagctagcttgtgggttcggcgcaactgtgctcctagtcgtcattctgattgtcgtttatcatgtttactggctggaaatggtgctcttttaccgagcacattttggtaccgatgaaactattcttgatggtaaggaatatgacatctacgttagttatgcccgtaacgctgaagaggaggaattcgtgcttttgaccctcaggggagtccttgagaacgagtttggctacaaactctgcatctttgatagggattctctcccgggagggatcgtcacagatgagacactgtccttcatccaaaaatctcgcagactcctggtggtccttagtcccaactacgtgctgcagggaacacaagctctgttggagttaaaggctggactggaaaatatggcttctaggggtaatatcaacgtgattcttgtccagtataaagcagtcaaagagacaaaggtgaaagagcttaagcgggcaaagacagtgctcacagtcatcaagtggaaaggcgagaagagcaaatatccccagggccgattttggaagcagctccaggtcgcgatgccagtaaaaaaaagccctagacggagctcgtccgacgagcagggcctgagctacagtagcctgaaaaatgtgtag

SEQ ID NO: 227112 - DNA, 2064 bp, synthetic construct
  misc_feature 1..2064: note = Description of Artificial Sequence: Synthetic coding sequence
  source 1..2064: mol_type = other DNA
atgacactgctatggtgcgtagtttcgctgtacttttatggtatcctgcagagtgacgcaagcgaacgatgtgacgactgggggctggacactatgaggcagatacaagtgttcgaggatgagcccgctcgaattaagtgccccctcttcgaacactttttgaaattcaattatagtacagcacactccgccggattgacccttatctggtactggacacgacaggacagggacctcgaagagccaatcaattttaggcttccagaaaatcggatatctaaagagaaagacgtcttgtggttcagaccgaccctgttgaacgatacgggaaactacacctgtatgctgagaaataccacttattgctctaaagtggccttccccctggaagtggtccagaaggactcatgtttcaattccccaatgaagctacccgtgcacaaactgtatatcgaatatggtattcagcggattacctgtcccaatgtcgacggttatttccccagctcagtgaagcctactataacttggtatatgggctgttataaaatacaaaatttcaataatgtaatccccgaagggatgaatttatcattcctgatcgcactaatcagcaataatggcaattacacatgtgtcgtgacctatcctgagaacggacgaaccttccacctgactcggactttaaccgtaaaggtcgtggggagccccaaaaacgcggtcccaccggtcattcattccccaaatgaccacgttgtctatgagaaggagcctggagaagagttgctgatcccgtgcacagtgtatttcagctttctgatggatagccgaaacgaggtatggtggaccatagacggcaaaaaaccagacgacattaccattgatgtgacgatcaatgaatctatttctcattcgcggaccgaagatgagacaaggacccagattctgtccatcaagaaagttacctcagaagatctcaagcgctcctatgtgtgtcatgcacgatcagccaagggggaagtcgctaaggctgccaaggtgaagcaaaaagtgccagcacctcgctacactgtggagctggcttgtggttttggggctacagtgctccttgtggtgatcctgattgtggtctatcacgtatattggctggagatggtccttttttaccgagctcacttcggcaccgacgaaactattctagatggcaaggagtacgatatctacgtgtcttatgcccgaaatgcagaggaggaagagtttgtcctgctgactcttcggggtgtgttagagaacgaatttggctataagttgtgcatcttcgacagagatagcctgcctggtggaaacaccgtggaggcagtctttgactttatccagaggtcccggagaatgatcgttgtgttatctcctgactacgtgaccgagaagagtataagcatgcttgagtttaagcttggggtgatgtgccagaactctatcgcaaccaaacttatcgtggtcgagtaccgtccactagaacatccacaccccggtatccttcaacttaaagaatcagtgtcctttgtgtcctggaaaggggagaaaagtaagcacagtgggtcaaaattttggaaagctctgagattggctctgcccctgagaagtctgtccgcttccagcggctggaatgaaagctgcagttctcagtctgatatttccctagatcacgtgcagagacggagatctcgccttaaagagccccctgagctgcagtcgagcgagagagcggctggctcacctccagctccagggactatgagcaagcatcgagggaagagctccgcgacttgtaggtgttgtgtgacatactgtgagggcgagaatcacctcagaaataagtcgagagctgagatccacaatcagccacagtgggaaacccatctgtgtaaacccgtccctcaggagagtgaaacccagtggatacagaacggtacacgtctggaaccaccagctccacagatttcagcgcttgctctgcaccatttcacagatctgtcaaacaataacgacttttatattttatag

SEQ ID NO: 227113 - DNA, 1713 bp, synthetic construct
  misc_feature 1..1713: note = Description of Artificial Sequence: Synthetic coding sequence
  source 1..1713: mol_type = other DNA
atgacgttactgtggtgcgtcgtttctctgtatttctacggcatacttcagtctgatgcatctgaaagatgcgacgattgggggctggataccatgcgtcaaatacaggtgtttgaggacgaacccgcaaggatcaaatgccctctgtttgagcactttctgaaatttaactacagcaccgctcatagcgccggtctgacacttatttggtattggacgaggcaagatcgggatctagaagaacctatcaattttaggttaccggaaaataggatttccaaagaaaaggacgtcctgtggttccggcctacactgcttaatgatacaggtaattatacgtgcatgctgagaaatacgacgtattgttctaaggtcgcatttccgcttgaggtggtgcagaaggacagttgctttaactctcccatgaagttgcctgtccacaaattgtacattgaatatgggatccagcgtatcacatgccccaacgtagacggttacttcccctcaagcgtgaaaccaactattacctggtatatgggatgctataagattcagaatttcaataacgtgatcccagaagggatgaatctgtctttcttaatcgctctcatctcgaacaacggcaactatacctgcgtcgtcacataccccgaaaacgggaggacatttcatttaacaagaaccctcaccgtgaaagtggtgggaagccctaagaatgcagtgcccccagttatccacagtccaaacgaccatgtggtatatgagaaggagcccggtgaggaacttctgatcccgtgcactgtgtacttcagtttcttgatggattcgcgaaatgaggtgtggtggacaatagatggcaaaaagccagacgatatcaccatcgacgtgactattaatgaaagcatctcccattcgaggactgaggatgaaacgaggacgcagatcttgtcaatcaaaaaggtgacctccgaagatctgaaacgatcctatgtctgtcacgcaaggtctgctaaaggggaagtggctaaggctgccaaggtgaagcaaaaagttcccgctcccagatataccgtagagttagcttgcggctttggcgcaaccgtactgctggtagttatcctcattgtggtgtatcacgtgtattggctggaaatggttctattctacagagcgcacttcggtacagacgagactatccttgacgggaaagaatacgatatatatgtgtcctatgcccgaaatgccgaggaagaagagtttgtgctcctaacgcttcgaggggtgttagaaaacgagtttggctacaagctgtgcatatttgatcgagattccttgcctggaggcatcgtgaccgacgaaactctgagcttcattcaaaagtcgagacggcttcttgttgtgttgtcacccaattacgtcctacagggaactcaagccctcttagagctaaaagcaggattggaaaacatggcatcgcgaggcaatattaacgtcatcctagtccagtataaggccgtcaaggaaacgaaggtcaaagaactgaaacgcgcaaaaaccgtcttgacagtgataaaatggaaaggggagaaatccaaataccctcaaggccgtttttggaaacagttgcaggtcgccatgccggttaagaagagccctcggaggtcatcaagcgacgaacaggggctgtcttactcaagcctgaagaatgtgtag

SEQ ID NO: 227114 - DNA, 1071 bp, synthetic construct
  misc_feature 1..1071: note = Description of Artificial Sequence: Synthetic coding sequence
  source 1..1071: mol_type = other DNA
atgactctgctgtggtgtgtcgtatctctctacttctacgggatcctgcagagtgatgctagcgagcgctgcgacgactgggggctggacactatgcgtcaaatccaggttttcgaagacgaacctgcacgaatcaagtgtcccctgtttgagcattttctaaaatttaactacagcaccgctcacagtgctgggcttacccttatttggtattggacacggcaggaccgcgatctggaagaacccatcaatttccggttaccagagaaccgcatctcaaaagagaaagatgtgctttggttccgtccaaccttgctgaatgatactggcaactacacatgtatgttgcggaacacaacttactgcagcaaagtcgccttccccctagaggtcgttcaaaaggactcatgtttcaatagtcccatgaagctgcctgtacacaaattatacatcgagtacggtattcagcggattacctgtccaaacgtggacggatatttccctagttcggttaagcccacaataacctggtacatgggttgttataaaatccagaactttaataacgtcattcctgaaggaatgaacctgagtttcctgatagccctgatcagtaataatggcaactacacctgtgtcgttacttaccccgagaatggaagaactttccacctaacccgcactcttacggtgaaggtggtaggatctcccaagaatgctgtccctccggtgatacactccccaaacgatcatgtggtatacgaaaaggaacccggtgaagagttgctgattccttgcacagtctatttttctttcctcatggactcgaggaatgaagtgtggtggactatcgacggcaaaaaaccagatgatatcacaatcgacgtaaccatcaatgagtcgatatctcactcgcggactgaggacgagactcgcacccaaatcttaagcataaagaaggttaccagtgaagacctcaaacggtcatacgtctgccacgccagatccgcaaaaggagaagtggccaaggctgccaaagtgaagcaaaagggaaatcgctgtggtcagtag

SEQ ID NO: 227115 - DNA, 342 bp, synthetic construct
  misc_feature 1..342: note = Description of Artificial Sequence: Synthetic coding sequence
  source 1..342: mol_type = other DNA
atgactctgctgtggtgcgtggtgtctctgtacttttacggtattctccagtcagacgccagcgagcgctgcgacgattggggtctggacacaatgcgtcagattcaagttttcgaagatgaacccgctcgcatcaagtgtccactgtttgaacactttctcaagttcaactattctactgcgcatagcgccggactgacgctcatctggtattggacccgccaggatcgcgacctcgaggagccaatcaattttagactcccagagaatcgcattagcaaggagaaggatgtgctgtggtttagacctacactgcttaatgataccggtaactatacatag

SEQ ID NO: 227116 - DNA, 1071 bp, synthetic construct
  misc_feature 1..1071: note = Description of Artificial Sequence: Synthetic coding sequence
  source 1..1071: mol_type = other DNA
atgacactcttgtggtgtgttgtatctttatacttttacggcatacttcagagtgacgcgtctgagaggtgtgatgactggggcctggatacaatgaggcaaatccaggtgttcgaagatgagcctgcacggataaagtgtcctctgtttgaacacttcttgaagttcaactactctaccgcacattcagctggcctaacactgatctggtactggacaagacaggacagggacttggaggaacctatcaatttccgtctaccagagaatcggatatctaaagagaaggacgtgttgtggttccggcctaccctgcttaacgacacaggaaactatacctgtatgctgcgaaatacgacatactgctccaaggtagcttttcccctcgaggttgtccagaaggactcctgctttaactcccctatgaaactgccagtgcataagttgtacattgaatatgggattcagcgcatcacctgtcctaatgtggacggttacttcccgagttcagtcaagccgaccataacctggtatatggggtgctacaagattcagaatttcaacaatgtcatacctgaaggcatgaatctgagctttctgatcgccctgatcagcaataacgggaattatacatgcgtggtgacctacccagagaatggaagaactttccacctgactcggacgttaacagtgaaggtggttggttcgcctaagaatgcggtcccacccgtgattcattcgcccaacgaccatgtggtgtacgagaaggaaccaggtgaggagctcctgataccatgcacggtgtatttttcttttttgatggactctaggaatgaggtgtggtggaccatagatggtaaaaaacctgacgacatcacaatagacgtcactataaacgagagcatatctcatagtcgtaccgaagatgagactcgaactcagatcctgtccattaagaaggtcaccagtgaggaccttaagaggtcatacgtctgccacgctagatcggctaaaggcgaggtagcaaaggcagcaaaggtgaaacaaaagggcaatcgatgcggccagtag

SEQ ID NO: 227117 - DNA, 1713 bp, synthetic construct
  misc_feature 1..1713: note = Description of Artificial Sequence: Synthetic coding sequence
  source 1..1713: mol_type = other DNA
atgaccctcctgtggtgcgtcgtctccctctatttttatggaatattacagtccgatgcatctgagaggtgtgacgattgggggctagacacaatgcgccagatccaggtgttcgaggatgagcctgccaggattaagtgcccactcttcgagcatttccttaagttcaattattccaccgcccattctgccggtctcactcttatctggtattggaccaggcaggatcgtgatctggaagagccgatcaactttagactgccagaaaatcgcattagtaaggagaaagatgtgctgtggttccgccctacactcctgaatgacacgggaaactacacttgtatgttgcggaataccacgtactgctccaaggtcgccttccccctcgaggtagtgcaaaaagactcttgctttaacagcccaatgaaacttccagtgcacaaactgtacattgaatacggcattcagcgaatcacttgtccaaatgtggacgggtacttcccaagctcagtaaaacctactatcacttggtacatggggtgctataaaattcagaactttaacaacgtgattcctgagggaatgaacttaagttttctgattgccctcatctctaataacggtaattacacatgcgtagtcacttacccagaaaatggtcggacattccatctgactcggactctcacagtaaaagtcgtcggctcacctaagaacgccgtgccgcctgtgattcattcccctaacgatcacgtggtgtatgagaaggagccaggcgaggagctcttgataccatgcactgtttatttcagcttcctgatggactctcgaaacgaggtctggtggactattgatggcaaaaagcctgatgatataactatcgacgtgactatcaatgagagcatttctcactccaggactgaggatgaaacaaggacccagattctgtccatcaaaaaggtgacttctgaagacctgaagagatcttacgtttgccacgcaagatccgcgaagggtgaggtcgcaaaagccgctaaagtgaagcagaaagtcccggctcctaggtacaccgtggagcttgcctgcggctttggagccacggttctactggttgtcatactgatcgtggtgtaccacgtgtactggttggagatggtgcttttctacagggcccactttgggacagacgaaacaatactagacggcaaggagtatgacatctatgtgtcttacgccagaaatgcagaggaagaggaattcgtcctgctgacacttcgcggagtcctggaaaatgaatttggctacaagctgtgcattttcgaccgggacagtctgccaggcggtatcgtgacggacgagaccctcagctttattcaaaaatcaaggcggctactggtggtgcttagcccaaattacgtactgcaggggacccaggctctcctggaacttaaggcgggactcgagaatatggcttccagagggaacattaatgttatcctcgtgcaatataaggccgtgaaggaaacaaaggtgaaggaattgaagagagcaaagacggttctgaccgtgatcaaatggaagggtgagaagagcaagtacccccagggtcgtttttggaagcagctccaggtggcaatgccagtgaagaagagtcctaggcggtcaagtagtgacgagcagggactcagctacagctcactgaaaaacgtttag

SEQ ID NO: 227118 - DNA, 2064 bp, synthetic construct
  misc_feature 1..2064: note = Description of Artificial Sequence: Synthetic coding sequence
  source 1..2064: mol_type = other DNA
atgacattattgtggtgcgttgtgtccttatacttttacggcattctgcagagtgacgcgtcagaaaggtgtgatgattggggccttgatacaatgaggcaaatacaggtttttgaagacgaacccgctaggataaagtgtccactattcgagcattttcttaagtttaattactctactgcccacagcgctgggctcaccctcatctggtactggacaagacaagaccgggatttagaggagcccataaatttcagactgcccgaaaataggatcagcaaggagaaggacgtgctctggtttcgcccaactcttcttaacgatactggtaactatacctgcatgcttaggaatactacttactgctctaaggtggcatttccgctcgaggtagtgcaaaaggactcatgctttaacagccccatgaaactcccggttcataagctttacattgagtatggtattcagcgcataacgtgtcccaatgttgacggctacttccctagctctgtgaagcccaccatcacatggtatatgggctgctacaaaatccaaaacttcaataacgtgattcccgaggggatgaacctctcattccttatcgcacttatttccaataacggcaattacacctgtgtcgtcacgtatccggaaaacggacgaacatttcatctcaccagaactctgacagtcaaagtagtcggaagcccaaagaacgctgtgccccctgtgatccactcccctaacgaccacgtggtgtacgaaaaagagcctggcgaagaactgctgattccgtgtaccgtgtacttctcattcctgatggatagcaggaacgaagtctggtggacaatcgacggcaaaaagccagatgacattacaatcgatgttacaattaatgaaagcatttcccacagccggaccgaagacgaaacccggacccaaatcctcagcattaagaaagtcacttccgaggatctgaagcgctcctacgtgtgtcatgcaagaagcgccaagggagaggtcgccaaggctgctaaagttaaacaaaaagtccctgcccctcgatacaccgtggagctcgcttgcgggtttggagcaacagtgcttcttgtggtaatcctcatagtcgtctaccacgtgtattggttggagatggttctgttttatcgtgcccattttggcactgacgaaaccattctggacggtaaagaatatgacatatatgtctcctacgctagaaacgctgaggaggaagagttcgtgcttttgaccctgcggggtgtcctggaaaacgagttcgggtacaagctctgcattttcgatcgggactctttgccaggtggaaatacagtggaagctgtgtttgacttcattcagaggagccgcaggatgatagtcgtcctgtcgccggattatgtaactgaaaagtctatctcaatgttggagttcaagctgggcgtcatgtgtcagaatagtatcgctaccaaactcatagtggtcgagtatcgtccattagaacaccctcatcctggaatactgcagctgaaggagtctgtgagctttgtgtcttggaagggggagaaatcaaagcactccggctcaaagttttggaaagctctgagacttgctctgcctctgcggtccttgtccgccagcagtggatggaacgaatcttgctccagccagagcgatatcagcttggaccacgttcagcgtagaaggagtaggctcaaggagccacccgaactgcagagttctgagcgagccgcagggtcacccccagctccaggcacaatgtctaagcaccggggaaagtcatccgccacatgcaggtgctgcgttacttactgcgagggtgaaaatcacctacgaaataaaagccgagcagaaattcacaatcagccacagtgggaaacacatctctgcaagcctgtgccccaagaatctgagacgcagtggatccaaaatggcacgcgtctggaaccccctgctcctcagatcagcgcgctcgccctgcaccactttacagacttgagtaataacaacgatttttacattctgtag

SEQ ID NO: 227119 - DNA, 1713 bp, synthetic construct
  misc_feature 1..1713: note = Description of Artificial Sequence: Synthetic coding sequence
  source 1..1713: mol_type = other DNA
atgacactgctttggtgcgtggtgtcgttgtacttctatgggattctccagtcagacgctagtgagagatgcgacgattgggggctggacaccatgcgccagatccaagtcttcgaggacgaacccgcaagaatcaagtgtccactttttgagcacttcttgaagttcaactattctacggcccattcagcaggccttacgctgatttggtactggactaggcaggacagagacctggaggagccaattaacttcaggctccctgaaaataggataagtaaagagaaggacgtcctgtggtttcggccaacgctgctgaatgatacaggcaattatacttgcatgctgaggaacactacttactgttcgaaggtcgcattcccccttgaggtcgttcagaaggactcttgctttaacagtcccatgaagcttcccgtacacaaattgtatatcgagtatgggattcagagaatcacctgtcctaatgtcgacggctatttccctagcagcgtaaagccaacaatcacttggtatatgggatgttacaaaattcaaaattttaacaatgtgataccagagggtatgaatctgagcttcctgatagctctgattagcaataatgggaattacacctgtgtggtgacataccccgaaaatgggaggacgtttcacctgactagaactttgacagttaaggtagtggggagccctaaaaacgcggtaccgccagtcatccatagccctaatgatcacgtagtgtatgagaaggagccaggagaggaactcttgattccttgtacggtatacttcagtttccttatggactccagaaacgaagtgtggtggactattgatggcaagaagcctgatgatatcaccatcgacgtgacgataaatgagtctatctcacactcacggactgaagacgagaccaggactcagattctgagcatcaagaaggttacatccgaggacctcaagagatcttacgtctgccatgccagaagcgctaaaggtgaagtggcaaaggcagcaaaagtgaaacagaaggtacctgcccctcggtacaccgtggagctcgcatgcgggttcggcgctaccgtcctcctggtcgttatactcattgtagtgtaccacgtgtattggttggaaatggtgctgttttatcgtgctcactttggcacagatgagaccattcttgacggtaaagagtacgacatctatgtgtcttacgccagaaatgcagaagaggaagagttcgtactgttgaccctgcggggagttctggagaacgaatttggctataaactgtgcattttcgaccgagattccttgcccggtggcatcgttaccgatgaaactctgtcctttattcaaaagtctaggcggctcttagttgtgctctcgcctaattacgtactgcaaggaacacaggctctcctggagctcaaagccggtctggagaatatggcatccagaggcaacatcaacgtaatactggtgcaatacaaggcagtcaaggaaaccaaggtgaaagaactgaaacgggctaaaaccgtacttacggtgatcaaatggaagggcgagaagtccaagtacccgcagggaagattctggaaacagttacaagtggccatgcccgtgaagaagtcaccccgacgatcgtcttccgacgagcaagggctgtcatacagctctttaaaaaacgtttag

SEQ ID NO: 227120 - DNA, 438 bp, synthetic construct
  misc_feature 1..438: note = Description of Artificial Sequence: Synthetic coding sequence
  source 1..438: mol_type = other DNA
atgaccctgctctggtgcgtggttagcctgtacttttacggcatactgcagagcgacgcctccgagagatgcgatgattggggattagatactatgaggcagattcaggttttcgaggacgagccagccaggatcaagtgcccgctctttgagcacttcctgaaatttaactactcaacagctcattccgcgggactcactctgatctggtactggacccgtcaggaccgcgatctagaagagccgattaattttaggttgcccgaaaacaggatctctaaggaaaaggatgttctttggttcagacccactcttctgaatgacactggcaattatacctgtatgctccgaaacacaacctattgcagtaaagtggcattccccttggaggtggtacagaaagactcttgcttcaacagtcccatgaagctcccctag

SEQ ID NO: 227121 - DNA, 2091 bp, synthetic construct
  misc_feature 1..2091: note = Description of Artificial Sequence: Synthetic coding sequence
  source 1..2091: mol_type = other DNA
atgaaggcccctatccctcacttgatcctgttgtatgctactttcacgcagtctctcaaggtcgtcacaaagagaggatcagcggacggctgtacagactggtctatagacattaagaaatatcaggtgctggtcggtgagccagtgagaataaagtgcgcactgttctatgggtacattagaactaattatagcttagcacagagcgcagggttgtctctgatgtggtataagtcctcaggcccaggagacttcgaagagcctattgcgtttgatggttctagaatgagcaaggaagaggacagcatttggtttcgaccaactctcctgcaagactcaggcctgtacgcttgcgttattaggaacagcacttactgcatgaaagtatctatcagcttgactgtgggtgagaacgatactggcttgtgctacaactccaagatgaagtactttgagaaagcggaactgagcaaatctaaagagattagttgcagagatatcgaggactttctgttgcccacccgggaaccggaaattctgtggtataaagagtgccggactaaaacatggcggccatccatcgtgtttaaaagagatacactgctgattcgtgaagtgcgggaggacgacataggaaactacacttgcgagctcaaatacgggggtttcgtggtgcgccgtaccaccgaactgactgtcacagctcctttgaccgacaaaccccctaaactactatatcccatggagagcaaattaacgatccaggagactcagttgggggattccgctaatctcacatgtcgagcgttcttcggttatagcggggacgtcagcccccttatttactggatgaaaggtgaaaaattcatcgaggacctcgatgagaaccgcgtctgggagagcgatatacgaatactgaaggagcacctgggcgagcaggaagtctccatctctttgatcgtcgatagcgtggaagaaggtgatctgggaaactatagttgttatgtcgaaaacggcaatgggcgtaggcacgcctcagtgctcctccacaagagggagttaatgtataccgtggaacttgccggtggcctgggcgctatccttctcctccttgtgtgtctagtaacgatctacaagtgttacaagatcgaaataatgcttttctaccgaaatcacttcggagctgaagagttagacggagacaacaaggattatgatgcctatctctcttacactaaggtcgaccctgaccagtggaatcaggaaaccggagaagaggagcgctttgccctggagatcttgcctgacatgctcgagaagcattacggctataagctgttcatccctgatagagatttaattccaaccgggacttacatcgaagacgtggcaaggtgcgttgaccaatccaagcgactgattattgtgatgacacccaactatgtggtcaggcgaggatggtctatcttcgaactcgagacgaggctgcgaaacatgcttgtgacaggagagattaaagtgatcctgatcgagtgctcagagttgagagggatcatgaactatcaggaggtcgaggcactgaaacacactataaaactgcttactgtgatcaagtggcatgggcctaagtgcaacaaactgaactctaagttttggaagcggcttcaatatgagatgccattcaagcggatcgaaccaatcacccatgagcaggccctggacgtatcagaacagggtccgtttggggagttgcaaacagttagcgccattagtatggccgctgccactagcactgcattggctaccgcccacccagatttgaggtctaccttccacaatacataccactcccagatgcggcagaagcactactacagaagttacgagtacgacgtgccacctaccggtactctgcccctcacatctataggcaatcagcacacgtattgtaacatccctatgacattaataaacggacagcggcctcagactaaaagctctcgagaacagaatcctgacgaagcccacacaaactctgccatcctccctctcctgccgagggaaactagtatatcttccgtcatctggtag

SEQ ID NO: 227122 - DNA, 2091 bp, synthetic construct
  misc_feature 1..2091: note = Description of Artificial Sequence: Synthetic coding sequence
  source 1..2091: mol_type = other DNA
atgaaagcccctattcctcacctaattctgttgtatgctacctttactcagagcctcaaggtggttaccaagagaggcagcgcagatggttgcacagattggagtatcgatatcaaaaaataccaggtactagtcggcgaacctgtccggatcaagtgtgctctgttctatggatacatccgcaccaactatagcctggctcagagtgccggactgagcctgatgtggtacaagtcctccggcccaggggactttgaggagccgattgcatttgatggcagccgcatgtctaaggaggaggattctatttggttcagaccaactttgctacaggactccggtctgtacgcctgcgtaatcagaaacagtacttattgcatgaaggtatcgataagcttgaccgtcggggagaacgacaccggcctctgctataactccaaaatgaagtatttcgagaaggctgagctaagtaaatccaaggaaatatcctgtcgcgatatagaagatttcttgctcccgacccgggagccagagattttgtggtataaggagtgccgcaccaagacatggagaccgagcatcgttttcaagcgtgataccctattgattcgggaggtgcgcgaggacgatatcggaaactatacctgcgaactgaagtacggagggtttgtcgtgaggagaaccacagaactcaccgtgacagcacccctgaccgacaagcctccaaagctactgtacccgatggagtcaaagcttacaatacaggagactcaattaggcgattctgctaacctgacctgtcgcgcatttttcggatatagcggagatgtgtcacccctcatatactggatgaagggtgagaagtttatcgaggacttggatgagaatagagtgtgggaaagcgatattaggatcctgaaggaacacttgggggagcaggaagtatcaattagtctgatcgtggactcagtcgaggagggagacttaggcaactattcgtgctacgtagagaacgggaatggtaggcggcacgccagcgtcctgctgcacaagagggaactaatgtacaccgtggaactcgcaggaggactgggtgctatcttactcttactcgtctgcctcgtgaccatttacaagtgctacaagatcgaaatcatgttgttttatagaaaccatttcggggctgaggaacttgatggggacaataaggattacgatgcctacctgtcctacaccaaagtggaccccgatcagtggaatcaggagaccggggaagaagaacgttttgcccttgagatcctgcccgatatgctggaaaaacattacggctacaaactcttcattccagatcgggatctcattccaacaggtacctacatagaagatgttgccagatgtgtcgatcagtcgaagagactgattattgtcatgactccgaactatgttgtccgacgcggttggtcaatcttcgagctcgaaaccagactcagaaatatgctcgttacgggcgagatcaaggtgatattgattgaatgttcggaattaagaggtattatgaactatcaggaagtggaggcactgaagcatacaatcaagctgttgaccgtaatcaaatggcatggaccgaagtgtaacaagttgaactctaagttttggaagcgcttacaatatgaaatgccttttaagcgcatcgagcctattacccacgaacaggccctcgacgtctccgagcagggcccattcggcgaactgcagaccgttagcgccattagtatggccgcagcaaccagtacggctctcgcaaccgcccaccccgacctgcgcagcaccttccataacacataccactcacaaatgagacagaagcactattaccgatcctatgagtacgatgtccctcctaccgggaccctccctcttaccagtatcggtaatcagcatacatattgtaacatcccaatgacactgataaatggtcagcgccctcagacgaagtcatctcgggagcaaaaccccgatgaggcccataccaattccgctatactgccactcctgcccagagaaactagtataagcagtgtgatttggtag

SEQ ID NO: 227123 - DNA, 2061 bp, synthetic construct
  misc_feature 1..2061: note = Description of Artificial Sequence: Synthetic coding sequence
  source 1..2061: mol_type = other DNA
atgaaaccccctttccttctggcgctcgtggtctgtagcgtcgtgtcgaccaacctgaaaatggtgagcaaaagaaacagtgtagacgggtgcatcgactggagcgtggatctcaaaacgtatatggctctcgccggagaacccgtcagagtaaagtgcgctcttttttatagctacatccggaccaactacagcacagcccagtctactggtttgagacttatgtggtacaagaacaagggcgacttagaagaacctataattttttccgaagtgcgcatgtctaaagaagaagattccatctggtttcactccgccgaggctcaggattcagggttctacacttgcgtgctaaggaactctacgtattgtatgaaggtgtccatgtcacttacagtagcagagaatgagtctggactctgttataattcaaggattagatatctggagaaaagcgaagttactaaacgtaaggagatttcctgtcccgatatggatgattttaaaaagtcggaccaggaacctgatgtcgtgtggtataaggagtgtaagcccaagatgtggcgttccattatcatccagaagggtaatgccctgcttatccaggaggtgcaggaagaggacggcggtaactacacctgcgagttgaaatatgagggtaagctcgtcagaaggaccacagagttgaaggtcacagccctgctcaccgacaaacccccaaaacccctgtttcccatggaaaatcagccaagtgtgattgacgtgcaacttggtaagcccctgaatatcccttgcaaagctttcttcggtttctccggggaatctggcccaatgatctattggatgaaaggcgaaaaattcattgaagaactggccggtcacattagagagggggagatccggttgttgaaggagcatctgggcgagaaggaggttgagctggctttgatcttcgactccgtcgtcgaagccgacctcgcgaactacacctgtcatgtggagaacaggaacggaagaaaacacgccagcgtgctccttcggaagaaggacctaatctacaagatcgaactggccggagggctgggggcaatctttctgcttctcgtgctgcttgtcgtgatctataagtgctacaacatcgaattaatgctattttataggcagcattttggcgcagacgagaccaacgatgacaacaaagagtatgatgcatatctctcctacacgaaggttgaccaggacacactcgactgcgataatcctgaagaggaacagtttgctctggaggtactgcccgatgtcctggagaaacactacggatacaagcttttcattcccgagcgtgatctgatcccctcagggacttatatggaggatctgactcggtacgtggaacagtcccggaggcttattatagttctcacacccgattacatcctgcgccgaggctggagcatttttgaactggagtctagattacacaatatgctagtaagcggggagattaaagttattctgattgagtgtaccgagctgaaaggcaaagtgaactgccaggaagtagaaagccttaagcgcagtatcaaattgctttcccttattaagtggaagggctcgaaatcctctaaacttaacagtaaattctggaagcacctggtttacgagatgcctatcaagaaaaaagaaatgctccctcggtgtcatgtgctcgatagcgctgagcaggggctctttggcgaactccagccaatcccctctattgccatgacatccacttcggcaaccctggttagttcccaggctgacctgcccgaattccatccaagcgatagcatgcaaatccgccattgctgtcgcggatacaagcacgaaattccggctaccaccttaccggtgccgtctctcggaaaccaccatacttactgcaatctgccacttacactgctaaacggacagctccctttgaataataccctaaaggacactcaggaattccaccgtaactcctcgctcttgcctcttagcagtaaagagctttcctttacctcagacatttggtag

SEQ ID NO: 227124 - DNA, 2061 bp, synthetic construct
  misc_feature 1..2061: note = Description of Artificial Sequence: Synthetic coding sequence
  source 1..2061: mol_type = other DNA
atgaagcctccttttctgctggctttagtagtctgctctgtagtatccacaaacctgaagatggtgtcaaaacggaactccgtggacgggtgcatagactggagtgtggacctgaagacttatatggcacttgccggagaaccagtgagagttaaatgcgccctgttctattcttacatccggacaaattattctactgcacaatccaccgggctccgcttgatgtggtataaaaacaaaggggatcttgaggagccaataatttttagtgaggtgagaatgtccaaggaagaggactcaatctggttccattccgctgaagcgcaggattccggtttctacacatgtgtgctcagaaattcaacctattgcatgaaggtcagtatgtccctgaccgttgcagagaacgaatctggactgtgctataactctagaatcaggtatcttgaaaagagtgaggtgacaaaacgcaaggagattagctgccctgacatggatgacttcaagaaatctgaccaggaacctgacgtggtgtggtataaagagtgtaagcccaaaatgtggcgaagtattatcatacagaaggggaatgccctgctgatccaagaggtccaagaggaagacggaggaaattacacctgcgagttgaagtatgagggtaagcttgtacgaaggacaacggagctcaaggtgaccgccctgctgaccgacaaacccccaaaacctctcttcccaatggagaatcagccatcagtgatcgatgtccagctgggcaaacctctgaatataccctgcaaggccttcttcgggttcagcggcgaaagtgggccaatgatttactggatgaagggcgagaagtttatcgaagaacttgcaggccacatcagagagggcgaaattcgcctactgaaggagcatctgggcgagaaggaagttgaacttgcacttatctttgatagcgtcgtagaggccgatctcgcaaattacacgtgtcacgtggagaaccggaacggacggaagcacgctagcgtgctgctccgaaagaaggacttaatttataagattgaactggccggtggtctgggcgcaatcttccttttgctcgtcttactcgtggtcatttacaaatgttacaatattgaacttatgctgttttatagacaacacttcggagcagacgaaacaaatgacgacaacaaagagtatgacgcctacctatcttacacaaaggtcgaccaggacactctggattgtgataatccagaggaagaacagttcgccctcgaggtgctgccagacgtcttggagaagcactatggctacaagctcttcatccctgagagggacttaattccaagcgggacgtatatggaagacctgactcgctacgttgaacagagccgaaggctgataattgtactcacgcctgactacatcttgcgcaggggatggagcatcttcgagctagagagcagactccataacatgcttgtgtccggagaaatcaaggtgatccttattgagtgtaccgagctgaagggaaaggtgaactgtcaagaagtggagtccctgaagaggtccattaaactgctgtcacttattaaatggaaagggtctaagtcatcaaagctgaacagcaaattttggaagcatctcgtttacgaaatgcctatcaagaaaaaggaaatgctacctagatgccacgtcttggactccgctgaacaggggttattcggcgagctgcagccgatccctagtatcgctatgacctccactagcgccacgcttgtctcctctcaggctgacctgccagaattccatccttctgatagtatgcagatccggcactgttgcaggggatataaacacgagattccggcaacgacgcttccggtgccaagcttaggaaaccaccacacttactgcaatctcccccttacactcctgaatggccagctgcccctgaacaacactctgaaagacacccaggaatttcacaggaattcctcacttctgccgctgtcatctaaagaactgagctttacttctgacatttggtag

SEQ ID NO: 227125 - DNA, 876 bp, synthetic construct
  misc_feature 1..876: note = Description of Artificial Sequence: Synthetic coding sequence
  source 1..876: mol_type = other DNA
atgagagacaacaaagaatacgacgcttatttgtcctacactaaagtggaccaggacacactggattgcgataatcccgaagaagagcagttcgccttggaggtattgcccgacgtcctggagaagcactacgggtacaagctgtttatccctgagcgggacctcatcccctccggtacatacatggaagatctgacccgatacgtggaacaatcaagacgactgattatcgtgctcactccagattacatccttagacgagggtggtcaattttcgagttagagtccaggctgcacaatatgctggtctcaggagagatcaaagtaatcttgatagagtgcacggaactcaagggcaaagtaaattgtcaggaggtcgaaagtcttaagcggtccatcaagctgctgtccctcatcaaatggaaaggctccaaatcatccaagcttaacagcaagttctggaaacatctagtctacgagatgccaatcaagaagaaggagatgttgcccagatgccacgtgctcgattcggccgagcaggggttattcggggaactgcagccaattccttccattgccatgacctccacatctgcaacactcgtgagctctcaagccgacttacccgagttccaccctagtgattcaatgcaaattagacactgctgcagaggctacaaacacgaaatacctgcaaccacccttccggtgcctagtctgggtaatcaccatacgtactgcaacctccccctgacactgctgaacggacaacttcccctgaacaacacgttgaaggacacacaagaatttcatagaaattccagtctgttgccccttagcagcaaggagctgtctttcaccagtgatatttggtag

SEQ ID NO: 227126 - DNA, 1197 bp, synthetic construct
  misc_feature 1..1197: note = Description of Artificial Sequence: Synthetic coding sequence
  source 1..1197: mol_type = other DNA
atgctgagactctatgttctggtcatgggcgtatcagcatttacgctccagccggcagctcatacaggtgctgcgaggagctgtaggtttaggggcaggcattataagagggagttcagactggagggggagcccgtggccctacggtgcccacaagtgccttattggctctgggcgagtgtgtcccccagaatcaatctgacatggcacaaaaacgactccgcaagaactgtgcccggtgaagaggaaacacgaatgtgggcccaggacggagccttatggctgttgccggcactgcaggaagacagtggcacttatgtgtgtacaactcgaaacgccagctactgcgataagatgtcaatagagctgagagtgttcgagaataccgatgccttcctgccctttattagctaccctcagatcctaaccttgagtacctccggggtgcttgtgtgcccggacctgtcagaatttactcgagataagacggacgtgaaaatacagtggtacaaggattcactcctgctggataaggataatgaaaagtttctctcagtacgtggaacgactcatttactggtgcatgacgtagccctggaggacgccggatattacaggtgtgtgttaaccttcgcacacgaggggcaacagtacaacatcactcgaagtatcgaactgaggattaaaaagaaaaaagaagagaccatacctgtgattatcagccctttaaaaactattagtgccagtctgggctcccgcttgacaatcccctgtaaggtgttcctaggtactggcactcccctgactaccatgctctggtggaccgcaaacgatacacacatcgaaagtgcgtaccccggtggcagagtcaccgaaggccctagacaggagtatagcgaaaataatgagaactacattgaagttccactgatcttcgatccagtgacacgtgaagacctgcatatggacttcaagtgtgtcgtgcacaatacactgtcgttccagactctgcgcactaccgtaaaagaggccagttcaacgtttagctggggcatagtgttggcacctctgtccctggcctttctggtgcttggaggcatatggatgcatcgaagatgtaagcatcggactgggaaggccgatggactgaccgttttgtggccccatcaccaagattttcagagttaccccaaatag

SEQ ID NO: 227127 - DNA, 1197 bp, synthetic construct
  misc_feature 1..1197: note = Description of Artificial Sequence: Synthetic coding sequence
  source 1..1197: mol_type = other DNA
atgctgaggctgtacgtcttagtcatgggagttagtgccttcaccttgcaaccagcagctcacacgggggctgccaggagttgccgatttcgtggtcgacattacaagcgagagttccgtttggagggcgagcccgtggccctaagatgccctcaggtgccttattggttatgggcctcggtgtctcctaggattaatcttacatggcacaaaaatgactctgccaggacggtccctggggaggaggaaacacgaatgtgggcccaagatggtgccctctggttactgcctgccctgcaggaagactccgggacctacgtctgcacaacacgcaacgccagctactgtgataaaatgtccatcgaactccgggtgttcgagaacaccgacgcctttctgccgtttatctcataccctcagatacttacattgagtacatctggtgtactagtgtgcccagatctcagtgagtttaccagagacaaaacggatgttaaaatccagtggtataaggactcattgcttctggacaaggacaatgaaaaatttttaagcgtcagaggcaccactcacctactcgtccatgacgtcgctcttgaggatgcgggatactatagatgcgtcttgacatttgctcacgagggtcagcagtataatattacacgttcaattgagctgcgaattaaaaaaaagaaggaggaaaccattccagtgattattagccccctgaagactatcagcgcctctcttgggagtcggcttactatcccatgtaaagttttcctcggcaccggcacccccctcaccacaatgttatggtggaccgcgaatgacactcacattgaatctgcctatccgggagggagggttacggaaggaccaaggcaggagtatagcgagaacaatgagaactacattgaagttcccctcatcttcgatcctgtgacccgcgaggatttgcatatggatttcaagtgcgtggtccacaatactttatcgttccagacccttcggacaaccgtcaaggaagcttcctccacattcagctggggcatcgtgctcgcaccgttaagtctggcattcctcgtcctgggtgggatttggatgcatcgtagatgcaagcatagaacggggaaggccgatgggttaaccgttctgtggccccatcaccaggatttccagagctatcccaaatag

SEQ ID NO: 227128 - DNA, 690 bp, synthetic construct
  misc_feature 1..690: note = Description of Artificial Sequence: Synthetic coding sequence
  source 1..690: mol_type = other DNA
atgctacggttgtacgtcctggttatgggagttagtgcctttactctgcagccggcagctcatacaggagcagcgagatcttgcagatttcggggaaggcattacaagagagaatttagactggagggagagcctgtagccctgcgttgcccacaagtaccttattggttgtgggcgtccgtgagcccaagaataaacctgacctggcacaaaaatgactcagcgcgaacagtgcctggcgaggaagaaacccggatgtgggcgcaggacggcgcactatggcttctccctgcattgcaggaagacagcggaacgtacgtttgtactaccagaaacgctagttattgtgacaaaatgagtatcgaactccgggtcttcgaaaacacagacgctttccttcccttcatatcctatcctcagatcctgaccttgtctacttcgggagttcttgtctgtcctgacctgagcgaattcacaagggacaagaccgatgtgaaaatacagtggtataaggatagtttgctcttagacaaagacaacgaaaaatttctttcggtacgcggtaccacccatctgctggtgcacgacgtggccctcgaggatgctggctattatcgatgtgtcctgacttttgcccacgaaggccagcaatacaacataacacgctccattgaactgagaattaaatag

SEQ ID NO: 227129 - DNA, 1098 bp, synthetic construct
  misc_feature 1..1098: note = Description of Artificial Sequence: Synthetic coding sequence
  source 1..1098: mol_type = other DNA
atgctgcctcccctgccatcaaggcttggcctgctgctgcttctgctgttatgccccgctcacgtggggggactctggtgggccgtgggcagtcctctcgtcatggatcctacaagcatttgtcgcaaagctaggaggttggcaggaagacaggccgaattgtgtcaggctgaacctgaagtggtggcggagttggccagaggagctcgactcggggttagagaatgtcagtttcagtttaggttccgtcgatggaactgttcatctcactccaaggcgttcggaagaatcctgcagcaggacattcgggagacagcttttgtattcgccattacagcagccggagcctcccacgcggtgacacaggcctgcagcatgggtgaattgctacaatgcggttgtcaggctccccgaggcagggcgccaccacgaccgagcgggcttcctggtacccctggcccacctgggccagccggttctccagaaggtagtgcagcctgggagtggggagggtgcggtgacgacgtggatttcggagacgagaaatcaaggctttttatggacgctagacacaaaaggggcaggggagatatccgagctttagtccagcttcacaacaacgaggccggaaggcttgccgtaagaagccacacacgcactgaatgcaagtgtcatggcctatctggctcctgcgctctccgaacctgttggcagaaacttcctccatttagggaggtcggtgctagacttctggagcgattccatggcgcatccagagtcatggggaccaacgatgggaaggctctccttccagccgtacgaaccctgaagcctccagggagggcggacctgctttacgctgcagactctcctgacttctgtgcacccaaccgccgtacgggatctccaggcacgcgcggtagggcgtgtaactcatccgcccctgatttgagcggctgtgatctgttgtgctgcggccgaggccataggcaggaaagcgttcagctggaagaaaactgtctctgtcgttttcactggtgttgtgttgtacagtgtcaccggtgccgagtccggaaggagctgagcctttgtctttag

SEQ ID NO: 227130 - DNA, 987 bp, synthetic construct
  misc_feature 1..987: note = Description of Artificial Sequence: Synthetic coding sequence
  source 1..987: mol_type = other DNA
atgggtttttggatcctcgctatattaactattctcatgtactccactgctgccaagttcagcaagcagtcctggggcttggagaatgaagctctcattgtccggtgcccacgacaaggtaaaccttcctataccgtggactggtattatagccagacaaacaaatctatccctactcaagagagaaacagggtgttcgcatcgggccagttgctcaagttcctgccggcagccgtagcagacagtggtatttatacttgcatagtccgcagccctaccttcaatagaaccgggtacgcaaacgtgacgatttacaagaagcagagcgactgcaacgtgccagactacttaatgtattcaactgtgagcggtagcgagaagaactccaagatttactgtccaacaatcgatttatataattggactgccccattggaatggttcaaaaattgccaggcactccagggctcgcggtatagggctcacaaatcgttcttggttattgataacgtaatgactgaagatgccggagattacacctgcaagtttatccacaacgagaatggtgcaaactactccgttaccgccactaggtcattcacggtcaaagacgaacaggggttctctctttttccagtgatcggagctcccgcacagaatgaaatcaaagaggtggaaatcggcaaaaatgccaacctaacatgtagtgcctgctttgggaaagggacgcagttcctagccgcagtgctgtggcagctcaatgggactaaaattaccgatttcggcgagcctaggatccagcaggaggaaggccagaaccaatcattctccaatgggctggcctgccttgacatggttctacgaatagccgacgtcaaggaagaggacttactgctgcagtatgactgtctcgcactgaatctccacggactgagaagacatacagtccggctttcccgcaagaatcctagcaaggaatgtttttag

SEQ ID NO: 227131 - DNA, 780 bp, synthetic construct
  misc_feature 1..780: note = Description of Artificial Sequence: Synthetic coding sequence
  source 1..780: mol_type = other DNA
atgggcttttggatcttagcaatcctgaccatcctcatgtacagcaccgctgccaagttctctaagcagagctggggactcgaaaatgaagctctcatcgtgcggtgtcctagacaaggaaagccctcatatactgtagattggtactattcccagactaacaagtctattcccacccaggaacgaaatagagtgtttgccagcggccaattactgaagttcctccccgctgctgtagccgacagtgggatttatacatgtatcgtaagaagcccaaccttcaacagaacgggctacgccaatgtgaccatttacaagaagcagtctgattgtaatgtgcccgactacctgatgtattcaaccgtgagtggatctgaaaaaaactctaaaatctactgtcccacaattgatttgtataattggacggcccctctcgaatggtttaaaaattgccaggctcttcaggggtcgcgctaccgggctcacaagtcatttttagtgatcgataacgtgatgaccgaggacgctggcgactacacctgcaaatttatccacaatgagaacggggcaaattacagtgtgactgctacaaggtcattcactgtaaaggtctggtgtcagtccttttgcaagctcaaaaagtcactcattttcagcaatactcactggatccaatcccttatgcggggtttcgtaatggtttactacggcgtgcacaaatgttgccgcgtggtctttaatctgtgcctgcagtacttccaacatcaccagtggccctag

SEQ ID NO: 227132 - DNA, 636 bp, synthetic construct
  misc_feature 1..636: note = Description of Artificial Sequence: Synthetic coding sequence
  source 1..636: mol_type = other DNA
atgtatagcaccgttagtggcagcgaaaagaattctaagatttactgtccaacaattgacctgtacaactggactgcaccattagagtggtttaaaaactgccaggctttgcaggggagccgctatagggcgcacaagtctttcctggttatagataacgtcatgaccgaggacgcaggggactacacctgtaagtttatccataacgagaacggggcaaactatagcgtcacagcaacccgctcatttacagtcaaagacgagcaaggcttttcactgtttccagtaatcggagcgccagcccagaatgagattaaagaagtggaaattggaaaaaatgctaacctcacatgtagcgcatgctttggcaaaggcacccagttcctggccgctgttctgtggcagctcaacggcaccaaaattaccgatttcggagagcctaggatacagcaagaggagggccaaaaccaaagcttctcgaatgggctggcctgtctggacatggtgctgcgtattgctgatgttaaggaagaagatctgctgcttcagtacgattgtctggcactgaatttgcatggcttgaggagacacaccgttaggctgtcacgaaagaacccaagtaaagagtgtttttag

SEQ ID NO: 227133 - DNA, 945 bp, synthetic construct
  misc_feature 1..945: note = Description of Artificial Sequence: Synthetic coding sequence
  source 1..945: mol_type = other DNA
atgggtttctggatcctggcgatcctgacaattctgatgtattccaccgcagcaaaattctctaaacagagttggggtttggaaaacgaggcactaatcgttaggtgtcccaggcaggggaagccaagctacacggtggattggtactacagccagaccaataaaagtattcccacacaggagaggaacagggtcttcgcaagtggccagctgctcaagttcctgcctgccgcagtggccgattctgggatctacacatgcatcgttaggtcgcctacctttaaccgcacgggttacgctaacgtaaccatatataagaagcaaagcgactgcaatgtacccgactaccttatgtattccactgtgtctggttctgaaaagaatagtaaaatttattgccctaccatcgacttgtacaattggacagccccactggagtggtttaaaaattgtcaggcattacagggctcacggtacagagcgcataagagcttcctcgtcatcgacaacgtgatgacggaggacgctggagactatacgtgcaagtttattcataatgaaaatggggctaattactcggttacagccacacgtagtttcacagtcaaggacgaacagggctttagtctgtttccagtcatcggggctccggctcaaaacgaaatcaaagaagtggaaatcggtacccagttccttgcagctgtgttgtggcagcttaacgggaccaagattacagacttcggcgagcctagaattcagcaagaggaggggcagaatcagtcattttccaatggactcgcctgccttgacatggtgctgcggatcgcggacgtcaaggaagaggacctcctcctgcagtacgactgtcttgcgctgaacctgcatggcctgaggagacacacagtgagactgtccaggaagaatccatcgaaggagtgcttctag

SEQ ID NO: 227134 - DNA, 117 bp, synthetic construct
  misc_feature 1..117: note = Description of Artificial Sequence: Synthetic coding sequence
  source 1..117: mol_type = other DNA
atgggtttctggatattggccattctgactattctgatgtactccactgccgcaaagtttagcaagcagtcttgggggctggaaaacgaggccctgatcgtgagatgcccacgatag

SEQ ID NO: 227135 - DNA, 1728 bp, synthetic construct
  misc_feature 1..1728: note = Description of Artificial Sequence: Synthetic coding sequence
  source 1..1728: mol_type = other DNA
atgtggtcccttctcctctgtggcctgtctattgccctccccctgtctgtcaccgccgatggctgtaaggacatttttatgaaaaacgaaatactttccgccagccagccatttgccttcaattgcacgttccctccaatcactagcggagaggtctcagttacatggtataaaaattcatcgaagatcccagtgagtaagatcattcaatcccggatacaccaggacgaaacgtggatccttttcctgcccatggagtggggcgattcaggcgtgtaccagtgcgtgattaagggcagagactcttgccaccgcatccatgtgaacctcaccgtgtttgagaagcactggtgtgataccagcatcgggggactgcctaaccttagtgacgaatacaagcagattctacacctggggaaagacgatagtttgacctgtcaccttcacttccctaaatcatgtgttcttgggcctattaaatggtataaagactgtaacgagattaaaggagaaagatttacagtgctcgagacgagactcctggtgtcaaacgtctcagcagaggatcgtggaaattatgcctgccaggccattctcactcattccgggaagcaatatgaggtattgaatgggatcacggttagtattactgaaagagccggatatggtggaagcgtgccaaaaatcatctacccaaagaatcactcaattgaggtgcaacttgggaccaccctgatcgtggattgcaatgtcactgataccaaggacaatactaacctgagatgctggcgggtcaataacactcttgtggacgactactacgatgagagcaagcggatcagggagggggtcgagacccacgtgtctttccgggagcataacttatatacagttaacattacatttttggaagtgaaaatggaggattacgggcttcccttcatgtgccacgccggtgtgagcaccgcatacattattctgcagctcccggcacccgactttcgggcttacctgatcggcggattaattgctctggtggccgtggccgtttccgtcgtgtacatctacaacatatttaaaatcgacatcgtcctttggtaccgctcggcctttcactctactgagaccattgtcgacgggaagctgtatgacgcatacgtgctttatcctaagccgcacaaggaatcccagagacatgctgtggatgccctcgtgctcaatattttacccgaggtgctcgagcgccagtgcgggtacaagctatttatcttcggcagagatgaatttcccggtcaggccgtggcaaatgtaatcgacgaaaacgttaaactatgccgacggctaatagtgatcgttgtgccagagagtcttggcttcggcctgctgaagaatctcagtgaggaacagatcgccgtttatagcgctctgatccaagatggcatgaaagtgatcttgattgagctagagaagattgaagattataccgtgatgcctgagtccatccagtatattaagcagaagcacggtgctatcaggtggcatggtgatttcaccgaacagtctcagtgcatgaagaccaaattttggaagactgtgagataccatatgccccctagaagatgtcgaccttttccacccgtccagctgctgcagcacaccccttgctacaggaccgccggacctgagctcgggtcccggcgaaagaaatgcactttaaccaccggctag

SEQ ID NO: 227136 - DNA, 519 bp, synthetic construct
  misc_feature 1..519: note = Description of Artificial Sequence: Synthetic coding sequence
  source 1..519: mol_type = other DNA
atgtggagtctgctgctgtgtggactgagcattgcactgccactcagcgtaacagccgacggctgtaaggatatcttcatgaagaacgagatcttatccgcctctcaacccttcgcatttaattgtaccttcccaccgatcacatctggggaggtgtccgtgacttggtataagaatagcagcaaaattcccgtcagtaaaatcatccagagccgaatccatcaagatgagacctggatactattcctgcctatggaatggggagactctggagtgtaccaatgtgtgattaagggcagagatagttgccacagaattcacgtaaatctgaccgtctttgagaagcattggtgcgacacgtcaatcgggggacttcctaacttgagtgacgaatacaaacagatcttgcacctggggaaggacgactctctgacatgtcacctgcattttcccaaatcctgcgttctggggccaataaagtggtataaggactgcaatgaaatcaagggagagaggtag

SEQ ID NO: 227137 - DNA, 1374 bp, synthetic construct
  misc_feature 1..1374: note = Description of Artificial Sequence: Synthetic coding sequence
  source 1..1374: mol_type = other DNA
atgacgggcctggtgtctctttcatacttcccacttagcactagaagctgcgctttgcagtcctgctccccagtctggggatgcggaccctgctgtagtgccggatgccccagtccatttcactgcctgtcgcaacaggattgcaacgagatcaagggagaacggtttacggtcctggagacgcggctgctcgtgagcaacgtgtccgccgaagaccggggaaattacgcctgccaagccatccttacgcatagcggaaaacagtacgaggttctgaatgggatcacagtaagcattaagcgcgcaggctatggtggctcggtacccaaaatcatatatcccaagaaccattccattgaagttcagctgggaaccaccctgatcgtggactgcaatgtgacagataccaaggataataccaatctgcgctgttggcgcgttaacaataccttggtcgacgattattacgacgaatccaagcgtatccgtgagggggtcgagacacacgttagttttcgcgagcacaacctatataccgtaaacataaccttcctggaggtcaagatggaggattatggtctcccctttatgtgtcatgccggagttagcactgcgtacattattttacaactgcctgcccctgactttagggcctacttgattggaggccttattgcattggtggccgtagccgtaagtgttgtttatatatacaatatctttaagatagacatagtcctctggtaccggtccgcgtttcactccactgaaactatagttgacggtaagctttatgacgcttacgtgttatatcccaaaccccataaggaaagccagaggcacgctgtagatgctctggtgttgaacatcctacctgaggtgctggagcggcagtgcgggtacaaactgttcatctttggtcgggacgaattcccaggtcaggccgtggcgaacgtgatcgatgagaacgttaaactttgccggagactgattgttatagtcgtgcccgaatccctgggctttgggttattgaaaaacttatctgaggaacagatcgccgtttactcggctctgatccaggacggaatgaaggtaatcttgatcgagttggagaaaattgaagactacaccgtgatgccggaaagcatacagtacatcaagcagaagcacggcgctatacggtggcacggcgattttacagaacagtcccaatgcatgaagacaaagttctggaaaaccgttaggtaccacatgcctccgagacgctgccgcccattcccccctgtacagcttctccagcacactccgtgctacaggacggctggccctgaactcgggtctcggcgtaagaagtgtaccctgaccaccggctag

SEQ ID NO: 227138 - DNA, 1728 bp, synthetic construct
  misc_feature 1..1728: note = Description of Artificial Sequence: Synthetic coding sequence
  source 1..1728: mol_type = other DNA
atgtggagcttgctcctatgcggactatctatcgccctcccactgtctgtgactgcagacggctgtaaagacattttcatgaagaatgaaattctgagcgccagtcaaccctttgctttcaactgtacattccctccgatcacatccggagaggtgtccgtcacctggtataagaatagttcaaagataccagtctccaagattattcagtcacggattcatcaggatgagacctggatactgttcctaccgatggaatggggagacagtggagtttatcaatgtgtgatcaaggggagggattcatgtcaccgaattcatgtgaacctgacggtgtttgagaagcactggtgtgatacatctataggcggtttgccaaatttgtccgacgaatacaagcagatccttcaccttggaaaggatgacagtctgacctgccatctgcacttcccaaagtcttgcgtcctcggaccaattaaatggtacaaagactgcaatgaaattaaaggagagcgattcactgtcctggaaactaggctgctcgtatctaatgttagcgccgaagatagagggaactatgcttgccaggccatccttactcatagtggtaagcagtacgaagtgctgaacggaataactgtttcaatcaccgaacgcgcaggctacggaggcagcgtacctaaaattatttacccaaaaaaccacagcatcgaagtgcagctgggcaccaccctcatagtcgactgcaacgtcactgacactaaagataacacaaatctcagatgttggcgcgtcaacaacactctggtggacgattactatgatgagagcaagagaatcagggagggagtggagactcacgtcagctttcgagaacataacctgtacaccgtcaacattacctttctcgaggtgaaaatggaggattatggactgccgttcatgtgccacgctggtgtgagcactgcctacataattctacaactcccagctcccgacttcagagcttacttgattgggggactgattgctctggttgctgtggccgtgtcagtagtgtatatctataatatttttaagattgacatcgttctttggtatcgtagtgcctttcatagtacggagaccatagtggatggtaagttgtacgacgcttatgtgctctaccccaagccccacaaagagagtcagcgacacgccgtggatgccctcgttcttaacatacttccggaagttctcgaacgccagtgcggctacaagctttttatttttgggagggacgaatttcctggacaggcagtagccaacgtcatcgatgaaaatgtgaagttatgtcggcgacttatcgttattgtcgtgcctgaaagcttaggctttggcttgcttaaaaatttatctgaggagcaaatagccgtgtatagtgcgctaatccaggacggcatgaaagtaatattgattgaactggagaagatcgaggactacactgttatgcccgagagcattcaatacattaaacagaagcacggcgctattaggtggcacggcgattttaccgagcagtcccagtgtatgaaaaccaagttctggaagacggtaagataccacatgcctccccgtaggtgtcggccatttccacccgtccagctactccaacacactccgtgctataggacagctggacctgagcttggctccagaaggaaaaagtgcaccttgacaactggatag

SEQ ID NO: 227139 - DNA, 300 bp, synthetic construct
  misc_feature 1..300: note = Description of Artificial Sequence: Synthetic coding sequence
  source 1..300: mol_type = other DNA
atgcagccccgtgtgctgctggttgtggccctcctggccctgcttgccagtgctcgagcctcagaagcggaggacgcctctctgttgtcattcatgcagggctacatgaagcacgcgacgaagacagcaaaggacgcattgtcatctgtgcaggagtcacaagtagcccaacaggcacgtggctgggtaaccgatggcttttcctccctgaaggattactggtccaccgtgaaagacaagttttccgaattctgggatttggaccctgaggtgcggcctacatccgcggttgccgcttag

SEQ ID NO: 227140 - DNA, 1500 bp, synthetic construct
  misc_feature 1..1500: note = Description of Artificial Sequence: Synthetic coding sequence
  source 1..1500: mol_type = other DNA
atgtcccggacagagttgccgtcacccccatccgtctggttcgaggcagaatttttccatcatatcttgcactggactccaattcccaatcagagtgagagcacctgttacgaagttgccctcctccgatacgggatagagagctggaatagtatcagtaattgtagccagaccttaagctatgatctaacagccgtgaccctcgacttataccattccaatggataccgcgctcgtgtgcgggctgtggatgggagccgccactccaactggactgttactaacacaaggttctctgtcgatgaagtgacactaacggtcgggtctgtgaatctggagatccacaacggttttatactggggaagattcagctccccagacccaaaatggctccagccaatgacacctatgagtcaattttcagccactttcgcgaatatgaaattgccattcgaaaggtccctggtaactttacattcacgcataagaaagtaaagcacgagaatttttccctgttaacctcaggagaagtcggtgaattttgcgtgcaggtgaagccatcagtggcatctcgtagcaataaaggcatgtggagcaaagaagagtgcatctcactgacgcgtcagtactttaccgttactaatgtgattatctttttcgccttcgtgctgctgctctcaggggcattggcatattgtttggcgctgcaactgtatgtgagacggagaaaaaagctcccttctgtgctgctctttaagaaaccatccccttttatatttatctcacagcgaccttctcccgagacgcaggacacaattcaccccctggacgaggaagctttcctgaaagtcagccctgagttaaagaaccttgacctccacggctctacagactccggctttggctccacaaagcctagcctgcaaacagaggaacctcagtttctcctgccagatcctcaccctcaggcagacagaactctgggtaacagagagccgcctgttctgggggactcttgcagctcaggatcttcaaacagcactgatagcgggatatgtctccaagagccgagtctgagcccctccaccggccctacatgggagcagcaggttggtagtaatagtcgaggtcaggacgacagtggcattgatctggttcagaatagcgaaggcagagcgggtgatacccagggcggtagcgctctcggccaccatagcccccctgagcccgaggttcctggcgaagaagaccccgctgccgtcgcttttcagggctatctgcgccagacaaggtgcgccgaggagaaagcaactaagactggctgtctcgaggaggagtcaccactcacagatggacttgggcctaaattcggaaggtgtctggtagacgaggcaggcctccatccaccagccctggccaaaggatatctgaagcaggatcccttagaaatgacactggcctccagcgggcctaatggaaccgtcgagcccgcacactag

SEQ ID NO: 227141 - DNA, 1677 bp, synthetic construct
  misc_feature 1..1677: note = Description of Artificial Sequence: Synthetic coding sequence
  source 1..1677: mol_type = other DNA
atgtcgcgcactgagcttccatcccctccgtcggtgtggttcgaggctgagttttttcatcatatcctccactggacaccgatccctaaccaatcggaatctacctgctatgaggtggctctgctaaggtacggcattgagtcatggaatagcatttctaactgttctcagaccctgtcctatgatctgaccgcagttacacttgatctgtaccactccaatggatacagagcacgcgtgcgcgcagttgacggctcacggcatagcaactggacagtgaccaacacccggtttagcgtggacgaagtcaccctgacagtagggagtgtaaacctggagattcacaatggcttcatactgggcaaaatccaactgccaagacccaagatggctcccgcaaacgacacatacgagagcattttttcacattttcgcgagtatgaaatagccataagaaaagtacctggaaacttcacatttacccacaagaaggtgaagcacgagaactttagcctgctgacctccggcgaggttggcgagttttgtgtccaagtcaagcccagcgtggccagtagatccaacaagggaatgtggagcaaggaagaatgtatttccctcacaagacagtattttacagtaaccaatgtaatcatattctttgccttcgtcctgctattatccggagcactggcatactgccttgcgttgcaactgtacgtccgaagacgcaagaagttgccgagtgtgctcctgttcaagaaaccttcgccgtttattttcatcagccagaggcctagccctgaaacccaggatacaattcaccccctcgatgaagaagcatttctaaaggtcagccccgagctaaaaaatctggacctgcacggctctacggacagtggatttgggtccaccaagccaagtctgcagacggaagagccccagttccttctgcccgacccccacccccaggctgatagaacccttggaaatagagagccacccgttctgggtgactcctgcagctctgggagctctaattctaccgacagtggcatctgcctgcaggagccgtctctttctcccagtacaggtccgacctgggagcagcaagtcggcagcaacagtcggggtcaggacgactctggcatcgatctggtgcagaactccgaaggcagagcgggtgacacgcaggggggaagcgctctcggacaccattctcctccagagccggaggtacccggagaggaggatccagccgctgtggcattccagggctaccttcggcagactcgctgcgctgaggagaaagccactaaaaccggctgcctggaagaggagagccctctgactgatggccttggacctaagtttggtcgctgtctcgttgacgaagctggcctccatcctcctgcgttggccaagggttatttgaaacaagatcccttggaaatgaccctggcatccagcggcgcacccaccggacagtggaatcagcctactgaggagtggagtttgctcgccctgtcatcctgttctgatctagggatttccgattggtcctttgcacatgatttagcaccactgggatgcgtggcggctcctggaggattgttgggaagctttaactctgatttagtcacattaccgcttatcagctccttgcagagcagcgagtag

SEQ ID NO: 227142 - DNA, 1290 bp, synthetic construct
  misc_feature 1..1290: note = Description of Artificial Sequence: Synthetic coding sequence
  source 1..1290: mol_type = other DNA
atggccccagccaatgacacctatgagtcaattttttcccatttccgagaatacgagattgccatcagaaaggtacctgggaattttacattcactcacaaaaaggtgaagcatgaaaacttttccctgctgacttctggcgaggtgggagaattttgcgtgcaggttaagccttctgtggcttcccgcagtaacaaagggatgtggtcgaaggaagaatgcattagtctgacccgccaatatttcaccgttactaacgtgattattttctttgcctttgtgctccttctgtccggcgcactggcttattgcctagctttgcagctgtatgttcggagacgaaaaaagcttccttcggttctcctgttcaagaagcccagtccttttatctttatctctcaaaggccctccccagagacccaggatactattcaccctctagacgaagaggcatttctcaaggtttctccagagttgaagaatcttgatctgcacggcagcacggactctggattcggatctaccaagccgtcacttcaaactgaagagcctcagttccttttacccgatccacacccccaggcagatcggactctgggcaacagagaaccacctgtgcttggagatagttgctcttccggaagcagcaattccacggacagtggcatatgcttgcaggagccatcccttagcccctctacagggccaacttgggagcaacaagttggctcaaactctcggggacaagacgattcagggatagatttggtccagaatagcgagggacgcgcaggggatactcagggcggatccgcgttgggccaccactccccgccagaacccgaagtccctggcgaggaagaccctgccgctgtagctttccagggatacctgaggcaaacgcgctgtgccgaagagaaggccactaaaaccggctgtctcgaggaagagagtcccttaaccgacggcttgggtccgaagttcgggaggtgcctggtcgatgaagctggcctccatcctcccgctctggccaagggttacttaaagcaggatccactcgaaatgacccttgcgtcgagtggggctcccacaggccagtggaatcagcccactgaggagtggtccttgctggccctgtcttcatgttccgatttgggcatcagcgactggtcttttgctcatgacctggccccattgggatgcgtcgccgctcctggaggcctgcttggcagttttaattcagatctggtgactctgccactgatctcatccctgcagtcttccgagtag

SEQ ID NO: 227143 - DNA, 1269 bp, synthetic construct
  misc_feature 1..1269: note = Description of Artificial Sequence: Synthetic coding sequence
  source 1..1269: mol_type = other DNA
atgagctcttcatgcagtgggctgagcagagtgctggtggcagtggctaccgctctcgtgtccgcgagtagcccgtgcccccaggcctggggcccaccgggagttcaatacggacaacccggaaggagtgtcaaattatgctgtccaggagtgaccgctggggaccccgtgagctggtttagagatggcgaacctaagctcctgcagggtccagactctggtctgggccacgaactggtcctcgcacaagcagactcgaccgatgaaggcacttacatctgtcaaacactggatggcgcactgggcggaacagtcacgctgcagctgggatatccgcctgctcgacctgtcgtttcctgtcaggccgctgactatgagaacttctcgtgcacctggtccccttcccaaatctccggcctgccaacacgatatctgacttcatatagaaaaaagaccgtgttgggggcagactcccaacggagatctccctccaccggcccttggccatgtccgcaggacccccttggcgcagccaggtgcgtcgtgcatggagcggagttttggtctcaataccgcattaatgtgacggaagtcaatccactaggagccagcaccaggctgctcgacgtcagcttgcagtctatactgcggcctgaccccccacaggggctgcgcgtggagtctgtgccaggatatccccgacgcctccgcgcatcatggacgtacccggcatcctggccctgtcagcctcattttcttctgaagttcaggctgcagtataggcctgctcagcatccggcatggtcaaccgtcgagcctgccggtcttgaagaggtgattactgatgccgttgccggactaccgcatgccgtcagagtcagcgccagagactttctggacgcaggaacctggtctacctggtctcctgaggcatggggaacgcccagtacaggcaccattccaaaagagattcccgcttggggccagttacatacgcagcctgaagtcgaacctcaggtagacagtccagcaccacctagaccgagcctccagccacacccaagactactggatcatagagactcggtggaacaggtcgctgttctggcttcgcttggcatactgagctttttgggacttgtggccggagccttggctctgggactctggcttaggttacgacgcggtggcaaagatggttcacccaagccaggatttctagcatcagttattcctgtcgacaggcgcccaggcgctccaaacctgtag

SEQ ID NO: 227144 - DNA, 1173 bp, synthetic construct
  misc_feature 1..1173: note = Description of Artificial Sequence: Synthetic coding sequence
  source 1..1173: mol_type = other DNA
atgtcttctagctgcagcgggttaagtagagtgctcgtcgccgtcgccaccgccttggtgagtgccagctcaccctgtccccaagcatggggacccccaggcgtgcagtatggacaacccggtaggtctgtcaaactgtgctgtccaggtgtgacggccggtgatccggtgtcctggttcagggacggcgagccgaagctcttgcaggggccagatagcggcctgggacacgagctagtgctggcccaagcagattctactgacgaaggtacgtacatttgtcaaaccctcgatggagcgctagggggaacagtgacccttcagctgggctatcccccagctcggccagttgtatcttgtcaagctgccgattacgagaacttttcatgcacctggtcgccatcccaaatctctggcctgcctacgcgctacctcacaagctaccggaagaagacagtgctgggggcagactcccagcgaagaagcccctccacaggcccttggccttgtccacaggaccctctgggagctgcaagatgtgtagtacacggtgctgaattctggtcacagtacagaataaacgttactgaggtgaaccccctcggggcaagcacacgcctgctcgatgtctccttacagtccatcctgcggccagacccgccacaggggctcagggttgagtccgtgcctgggtaccccagacgtctccgcgcttcttggacgtatccggctagctggccttgccagccacactttcttctgaaattccggcttcagtatcggcctgcacagcacccagcctggtctacggttgagcccgctggactggaagaggtcatcaccgatgctgtggccggtcttccacacgccgttagagtttctgctcgcgatttcctggatgccggtacttggtctacgtggagccctgaagcctggggcacgccttcaacagggacaataccaaaggagattcctgcctggggccagctccacacgcagcccgaggtggagccacaggtagatagccccgcaccaccgagaccgtcgctccaaccccacccacggttactcgatcaccgcgatagtgtggagcaagtggcagtgctcgcctcactaggcatcctgtctttcctagggttagtagctggggctctagctttaggactgtggtag

SEQ ID NO: 227145 - DNA, 1269 bp, synthetic construct
  misc_feature 1..1269: note = Description of Artificial Sequence: Synthetic coding sequence
  source 1..1269: mol_type = other DNA
atgtctagtagttgctccggcttgtctagggtgctggtcgcagtcgcaaccgcgctggtgtctgcatctagcccttgtcctcaggcctggggaccaccgggagtgcagtatgggcagccaggccgtagcgtgaaactttgttgtccgggagttaccgccggagaccctgtctcctggttcagagacggcgagcctaagctccttcagggacccgacagcgggcttggacacgagctggtcctcgcgcaggctgactcgactgacgaaggcacctatatctgccaaaccttggatggcgctttgggcggtaccgtcacgttacagttgggttatccccctgccaggcctgttgtgtcttgccaggcggctgactatgagaatttcagctgcacatggtccccctcacagatctctggtctacccactagatacctcaccagttatagaaagaagaccgttctcggggcagacagtcagagaagaagcccttcaacggggccttggccatgccctcaggaccccctcggtgccgctcggtgtgtggtccatggcgcagaattttggtcccagtaccggatcaacgtgaccgaggttaacccccttggagcctcgaccagacttctggacgttagcttacaatccatcttaagaccagacccgccacagggtctgcgcgtggagagcgtgccgggatatcccaggaggctgcgagcatcgtggacgtatccagcatcttggccatgccagccacacttcctcctgaaattccggctgcagtacaggcccgcacagcaccccgcttggagtacagtcgaacctgcaggcctggaagaagtcattaccgatgcagtggccggtctcccccatgcagtgcgtgtgtcagccagagatttcctagatgccggtacatggtcaacttggtccccagaggcgtggggcacacccagcacaggaactataccgaaggaaattcccgcatggggccagcttcacacccagcctgaggtagaaccccaggtggatagccctgcaccccctaggccttccctacagccccatccaaggttgctggatcatagggattctgttgaacaggtcgcggttctggcgagcttaggcatcttaagcttccttggcctagtcgctggcgcattggcccttgggctgtggttgaggctgagacgtggtggcaaagacggatctcccaaaccaggatttctggcatcagtgattccagtggatagacggcctggcgctccaaatctgtag

SEQ ID NO: 227146 - DNA, 1269 bp, synthetic construct
  misc_feature 1..1269: note = Description of Artificial Sequence: Synthetic coding sequence
  source 1..1269: mol_type = other DNA
atgagcagcagctgctccgggctgtcgagggtcttggtcgctgtggccactgcgctggtttctgcgtctagcccatgtcctcaggcctggggcccaccaggagtgcagtacgggcagcctgggaggtccgtcaaactgtgttgtccaggagttactgctggggacccagtgtcatggttcagggacggagaaccaaagctattacaaggaccggacagcgggctgggacatgagctcgtccttgctcaagcagattccactgacgagggaacatatatctgccaaactctggacggggcactgggcggaactgttaccctgcagctggggtatccaccggctaggcccgttgtttcgtgtcaggctgctgattatgagaacttctcctgtacgtggtcaccatcccagatttcagggttgcctaccagatacttaacaagctacagaaagaaaacagtgcttggagctgatagtcagaggagaagcccctccacaggtccttggccatgtccacaggatcctcttggggctgctagatgcgttgtgcacggagccgaattttggtcacagtaccgcattaacgtaactgaggtgaacccattgggtgcttccactcgccttctcgacgtgtccctgcagagtattttaagacccgatccaccccagggtctgagagttgaatccgtaccaggctatcccagaaggctgagggccagctggacttaccccgcttcatggccatgccaaccccactttttgcttaagttcagactccagtaccggcctgcacagcaccctgcctggagcactgtggaacccgctggcctggaagaagtgatcacagatgcagttgcagggctgccccacgccgtccgggtgtccgcacgggattttctagatgcaggaacctggtccacctggtcccccgaggcatggggtacaccaagtactggaactattccaaaggagatccccgcttgggggcagttgcacacccaaccagaagtggaacctcaggtggattcgcccgctccacccaggccttctctccagcctcatcctcggttgctagaccatcgggatagtgttgaacaggtggccgtgctggcgtcattgggcatcttatccttcctgggcctcgtggccggtgccctggcgctaggcctgtggttacgcttaaggcgaggtggaaaagatggcagccccaagcctgggtttctggccagtgtgattcccgttgacaggcgccctggtgcacccaacctgtag

SEQ ID NO: 227147 - DNA, 813 bp, synthetic construct
  misc_feature 1..813: note = Description of Artificial Sequence: Synthetic coding sequence
  source 1..813: mol_type = other DNA
atgtcttcttcctgtagcggacttagccgggttctggtggccgtggccacagcactggtctccgcttcatctccttgcccacaagcctgggggcctccaggcgtccagtatggtcagcctggacggtccgttaaattgtgttgccccggagtaaccgctggtgatccagtttcttggttccgggatggtgaaccaaagctgctgcagggacctgacagtggtctaggtcacgagctcgtcctggcccaggccgactcaaccgatgagggcacttacatctgtcagacgttggacggcgcactggggggaacagtcactctgcaactgggatacccccctgctaggcccgtagtaagttgtcaggccgctgactacgagaatttttcttgcacttggtctcctagccaaatctcaggtcttcccacaagatatctgactagctacagaaaaaaaacagtcctcggagctgacagtcaacgcaggtctccttccacagggccttggccatgtcctcaagatccgcttggtgcagctcggtgtgtagtccacggggcagaattctggtcacaatataggatcaatgtgacagaggtcaacccgctcggcgcttctaccaggctgctagatgtgtcacttcagagcattctgcgccctgatcctcctcaagggttaagggtagagtccgttccaggctatcctaggcggctgagagcttcctggacttaccccgcatcctggccatgtcaaccccactttctcctgaaattcaggctccaatacaggccagcccagcacccagcatggtcaacctag

SEQ ID NO: 227148 - DNA, 504 bp, synthetic construct
  misc_feature 1..504: note = Description of Artificial Sequence: Synthetic coding sequence
  source 1..504: mol_type = other DNA
atgtccagctcatgctctggactgtctagggtcttggtcgccgtggcaaccgcgctggtgtccgcttctagtccatgcccccaagcttgggggccacccggtgtccaatacggccagccaggtcgctctgttaagctctgctgtcctggcgtgacagccggtgatcctgttagttggttcagagacggcgaacctaagctactgcaggggccagactcaggcttggggcatgagttggttttggcacaggcagacagcaccgacgaggggacctatatctgtcagaccttggacggagccctaggaggcacagtgacactgcagcttggctaccccccagcaagacctgtggtgtcgtgtcaggctgccgattacgagaatttttcatgtacctggagtccgtcccaaattagcggtcttcctacaaggtacctaacctcttacaggaagaagacggtgttgggcgcagactctcagagacgcagcccgtccaccggcccttag

SEQ ID NO: 227149 - DNA, 420 bp, synthetic construct
  misc_feature 1..420: note = Description of Artificial Sequence: Synthetic coding sequence
  source 1..420: mol_type = other DNA
atgagttcctcctgtagcggactttcacgggtgttggtcgctgtggcaacggccctggtcagtgcaagtagcccttgccctcaagcttgggggccacctggagtgcaatacggccaaccagggcgaagcgtgaagttatgttgccctggcgtgacggccggagatccggtgtcttggttccgggacggcgagccaaagctcttgcagggaccagatagtggtctaggccacgagcttgtgcttgcccaggccgactccactgacgagggaacttacatctgccagaccttggatggcgcattgggaggaaccgtgactctccagctgggctatcctcccgctcgaccggtggtaagttgccaagcagcagactacgagaatttctcctgcacgtggagccctagccaaatatcagggtag

SEQ ID NO: 227150 - DNA, 1989 bp, synthetic construct
  misc_feature 1..1989: note = Description of Artificial Sequence: Synthetic coding sequence
  source 1..1989: mol_type = other DNA
atggaacccctggtgacctgggtcgttcctttgctgttcttgttcctgctgagtaggcagggagctgcctgtcggacctccgagtgttgcttccaggatccaccatatcctgacgcagatagcggaagtgcaagtgggcctcgtgatcttcggtgctaccgaatctcttctgacagatacgagtgcagttggcagtacgagggccctactgctggggtgtctcattttttgcgatgttgcctaagctcgggacgatgttgttatttcgctgccggaagtgccacccggctgcagttttctgatcaggccggtgtgtctgtactttatactgtgaccctctgggtagaatcatgggcccgtaaccaaactgagaagagcccagaagtaacactgcagttgtacaattcagtaaagtatgagccacctttgggagatatcaaggtgtcaaaactcgctggccaattgcggatggagtgggagactcccgataaccaggtgggtgccgaggtacagttcagacatcgcacgcccagctcaccttggaagttaggggattgtgggcctcaagacgatgacaccgagagttgcctgtgccctctggaaatgaatgtcgcccaggagtttcaactgaggcgtcgacagctcggttcacagggcagtagctggagcaagtggtcctcccccgtttgcgtaccccctgagaacccccctcagcctcaagtccgtttttccgtcgagcagctgggccaggacggtcgacgaaggcttacccttaaggagcaaccaacgcagctcgagttacccgagggatgccagggactggcgccaggaacggaggtcacataccgtctgcagcttcacatgctcagctgcccctgcaaagcaaaagccacgcgaactttgcacttgggtaagatgccctatctaagtggagcagcatataacgtcgcggttatctcaagcaatcagtttggtccaggcctgaatcagacctggcatatcccagccgacacacacaccgagccagtggcactcaacatttctgttggcactaacgggaccactatgtattggcctgccagggcccaatctatgacttactgcatagagtggcagcccgttggccaggatggcggtttggcaacttgttccctcaccgcccctcaggatccggaccctgcaggaatggcgacttacagttggtctcgcgagtcaggcgctatgggacaagagaaatgttactatattactatttttgccagcgctcaccctgaaaagctcaccctgtggtcaactgtcctgtcaacataccattttggaggcaatgccagcgctgccggaactccacatcacgtctccgtaaagaatcacagcttggattctgtctcagtcgattgggctccatcgctcttaagtacctgtccaggcgtgctgaaagagtatgtggtgagatgtcgcgatgaagattcaaaacaggtctccgagcatccagttcagcccacagagacacaggttacactctctggtctgcgagctggtgttgcatacacagttcaagtgcgcgctgacacagcttggttgcggggtgtgtggagtcagccccagagatttagtattgaagtccaagtgtctgactggctgatattctttgcgtccctgggaagtttcttgtccatcctgctggtcggggtcctcggctatctcggattaaaccgggctgcacgacacctctgcccacccttacctaccccttgcgcctcttctgcgatcgagttccccggtgggaaggagacctggcagtggatcaatccggtcgacttccaggaggaagcttccctccaggaggcccttgtcgtcgagatgtcctgggacaagggagaaaggacagagcccctggaaaaaaccgaacttcctgaaggtgctccagagctggcattggacactgagttaagcctggaagacggagatagatgcaaggctaaaatgtag

SEQ ID NO: 227151 - DNA, 1146 bp, synthetic construct
  misc_feature 1..1146: note = Description of Artificial Sequence: Synthetic coding sequence
  source 1..1146: mol_type = other DNA
atggagcccctagtaacgtgggtcgtgccactcctattcttgtttttgttatcgcgccagggagctgcatgcaggacctctgagtgctgcttccaagacccaccataccctgacgccgacagcggaagtgccagcggcccacgggacctccgatgttatcgcatctcaagcgatagatacgaatgctcctggcagtacgagggtcccacagctggagtctcccattttctgaggtgctgtttgtcttcgggaaggtgctgttactttgcggcaggatcagctacccggcttcagtttagcgaccaggccggagtgagcgtcctctacactgtgactctgtgggtggaatcctgggccagaaaccaaaccgagaaatcgccagaggttacccttcaactctataactcagttaagtatgagcctcccctaggtgacattaaagttagtaagctggccggtcagctgagaatggaatgggaaactcccgataatcaggtgggggcagaggttcaatttcgccataggactcctagcagcccctggaagttaggggattgcggccctcaagacgacgacaccgagtcctgcctttgccccctggaaatgaatgtggcgcaggaattccagttgaggaggcgccagctgggctcccaggggtcctcttggagtaaatggtcttctcctgtgtgtgtacctccggagaacccacctcaaccacaggtgcgcttctccgtagagcagttgggtcaggacggtcgacgcagactcaccctgaaagaacaacctacccagctggaactcccagaaggatgccagggactagcgccaggaacagaagtcacttacagactccagttgcacatgctgtcatgtccctgtaaggctaaagcaactaggactctgcatctgggcaagatgccctatctgtcaggcgctgcttacaatgtggcggtgatatcctccaatcaatttggcccaggactcaaccagacctggcatatccctgctgatactcatacagacggtatgatcagcgcccattgtaacttgcggctgcctgattctcgggattcaccagctagcgcttcaagggtggcaggcattacggggatttgccaccacactaggttgattttgtacttttag

SEQ ID NO: 227152 - DNA, 1989 bp, synthetic construct
  misc_feature 1..1989: note = Description of Artificial Sequence: Synthetic coding sequence
  source 1..1989: mol_type = other DNA
atggaacctctggttacgtgggtcgtgcccctcttatttctgttcttgctctcccggcagggggcagcttgccgtacgtcagaatgctgttttcaggaccctccctacccagatgctgactcgggatcggcaagcggccctcgagatctgcgatgttatcgcatctcctcagatcgttacgaatgctcttggcaatatgagggtcctacagccggagtcagccactttttgaggtgctgtcttagtagcggcagatgctgctatttcgccgcaggcagcgccaccagactccaattctcggaccaagccggagtgtctgtgctgtacactgtgaccttatgggtggaatcttgggcacgcaatcagaccgagaagtcccctgaggtaacccttcagctgtataatagcgtcaaatacgagcccccactgggtgacatcaaggtgagcaagctggccggacagctccggatggagtgggaaactcctgataaccaggtgggcgctgaggttcaatttcgccaccgaactccgtcttctccgtggaagttgggcgactgcggccctcaggatgacgatacagagagttgcttatgccctcttgaaatgaatgtagcccaggagtttcaattacgacgcaggcaactggggtcacagggatcatcctggagcaaatggtcctctcccgtgtgtgtaccaccagagaaccccccacagccacaggtcaggttctctgtggaacaactcggtcaggacggcaggagacggcttaccctcaaggagcaacctacccaattagagctgccggagggatgccaaggattggccccaggcactgaagtgacttacaggttacagctacatatgctgtcatgtccctgtaaagccaaggctacccggacactccatttggggaagatgccttatctttccggggctgcctataacgtcgctgtaatttcctcaaaccagttcgggccaggtttgaaccaaacatggcacattcctgctgacacacatacagagcctgttgcgttgaacatctctgtcggaacaaacggtaccaccatgtattggccggctagggctcagtccatgacctactgtatcgagtggcaaccagtcggccaggatgggggactggcaacctgttccctgacagcccctcaggacccagacccagccggaatggccacatattcctggtcaagagagagcggcgctatgggccaggagaagtgttattacattacaatttttgccagcgcgcacccagagaagctcaccctgtggagcaccgtgctgagcacatatcacttcgggggtaatgcgtcagcggctggaactccccaccacgtctcagtcaagaaccactcactggatagtgtttccgtggactgggccccttccctccttagcacttgccctggcgtgttgaaggaatatgttgtgcgttgcagagacgaggactccaagcaggtgtctgagcatcccgtccagcctacagagacgcaggtgaccctctctggtcttcgggctggggtcgcatatacggtccaggtcagagccgacacagcctggcttagaggcgtgtggtcccagcctcagagattctctatcgaagtgcaagtctctgattggctgatcttcttcgcctctctcggatccttcttatctatcctgttggtgggcgtacttggatacctggggctgaaccgggctgctcgccatctgtgcccccctctgcccacgccatgcgcaagcagcgctatcgaattccccggtggcaaagaaacttggcagtggattaacccagtcgattttcaggaggaggcttcactacaggaggccctggtcgttgagatgtcctgggataagggcgagcggactgagcccctagaaaagactgagcttccggagggagcaccagagctggccctggacactgaactgtccctggaggatggggacagatgcaaagcaaagatgtag

SEQ ID NO: 227153 - DNA, 2589 bp, synthetic construct
  misc_feature 1..2589: note = Description of Artificial Sequence: Synthetic coding sequence
  source 1..2589: mol_type = other DNA
atggctcatacatttcgcggatgcagcctggccttcatgtttattatcacgtggctcctcattaaagcaaagattgacgcttgtaagcgaggggatgtgactgtcaaaccgtcccacgtgattttactgggatctacagttaatatcacctgctcgctcaagcccagacaaggttgtttccattacagccggaggaacaaactgattctgtacaaattcgacaggcggataaacttccaccatggccactctctgaactcccaagtaacaggcctccctctgggcaccactcttttcgtgtgcaaactggcctgcatcaactcagacgaaattcaaatttgcggtgccgagatcttcgtgggcgtagcccctgaacagcctcagaacttgagctgcatccagaagggggagcaaggaacagtagcttgcacctgggagaggggaagagatacgcacttgtacacggagtataccctgcagttgtccgggcctaagaacctaacctggcaaaaacaatgtaaggacatctactgtgactaccttgattttggaattaacttaactcctgagtctccagaaagtaattttacagccaaggtgacagcagtaaactcactgggaagtagcagttcgcttccttcaaccttcactttcctggatatagttcggccactgcctccttgggacatcaggatcaaattccaaaaagcctccgtctcacgatgtaccctctattggagggatgagggcctggtactgttaaacaggctgcgataccgtcccagcaattccaggctgtggaacatggtcaacgtcaccaaagcaaaaggacggcacgatctgctggatctgaaaccctttaccgaatatgaattccagatcagctcaaaactgcacctttacaagggttcctggtccgattggtccgagagccttagggcacagactcctgaagaggaacctactggaatgctggatgtttggtatatgaagagacatatagactactctagacagcagatatcactgttctggaagaacctgtcagtgtcagaggccagggggaagattctgcactatcaggtgaccctccaagagttgacagggggaaaagccatgacccagaacattaccgggcacaccagctggactaccgtcatccccagaaccggcaactgggcagtcgccgtgtccgcagctaacagtaagggaagctccctcccaactcggatcaacatcatgaacttatgcgaggccggactattggccccaaggcaggtcagcgccaattctgagggcatggataacatcctcgtgacatggcagccgcctcgtaaggatccgtctgccgtgcaggagtatgtggtggagtggcgcgaactccatccaggcggagacacccaggttccactaaactggctgcgatcccgtccatataacgtgtctgctctcatctccgagaatattaagtcatacatatgttatgagatcagagtgtatgcactgagcggcgatcagggtggatgttcctccatactgggaaactcgaaacataaggcccctttaagtgggcctcatatcaatgccataactgaggagaaggggagcatcctcatttcctggaactcaatccccgtccaggagcagatgggatgccttctacattaccgtatatattggaaggagcgtgattctaacagccagccgcagctgtgcgagattccctaccgggtgtctcagaactcacatcccatcaattcgctgcagccccgtgtcacctacgtactgtggatgaccgcactgaccgctgctggcgaaagtagccatggcaatgagcgcgaattttgtttacagggaaaggccaattggatggctttcgttgctccttctatatgcatcgcgatcatcatggtagggatcttcagcacgcactattttcagcagaaggtctttgtgctgctggctgcacttcggccacagtggtgctcgcgtgaaatccccgatcccgctaactcaacctgcgctaagaagtatcccattgctgaagagaaaacccagttgcccctcgacaggctgctcattgactggcctacccccgaagacccagagccactcgtgatcagcgaagtcctgcatcaggtgaccccagtgtttcgccacccgccttgctccaattggcctcaacgtgagaaggggatccagggtcaccaggcctcagagaaggacatgatgcactccgctagttcaccgcctcctccacgggctctacaagccgaaagccggcagctcgtcgacttgtataaggtcttagagagccggggatccgaccctaagccagaaaaccccgcttgtccctggaccgtgctccctgctggagatctccctactcatgatgggtacctcccgagcaatatagacgacctcccatctcacgaggcaccactagccgattcactggaagagcttgaacctcagcatatctcgctctccgtgttccctagttccagcttgcaccctctgacattcagctgtggcgataagctcacactggaccagcttaagatgcgctgtgatagtctaatgctgtag

SEQ ID NO: 227154 - DNA, 1980 bp, synthetic construct
  misc_feature 1..1980: note = Description of Artificial Sequence: Synthetic coding sequence
  source 1..1980: mol_type = other DNA
atggcccacacattcagggggtgctcactcgcctttatgttcattatcacttggctgctaatcaaggccaagattgatgcgtgtaagcgaggcgacgtcactgtgaagccttctcacgtcatcctcctgggatccaccgtgaacataacctgcagcttgaagcccagacagggttgtttccactattctcgacgaaacaagctgatcctgtacaaattcgatcgccgaattaattttcatcacggtcactctctgaattctcaggttaccggattaccattaggcaccacacttttcgtgtgcaagctggcctgcatcaattctgacgaaattcagatttgcggagctgaaatatttgtgggtgttgcacccgagcaaccgcaaaacctttcatgcatccaaaaaggggaacagggcactgtggcttgtacatgggaacgtgggagggacacccatctatacacggaatacaccctacagctctccggccctaagaatctaacctggcagaagcagtgcaaggacatctactgtgactatctcgatttcgggatcaatttgactcctgaaagcccagagtctaactttacggctaaggtgacagccgtgaactcactggggtcctcctcctccttgcctagcaccttcacattccttgacattgtgcggccacttcccccatgggacatccgcattaagtttcagaaagcgagcgtgtcaagatgcacgttgtactggcgtgacgaggggctcgtcctgctaaaccggttacgttaccggcctagtaattccagactgtggaatatggtaaatgtgaccaaggctaaaggcagacacgatctactggacctaaagccctttacagagtatgaatttcagatctccagcaaactccacctgtacaaggggtcctggagtgactggtctgagagtttaagagcccagacgcccgaggaggaacctaccggaatgcttgatgtctggtatatgaagcgtcacatcgattactcaaggcagcagatctctctcttttggaagaaccttagcgtgagcgaggcgcgaggaaagatcctgcattaccaggtaacactccaggagctgacagggggaaaggcaatgacacaaaatattacaggtcatacttcttggaccacagtgatccccagaaccggcaactgggctgttgcagtgagtgcagctaacagcaagggtagtagcttacccactagaattaacatcatgaatctgtgcgaggcaggtctcctggcccctcgccaggtatcagctaacagtgagggcatggacaatatcctcgtgacttggcagccccctcgtaaggatccatccgcagtccaggaatatgttgtcgaatggcgcgagttgcatccaggcggagacactcaggtccctctaaattggttgaggtccagaccatataatgtgagcgctctgatcagtgaaaatattaagtcctacatctgttatgagatcagagtgtacgccctgtcaggtgatcaaggcggttgtagttctatactcggcaattcaaagcacaaagcaccacttagcggaccacacataaatgcgatcacggaagagaagggcagcattctgatttcctggaacagcatccccgttcaggagcagatgggctgtctcttgcattaccggatttactggaaggagagagattcaaatagccagccgcagctgtgtgagatcccctaccgtgtctcacaaaattcccaccctataaacagcctgcagcctagggtgacctatgtgttatggatgaccgccctaaccgccgctggcgagtcttcacacggcaatgaaagggagttttgcttgcagggtaaggccaactggatggctttcgtcgccccaagcatctgtattgcaattatcatggtgggaatctttagcacccattacttccagcagaagaggcgccattcctgcccttggacgggctcctag

SEQ ID NO: 227155 - DNA, 693 bp, synthetic construct
  misc_feature 1..693: note = Description of Artificial Sequence: Synthetic coding sequence
  source 1..693: mol_type = other DNA
taacagaagggcgaacagggtacggttgcctgtacctgggagaggggcagggatacgcacttatacaccgagtatacgctgcagctcagcggtcctaagaatctgacgtggcagaagcagtgtaaggatatctattgcgattacctggattttgggattaatctaactccagagtctcccgagagtaacttcactgccaaagtgacagccgttaactccctcggtagttcaagttccctgccaagcacctttacctttttggacattgtaagaccgctgcctccttgggacatccgaattaagttccagaaggcctccgtttccagatgcacattgtactggagagacgagggcttagtcctgcttaaccgtctgcggtatcgcccatccaactcaaggttgtggaatatggttaatgtgaccaaagctaagggacgacacgatctgctagatttgaagccttttaccgaatatgagtttcagatttctagcaagctccatctgtacaaaggatcctggagtgactggtcggaatccttgagggcccagacccccgaagaagaacctacaggaatgctggacgtctggtatatgaagagacacatcgattattctaggcagcagatctccttgttttggaaagtttcattcaaaagacagctcaagacccaaggcaacaagactgaaggttag

SEQ ID NO: 227156 - DNA, 1980 bp, synthetic construct
  misc_feature 1..1980: note = Description of Artificial Sequence: Synthetic coding sequence
  source 1..1980: mol_type = other DNA
atggcccacactttcagggggtgttcgctggcattcatgtttatcattacctggctactaattaaagcaaaaattgacgcctgtaaaagaggagacgtgacagtcaaaccaagccatgtgattttgttgggctccacagtgaacattacttgctcccttaagccacgtcagggctgtttccactatagccgcaggaacaagcttatcctttataagtttgacaggagaattaacttccaccacgggcactcacttaactcgcaggttaccggtcttccgctgggcacaacccttttcgtgtgcaaactggcgtgcattaattctgatgaaatccaaatctgcggggcagaaatttttgtgggagtggctcccgaacagccccaaaatctgtcatgcatccagaaaggggaacaggggactgtggcatgcacttgggagaggggcagggatactcatctgtacacagagtacaccctacaactgtccgggccaaagaacttgacttggcagaagcagtgtaaagacatctattgtgattatttagattttggaataaatttgacccccgaaagtcccgaatctaactttacggctaaagtgaccgctgtgaatagcctcgggtcttcgagttcgctaccttccacctttacttttctggatatagtcaggcccctgccgccatgggatattagaataaaattccagaaagcaagcgtgagcagatgtacactatactggcgtgatgagggattagttttgctgaatcggttacgctacagaccaagtaattccaggctgtggaacatggtcaatgtaacgaaggcaaaggggagacacgacctcctggacctgaagccgtttacagagtacgaattccagattagctctaagctgcatctctataagggctcatggagtgactggtccgagtcactgcgtgcccagacacctgaggaagagcccactggcatgcttgacgtgtggtacatgaagcgccacattgactactcccggcagcagattagcctcttctggaagaacctctctgtgagcgaagctcgtgggaagattttacattatcaggtaactctgcaggagctgactggaggaaaggccatgactcagaatatcaccggccacacttcctggactaccgtgatcccacgcaccggaaactgggcggtagcagtctccgccgcaaattcaaaaggcagttccctccccactcgaataaacatcatgaacctgtgcgaggcaggacttctggctccgcgacaggtatctgctaactctgaaggcatggataatatcctggtgacctggcagcctcctaggaaagaccccagtgccgtgcaggagtacgtcgtggagtggcgggaactgcaccccggtggagacactcaggttccactgaactggttgcggtccaggccctacaatgtgtcagctcttataagcgaaaacataaaaagttacatctgctatgaaattcgtgtgtacgccctctctggcgatcaaggagggtgtagctccatcttgggaaattccaagcacaaggcacccctaagcggtccccacattaacgccataaccgaagaaaagggctctatacttattagttggaattcaattcccgttcaggagcagatgggttgtctgctgcactatcggatttactggaaggaaagagattctaactctcaaccacagctctgtgaaatcccctatcgggtgtcgcagaattcacatccaatcaactctctccagccgagggtgacgtatgtgttatggatgacagctctaactgccgctggcgagagcagtcacgggaatgagcgagagttctgtcttcaagggaaggccaactggatggccttcgttgctccgtctatttgtattgcaatcatcatggtggggattttcagtacccattatttccagcagaaaaggaggcattcatgcccttggaccggatcttag

SEQ ID NO: 227157 - DNA, 2331 bp, synthetic construct
  misc_feature 1..2331: note = Description of Artificial Sequence: Synthetic coding sequence
  source 1..2331: mol_type = other DNA
atggcccacacgtttagaggatgtagcctagcatttatgtttatcatcacttggttgctgatcaaggccaagatcgacgcttgcaaacgcggagacgtgaccgttaagccaagtcacgtaattttacttggcagcaccgtgaacatcacgtgtagtttaaagcctcgacaggggtgcttccattattctaggcgcaataaactcatactctacaagttcgaccggaggatcaactttcaccacggccacagcctcaactcgcaagtaacggggctgccgcttggtaccactctctttgtgtgcaaactggcatgcatcaattccgacgagatccaaatttgcggggctgaaatctttgtgggcgtggcccctgaacagccccaaaacttgtcatgcatccagaaaggggagcaggggaccgtcgcctgtacctgggagagaggtcgtgacactcatctgtatactgaatacactttacagctctctggtcccaagaaccttacctggcaaaagcagtgcaaagacatttactgcgattaccttgacttcggcattaacctgacacctgaaagccctgaaagcaatttcacagctaaggtgaccgctgtcaattccctcggcagctcttccagcctcccttccacttttacgtttttagacatcgtgcgcccactgcctccctgggacattagaattaagttccagaaggctagcgtctcacgctgcaccctgtactggcgggacgagggcctcgtattactgaatagactacgctacagaccatccaattccagactctggaacatggtgaatgtgaccaaagctaaaggccgtcacgatctgctggatcttaaacccttcacagaatatgaatttcaaataagttctaaactgcatctgtataagggctcatggtcagactggagtgaatccctgagggcccagacccctgaagaggaacccacagggatgctggatgtgtggtatatgaagcggcacatagattactcccggcagcagatcagtctcttttggaagaacctgagcgtgtccgaggcgcgaggcaaaatcctgcactatcaggtcactctgcaggagctgacaggcggtaaggcgatgacccagaacattacagggcatacaagttggaccacagtgattcctcgaactgggaattgggcagtcgccgtgtctgccgctaactcgaaggggagttcactgcctacgagaataaacatcatgaacctgtgcgaggctggtctgttggcccctaggcaggtctctgcaaacagtgaaggaatggataatatacttgtcacctggcagccccctaggaaagacccctccgccgtgcaggagtatgtggtcgaatggcgtgagctgcatcctgggggagacacccaagttccacttaattggcttcgcagcaggccatacaatgtttccgccctgatctctgaaatcccttaccgtgtctctcagaattctcaccccatcaactcactgcagccacgggtgacgtacgtcctgtggatgacagccttgactgccgctggggaatcctctcacggtaatgaacgtgagttctgccttcagggtaaagcgaattggatggcattcgtggcaccctccatctgtatcgcgattataatggtgggcatcttctctacccactacttccagcagaaggtctttgtccttctggccgctttgcgccctcagtggtgtagccgagagattcctgaccccgcaaattccacctgcgcaaaaaaataccctatcgcagaggaaaaaacccagttaccgctggatagactgctgattgattggccaacccccgaagacccagagcccctggtaatcagtgaggttcttcatcaagtgacacccgtgtttcgacatccaccatgctctaactggcctcagagggagaagggtattcaggggcaccaggcgtcagagaaggatatgatgcattccgcgtcgtcccctcccccacctcgggctctccaggccgaaagtcgccaactggtagacctctacaaggtgctggagagcagaggctccgacccaaagccggagaatccggcttgcccttggaccgtattacccgcaggagatctgcccactcatgacgggtacctgccatcaaacatcgacgacctgcccagccatgaggctccattagccgattcccttgaggaattggagcctcagcacatttcattaagcgtttttccctccagttccctccaccccttgactttttcctgcggcgacaaacttactctggatcagctcaagatgcgttgtgacagcctgatgctctag

SEQ ID NO: 227158 - DNA, 681 bp, synthetic construct
  misc_feature 1..681: note = Description of Artificial Sequence: Synthetic coding sequence
  source 1..681: mol_type = other DNA
atgagcagcccaaccgcctcaagcacgacaccacgctgtggaacgagcgcagggcctgccagtccaacctggcgatgccgggctactgctttgcatctgcaccaccctgtggaccagcttccgcaccaggtcctgcagccaaccacaggtcagcggcagccgggaacagggctgccctggcattcgacccccgctcagctcgctttggcagggctcagacaagcccagccgcacccacagcagcagcgcctgcaccagccaggccttaggggagtggacgctcatggctctgccgctcatgtccctcaagcagttccgcaggccgtgagggcacacccacctggacagctattatcctgggctgccgctgtctgcctcctttgccagcaccatttacaactccctggaaagaagagaaacagtaccctgtacatcacgatgttactgattgtcccagtaatcgtggctggtgctatcatagttctacttctctacctgaagcggctgaagattatcatttttcctcctatcccagacccaggtaaaatctttaaggagatgttcggcgatcagaatgatgacacgctccactggaaaaagtatgacatatatgaaaaacagacaaaggaagaaacagactcagtcgtgctcattgaaaatttaaagaaagctagccagtag

SEQ ID NO: 227159 - DNA, 840 bp, synthetic construct
  misc_feature 1..840: note = Description of Artificial Sequence: Synthetic coding sequence
  source 1..840: mol_type = other DNA
atggaatggccagcacggctatgcgggctgtgggccctgctcctctgcgccggaggaggcggaggtggtgggggagcagctccgaccgagacccagcccccagtcacaaatctgtctgtaagcgtcgagaatttgtgcactgttatctggacttggaacccccctgaaggcgcttcatccaactgctctctctggtacttcagtcattttggggacaagcaggacaaaaaaattgcccctgagactagaagatctattgaggtcccattgaacgagaggatttgtctgcaggttgggtctcagtgcagtaccaacgagagcgaaaagccttcaatcctggtcgaaaagtgcatcagccccccagaaggtgatcctgaaagcgccgtcaccgagctccagtgtatctggcacaatttaagctacatgaagtgctcatggttgcccggacgaaatacgagccccgatactaattacaccctttactattggcatagatccctagaaaagattcaccagtgtgaaaatatctttagagagggtcagtattttggctgtagtttcgatttaaccaaggtaaaggactcctcctttgagcaacacagtgtccaaatcatggtgaaggacaatgcaggaaaaattaaaccctccttcaatatcgtccctctgaccagccgcgtcaagcctgaccctcctcacattaagaacctctccttccacaatgatgatctatacgtacagtgggagaatcctcaaaacttcatcagccgctgcctcttttatgaggtggaggtcaacaattcccaaaccgagacccacaatgtgttctatgtccgattctag

SEQ ID NO: 227160 - DNA, 1284 bp, synthetic construct
  misc_feature 1..1284: note = Description of Artificial Sequence: Synthetic coding sequence
  source 1..1284: mol_type = other DNA
atggaatggcccgcaaggctctgcggcctctgggctttactgctctgcgccggtggcggaggaggcggagggggtgctgcccctaccgagactcagcctcctgttacaaatctgagcgtgtctgtcgagaatctgtgcacggttatatggacatggaatcctcctgagggggcttcctccaattgctcattgtggtacttctcacattttggcgataaacaggacaagaagattgcgcctgaaacacggaggagcatcgaagtgcccctgaatgaaaggatctgtctccaagtaggcagccagtgctccaccaacgagagtgagaaaccttccatcttggtagagaaatgtatcagtcccccagagggtgatcctgagagcgcggtgacggaactccagtgcatttggcacaatctgagctatatgaaatgctcatggctacccggacgcaacacctctccagataccaactacactttgtattactggcaccgctctctcgaaaagattcaccaatgtgaaaacatcttccgagaagggcagtactttggctgctccttcgacctcacgaaagtgaaggatagctcctttgaacaacactccgtccagattatggtcaaggataatgctggaaaaattaagccttccttcaatatcgtccccttaacgtcacgggtgaagccagatcctccacatattaaaaatttgtcctttcacaacgacgacctgtatgtccagtgggagaatccccagaattttatttcccggtgcctgttttatgaggtggaggtgaacaattctcaaacagaaactcataacgtgttttatgtgcaggaggccaaatgcgaaaatcctgagttcgaaaggaacgttgagaacacttcatgcttcatggtgccgggagtactgcccgatacactgaataccgtaaggattagagtgaagaccaataagctgtgttatgaggacgataaactatggtctaactggtcccaagagatgtcaataggaaagaagaggaactcaaccctatacatcacaatgcttctgattgttcccgtgattgtggctggggctatcatcgtgttgctgctgtacctcaagaggctgaagataattatcttccctcccattccggaccccggtaagatttttaaagagatgtttggcgaccagaacgatgatacactgcactggaagaaatacgatatctacgaaaagcagaccaaagaggaaactgatagtgtcgttttgatagagaatctgaagaaggccagtcaatag

SEQ ID NO: 227161 - DNA, 1143 bp, synthetic construct
  misc_feature 1..1143: note = Description of Artificial Sequence: Synthetic coding sequence
  source 1..1143: mol_type = other DNA
atggccttcgtttgcctggcgataggctgtctgtacacgttcctcatctccacaacctttggatgcacaagctcatccgatactgagatcaaagtgaaccccccacaagattttgaaatcgtggatccaggctacctggggtacctgtacctgcagtggcaaccaccgttgagtctcgaccacttcaaagagtgcactgtcgaatatgagctgaaatatagaaacatcggaagcgagacttggaagactattataacgaagaatctgcactacaaggatggattcgacctcaataagggcatagaggccaaaattcacacgctcctgccctggcagtgcaccaacgggagcgaggtgcaatcttcttgggccgaaacaacctattggatctcacctcagggtattccagaaacaaaggtacaagatatggactgtgtatactataactggcaatatcttctgtgctcttggaagccaggcataggtgttttgctggacacaaactataatctgttctactggtatgaaggcctggaccatgccttgcagtgcgtcgactacattaaggctgacgggcagaacattggatgtagattcccctacctggaagcctctgactacaaggatttttacatctgcgtgaatggatcatccgaaaacaagcccatccggtccagttatttcacattccaacttcagaacatagtgaaacccttaccaccagtatacttgaccttcacacgcgagtctagctgtgaaattaagctgaagtggagtattcctctaggcccaataccagccaggtgctttgattatgagatagagatcagggaagacgataccaccttagttacggctactgtcgagaatgagacatacaccctgaaaactacgaatgagacacgacaactctgctttgtggtgcggtccaaggtgaatatttattgctcggacgacggcatttggagtgaatggtcagataaacagtgttgggaaggcgaagatttatccaagaaaacactgctgaggttctggctcccatttggctttattttaattttggtgatatttgttaccgggctgctacttagaaaaccaaatacctacccaaaaatgattccggagttcttctgtgatacctag

SEQ ID NO: 227162 - DNA, 1143 bp, synthetic construct
  misc_feature 1..1143: note = Description of Artificial Sequence: Synthetic coding sequence
  source 1..1143: mol_type = other DNA
atggccttcgtctgtctcgccatcggatgcctgtacaccttcctgatatcaacaacttttggatgtacgagctctagcgatacagagatcaaagttaacccaccacaagacttcgagattgtagatcctgggtacctgggttatttgtacctgcagtggcaaccacctctctcattagatcattttaaggagtgtacagtggagtacgagttgaagtaccggaatatcggaagcgagacttggaagacaattatcactaagaacctgcactataaggacggattcgacctgaacaagggtattgaagccaagattcacacactgttgccttggcagtgtacaaacggttccgaggtgcaaagttcttgggccgagactacttactggatttcgccacagggcatccccgagaccaaggtgcaggacatggactgtgtgtactataattggcagtatctgttgtgcagttggaaaccaggaataggcgttctgctggataccaactataacctgttctactggtacgaagggctggaccacgctctacagtgtgtcgactacattaaagcagatggccagaatatcggctgcagatttccatacctggaagcaagtgattacaaggatttttatatctgtgtgaatggaagctcagagaacaagccaatccgatccagctacttcacttttcagcttcagaatatcgttaaacctctgccccctgtgtacctgacctttacccgggaatcttcatgcgaaataaagcttaagtggagcatccccttagggcctatcccagctcgttgcttcgattacgagatcgaaatccgcgaagatgacacgacacttgtcactgccacggtggaaaatgagacatacaccttgaagacaactaacgaaacgcgacagctgtgcttcgtagttaggtctaaggtgaatatatattgtagcgatgatggcatctggagcgaatggagcgataagcagtgctgggagggggaagacctgagcaagaaaacactgctgagattctggttaccctttggatttatcctgattctggttatctttgtcactgggcttttgctgaggaaacccaacacgtatccaaagatgatacccgaattcttttgcgatacgtag

SEQ ID NO: 227163 - DNA, 465 bp, synthetic construct
  misc_feature 1..465: note = Description of Artificial Sequence: Synthetic coding sequence
  source 1..465: mol_type = other DNA
atggcccctcgacgtgcaagagggtgtagaaccttggggctgcccgctctgctccttctgctcttgctccgtccgcctgcgaccagagagcctgcggcatccagcccctcttccaacaatacagccgctactactgctgccatcgttcctgggtcacagctcatgcctagtaaatcaccgtcaactggcactacagagatcagttcccatgagtccagtcatggcaccccaagtcagactaccgcaaaaaactgggaattaaccgctagtgcttcacaccaacccccaggggtttatccacaaggccattctgacactactgtggctatcagcacctcaacagtgctgctctgtggcctctcagcagtatctctcttagcttgctacctcaagtctcgggctagtgtgtgctcatgtcacccaaggagtgcagggcatacatgctctgttggatcagtttgctag

SEQ ID NO: 227164 - DNA, 804 bp, synthetic construct
  misc_feature 1..804: note = Description of Artificial Sequence: Synthetic coding sequence
  source 1..804: mol_type = other DNA
atggcacccaggagagcaaggggctgtcggacactcggcctgcccgctctgctcttgctgttactgctgaggccccctgccactaggggcattacctgcccaccacctatgtccgtggagcacgcagacatttgggtcaagtcatactcactttactcacgagagagatatatttgcaatagtggcttcaagagaaaagccggaacctcctctttgaccgaatgcgtgttgaacaaggcaactaacgtggctcactggacgacaccaagcctcaaatgcattcgcgaccctgccctcgtgcatcagcgcccagcgcctccttctacggtgaccacggccggtgttactccccagcctgaatccctctccccatctggcaaggagcctgccgcttcaagtccgtcttccaacaacaccgccgctacgacagctgccattgtccctggttcccagctgatgccctccaagagtccatcgactggtacaaccgagatctccagccatgaaagttctcatgggacaccgagccagactactgcaaaaaactgggagctaacagcctcagccagtcatcaacctcctggtgtgtatcctcaaggccactcagacaccacagtagcaatctcaacctctaccgttctgctgtgcggactcagcgcggtgtctctgctggcgtgttacctgaaaagcagacaaaccccacctctagccagtgtggaaatggaggccatggaggccctcccggttacctggggcaccagctcccgcgatgaagatctcgagaactgttcacaccatttgtag

SEQ ID NO: 227165 - DNA, 612 bp, synthetic construct
  misc_feature 1..612: note = Description of Artificial Sequence: Synthetic coding sequence
  source 1..612: mol_type = other DNA
atgtccgtcgagcatgctgatatctgggtcaaatcctattccctgtatagccgggagcggtacatctgtaatagcggattcaagcgcaaggctggtaccagttcactaaccgaatgcgtgctgaacaaggccactaacgttgcacactggactacgccaagtttgaaatgtatcagagaccccgcacttgtgcatcagagaccggctccgccatcgacggtcaccacagcaggggttacaccccagcccgagtctttgtccccttcaggtaaagaacctgctgcaagctcaccctcgtctaacaataccgccgcaaccactgccgctatagttccaggaagccagctgatgcctagtaagtcaccaagtacaggcacaaccgagatctcatctcatgagtccagccacgggacacctagtcagacaactgccaagaattgggagctgactgccagtgcttcccatcagcctccaggggtctatcctcagggtcactccgatacgaccgtagcaatcagcacttccactgtgctgctgtgcgggctgtcagcagtgtctctgctagcttgctacttgaagtccagcggagccgtattaagctactctggttag

SEQ ID NO: 227166 - DNA, 696 bp, synthetic construct
  misc_feature 1..696: note = Description of Artificial Sequence: Synthetic coding sequence
  source 1..696: mol_type = other DNA
atgtcagtcgagcacgctgatatctgggttaaatcctatagcttgtatagtagggaaagatacatttgtaatagcggttttaagagaaaagccggtacctcctcgctaaccgaatgtgtgctgaacaaggctacaaatgtggctcactggactactccatctctcaagtgtatccgcgatccagcattggtgcaccagcggcctgcccctccaagtaccgtaactactgcaggggtcaccccacagccagagtccctttctccatccggaaaagagccagctgctagcagccctagtagcaacaataccgccgcaacaacggccgcaattgtaccagggagtcagctgatgccttccaagtccccttctacgggcaccacagaaattagcagccacgagtccagccatgggactccctcacaaaccacagccaagaactgggaactcacggcttcggcctctcaccagccccctggggtctatcctcagggccatagcgacacaactgtggccataagcaccagcacagtgctgctttgcggactgtcagctgtgtcacttctcgcttgttatttgaagagcaggcagaccccgccactagcatccgtcgaaatggaggcaatggaggctctgcctgtcacctggggaacttcatcacgcgacgaggacttagagaactgttctcatcacctgtag

SEQ ID NO: 227167 - DNA, 510 bp, synthetic construct
  misc_feature 1..510: note = Description of Artificial Sequence: Synthetic coding sequence
  source 1..510: mol_type = other DNA
atggcgcctcgcagggcccgaggctgtagaactctcggtcttcccgctttacttttgctactcttgttacgcccacctgccactagggaacctgccgcatcgtcacccagcagcaataacaccgcggctaccaccgctgctattgtccccggatcacagctgatgccaagcaaaagtccatccaccggcactacagaaatttcttctcacgagagtagccatgggactccatctcaaaccactgccaagaactgggagttgaccgccagcgcaagccaccagcccccaggagtatatccccaaggacattctgacaccacagtcgccatttccacgagcactgtgttgctttgtggtctctctgccgtgtccctgctggcatgctacctgaagtccagacaaacaccacccctcgcttccgtggaaatggaagcaatggaagccctgccagtaacttggggtacctcaagcagggatgaagacttggagaattgcagtcatcacctttag

SEQ ID NO: 227168 - DNA, 609 bp, synthetic construct
  misc_feature 1..609: note = Description of Artificial Sequence: Synthetic coding sequence
  source 1..609: mol_type = other DNA
atggcccctcgtcgagctaggggctgtcgcacgttgggtctccctgcccttcttctgctgctgctacttaggccacctgcaacccggggagatcccgctttggtacaccagaggcccgcacctccctcgaccgtgaccacagcgggagtcaccccccagccagagtcgcttagtcccagcggtaaagagccagccgcttcctccccctcaagtaataatactgccgctactaccgcggctatcgtgcccggatcccagctgatgcctagtaagtcaccttctacaggcaccactgagatttcctcgcacgaaagctctcatgggacccctagccaaactaccgccaagaattgggagctgacggcaagcgctagtcaccagccaccaggtgtctatcctcaggggcattctgacacaacagtagctataagtaccagtaccgtactactttgtggcctgagcgccgtgtccctcctggcctgctatcttaaaagcaggcagaccccacctctggcctctgtcgaaatggaggccatggaggccctcccagttacgtgggggacttcctcacgtgacgaggatctggagaactgcagccaccacctctag

SEQ ID NO: 227169 - DNA, 759 bp, synthetic construct
  misc_feature 1..759: note = Description of Artificial Sequence: Synthetic coding sequence
  source 1..759: mol_type = other DNA
atggcaccgcgacgcgctaggggttgcaggaccctgggactcccagccctgctgctcttgctactgctgcggccacccgctacccgcggaataacctgccccccacccatgagcgtggaacacgccgatatttgggttaagtcttattcactgtatagccgtgaaagatacatctgcaattcggggtttaaaagaaaggctgggacctcaagtctaaccgaatgcgtcctgaacaaggcaacgaatgtagcccactggactaccccttcccttaagtgtatcagggacccagcactggttcatcagcgcccagccccaccatcaaccgttacaacagctggcgtgacaccccagcccgagtcactatcaccatcaggcaaggagccggctgcctcctcacctagttctaataacactgccgctaccacagccgcaatagtccccggatcccagttaatgccatctaaatccccaagcacaggcacaaccgaaatttcttctcatgaaagctctcatggtactccatctcagacaactgcaaaaaactgggagttaacggcctcggcatcccatcagcctccgggagtgtacccgcagggacactccgacacgaccgtggccatttccactagcaccgttctgctctgtggactgtcagcagttagtttgctcgcatgttacttgaaatcacgagcatccgtgtgttcatgtcacccgcgatcagcgggacatacctgtagcgtcggcagcgtctgttag

SEQ ID NO: 227170 - DNA, 564 bp, synthetic construct
  misc_feature 1..564: note = Description of Artificial Sequence: Synthetic coding sequence
  source 1..564: mol_type = other DNA
atggcgcctaggcgcgctcgaggatgtcgcacactcggattacccgctcttttgctattgctgctgttacgaccccctgcaactcggggagatcctgccctcgttcatcagcggcctgcccctcccagcacggtcacgacagcaggggtgactccccaacccgagagcctcagcccgtcaggcaaggaacctgctgcaagctctccatctagcaacaatacagccgcaactacggccgctatcgtgccgggtagtcagctcatgcctagtaagagcccctctaccggaacaaccgaaatatcttctcatgaatcatctcacgggaccccctctcagaccacagcaaagaactgggagttgactgctagcgcaagtcatcaaccaccaggtgtgtatcctcagggacactcggacacaactgtcgccatcagcacctccacagttctgttatgtggcctctctgcagtaagcctcctggcttgttaccttaagagtagagcttccgtgtgcagttgccacccacggtcagccggtcacacctgctctgttggctctgtgtgctag

SEQ ID NO: 227171 - DNA, 705 bp, synthetic construct
  misc_feature 1..705: note = Description of Artificial Sequence: Synthetic coding sequence
  source 1..705: mol_type = other DNA
atggccccacggagagccaggggatgcagaaccctaggcctgcctgcattgttgttgttactactccttcggccacccgctactcggggaatcacttgcccacctccaatgtctgtggaacacgccgacatctgggtcaaaagctattccctgtattcccgcgagaggtacatctgcaactccggattcaagcgaaaggccggtacgtctagcctaaccgaatgtgtgctgaacaaggcaacaaacgttgctcactggaccacccccagcctgaagtgcattaaacctgccgcatcttcaccaagcagcaacaacaccgcagccaccaccgcagccattgtgccaggaagccagctcatgccgtcaaagagtcctagcaccggcaccaccgaaatcagctcacacgagtccagtcatggaacacctagtcagaccactgccaaaaattgggaactcacagcttctgctagtcatcaacctccgggagtttaccctcaggggcactctgacaccaccgtggccatctcgacttcgacggtgctcctgtgtggactttctgcagtatctctcctcgcatgctatttaaagagtagacagactccacccttagctagcgtggagatggaggccatggaagccctaccagttacttggggcacaagctctcgggacgaggatttggaaaactgcagtcaccacttatag

SEQ ID NO: 227172 - DNA, 660 bp, synthetic construct
  misc_feature 1..660: note = Description of Artificial Sequence: Synthetic coding sequence
  source 1..660: mol_type = other DNA
atggcgccacggagagctcggggatgtcgcaccttaggactgcccgctctgctgctcctccttctgctgcgtccgccagcaacgcgagggattacctgccccccacccatgagtgtggaacatgccgacatatgggtgaagtcttactcgctttactcccgtgaacgatatatctgcaactctggatttaaacggaaggctggcacctcctcactcaccgaatgcgtacttaataaggccaccaatgttgcacattggaccacaccaagtctgaaatgcataaaaccagcggcaagttcaccgtccagcaacaatactgccgcaacgactgcagccatcgttcctggtagtcagctcatgccaagcaaaagtcctagtacaggtacaaccgagatttctagtcacgagagctcccatggaaccccaagtcagacgaccgcaaaaaattgggaactgaccgccagcgccagtcatcagcctcccggagtctatccccagggccattccgacactacagtagccatctctacctcaactgtgctcttgtgtggactcagtgctgtgagtttgctcgcatgttatttgaagagtagggcatcagtttgcagctgtcacccacgaagcgccggtcatacctgtagcgtgggcagtgtatgttag

SEQ ID NO: 227173 - DNA, 2601 bp, synthetic construct
  misc_feature 1..2601: note = Description of Artificial Sequence: Synthetic coding sequence
  source 1..2601: mol_type = other DNA
atgggtgcggcacggtctcctccctccgctgtcccgggtcctttgctcggtctcctgctccttctgctcggggtgctggctccaggcggagcttctttgagactgttggaccacagagcccttgtgtgctcccagcctggcctgaattgtaccgttaagaattcaacctgcctggacgactcttggattcacccacggaacctgacacctagttctcccaaggatctccagattcaactgcacttcgcacacacacagcagggcgacttgttccccgtagcgcatatcgagtggacactgcagaccgatgcctctatcctctacctcgaaggtgccgagctttcagtcctgcagctaaatactaacgagaggctgtgcgtgagatttgaattccttagtaaattacgacatcatcacaggaggtggcggtttacttttagtcatttcgtggttgatcccgatcaggaatacgaagtgaccgtgcaccatctaccaaaaccaattcccgacggcgatcccaatcaccagagtaaaaatttcctggtgccagactgtgagcacgcacgcatgaaagtgaccaccccatgtatgtcttctggctcactgtgggatcccaacatcaccgtggagaccctggaagctcatcagctgagggtaagtttcaccttgtggaatgaatctactcactaccaaatcctgcttacgagcttccctcacatggagaaccactcatgcttcgagcatatgcatcatatccctgctccacgcccagaagaatttcatcaacgatccaacgtcaccctgaccttgagaaacctgaaaggctgttgtcggcaccaggtgcaaatccagcccttcttctccagctgcctgaacgactgcctgaggcattccgcaaccgtgtcctgcccagagatgccagacaccccagagcctatcccagattacatgcccctttgggtttactggtttattacaggaataagtattctactagtcggcagcgtcatattgctgatcgtgtgcatgacctggcggttagccggtccaggttcggaaaagtattctgacgacactaaatacacggacgggctcccagccgctgatctcattcctcctcccctgaagccacgtaaagtctggatcatctactccgccgatcaccccctgtacgtggacgtggttctgaaatttgcacagtttctactgacagcctgtggaacagaggtcgctttagacttattagaggagcaggcaatttccgaggcaggggttatgacatgggtcgggagacaaaagcaggagatggtggaatccaattccaaaatcatcgtcctgtgttcccgcggaaccagggcaaaatggcaagccttgctggggaggggtgcacccgttagacttagatgcgaccatggaaagcctgtgggagatctttttactgccgcaatgaacatgattttgcccgattttaaacggccagcctgctttggtacctacgtggtgtgctactttagcgaggttagttgtgacggagatgtgcctgatttgtttggcgctgcccctaggtatccactgatggaccgctttgaagaggtgtatttcaggattcaggacctcgagatgtttcaaccaggcaggatgcatagggtgggcgaactaagcggggataattacctaagatcccctggagggcgtcaacttcgcgctgcactcgacaggttcagggactggcaggtgcgatgtcccgattggttcgagtgcgagaatctgtactccgctgatgaccaggacgccccttctctggacgaggaggtattcgaagagccacttctgcctccaggcactggcattgtgaagagagcaccccttgttagagagcccggatcccaagcctgccttgctattgaccctctggtaggggaagaggggggtgcagcggtagcaaaattagagccacacttgcagccccgaggacagccagcaccgcagccattgcacaccctggtccttgcggcagaggaaggagccctcgtggccgcagtggagccagggcctctggccgacggtgcagctgttcgtttggctcttgccggagagggtgaggcgtgccccttactgggcagccctggcgctggcagaaattctgtactattccttcccgttgaccctgaagattctccacttggtagttccacacccatggcttcccccgatctcctccccgaggacgtccgcgaacacctagagggtttgatgctgtctctttttgagcaatctctgagctgccaggcgcagggaggctgctctcggcctgcgatggttttaacggacccgcacaccccatatgaagaggaacagagacaatcggtgcagagcgatcagggctacatttcacgtagtagtccccagccaccagaagggctgactgagatggaggaggaggaggaagaggagcaggaccccggaaagcctgcccttcctctgtctcccgaggacttggagtcactccgctccctgcagcgccaactgctttttaggcagctgcagaagaattctggctgggacactatggggtcagagtccgaaggaccttccgcctag

SEQ ID NO: 227174 - DNA, 2445 bp, synthetic construct
  misc_feature 1..2445: note = Description of Artificial Sequence: Synthetic coding sequence
  source 1..2445: mol_type = other DNA
atgggcgctgcacggtcacctcctagcgccgttccaggcccactcctcggtctgctgctgcttctgctgggggtactcgctcccggaggggcatccttacggctgttggaccatcgcgcattggtgtgttcccagccaggacttaactgcaccgtgaagaacagtacctgcctggatgactcatggatacaccctagaaatctgacccctagttcccccaaggatctacagatccagcttcacttcgcacacactcagcagggggacctgtttcctgtggcacatattgagtggactctgcagaccgatgcatccatcctgtatttggagggagccgagctgtcagtcttgcagctcaataccaacgagcgcttatgtgtgaggtttgaattcctgtcaaagctaagacaccaccatcggagatggcgatttacattctcacattttgtggtggacccggatcaagaatatgaagtgaccgtccatcacctgcctaagcctattcctgacggggaccccaatcatcagagtaagaatttcttagtgcccgattgtgagcacgctagaatgaaggtaaccactccttgtatgtccagcggcagcttgtgggaccctaacattacagtggagacattggaggcccaccagcttagggtgtcattcaccttgtggaatgagtccacacattatcaaatcttgctcactagtttccctcatatggaaaaccacagctgctttgagcacatgcaccatattcctgctcctagacccgaagagtttcatcaacgcagtaatgtcaccctaaccctaagaaatctgaaaggttgttgcaggcaccaggtgcagatccaaccctttttcagttcttgtctcaacgattgccttcggcatagcgctaccgtgtcttgcccggaaatgccggatacgccggatggtctccccgctgccgatctcattccgcctccacttaaacctagaaaagtatggattatctatagcgcggaccatcccctgtatgtagacgttgtgctgaagttcgcccagttcttattaacagcctgcggaactgaagtagctttagatctgcttgaagagcaagccatctctgaggctggtgtgatgacgtgggtgggtcgtcagaaacaagagatggtggaaagcaacagcaaaataattgtactctgcagcagaggtactcgtgccaagtggcaggctttgctggggagaggcgcacctgtcaggctccgatgcgatcatgggaagcctgtgggagaccttttcacagccgctatgaacatgatcttgccggattttaaaagaccagcatgtttcgggacctatgtggtctgctatttcagcgaggtgagctgcgacggagatgttcctgacctgttcggagccgctcctcggtaccccctgatggaccgctttgaggaggtgtatttccgcatacaggaccttgaaatgttccagccaggacggatgcacagagtaggcgaactgagtggcgataactatctgcgatcccctggtggcagacagttgagagccgctctggatcggttccgggattggcaagttaggtgcccggattggttcgagtgtgagaacctttactcggctgatgaccaggacgctccatcccttgacgaggaggtatttgaagagcctctcctcccgccagggacggggatcgtcaagagggctcctttggtcagggagcccggatcccaggcgtgcctggccatcgaccccttagtaggcgaggaaggaggggcagccgtggccaagctcgagccacacctccagccccgaggccaacctgctccgcagcccctccatacgttggtgctcgctgcagaagaaggcgcattggtcgccgctgtggagccaggtccccttgctgacggcgctgccgtgcgcctcgcattggccggagagggggaagcctgtccacttctgggttcgccaggcgctggtagaaactcagttctgttcctgccggtggaccctgaagacagtcccctgggctcctcaacacccatggccagcccggatctactccctgaagacgtccgggagcacttggaggggctgatgctgagtctgtttgagcagtctctctcatgccaagctcagggaggctgctctaggccggcaatggtgctcactgatccacacacaccttacgaagaagaacagcgccagtctgtgcagtcagaccagggctacatcagccggagttctcctcagcccccagaaggtttaaccgagatggaagaggaggaagaggaggagcaggatccagggaagccagccttgcctctgagtccagaggatttggaatccctgcgatctcttcagcggcagctgctctttaggcagctccagaaaaacagtggatgggataccatggggagtgagtcggagggcccaagcgcctag

SEQ ID NO: 227175 - DNA, 1509 bp, synthetic construct
  misc_feature 1..1509: note = Description of Artificial Sequence: Synthetic coding sequence
  source 1..1509: mol_type = other DNA
atgtcgctcgtccttctgagcctcgccgctctgtgccgctccgctgtgccacgagagcccacagttcagtgtggttccgaaaccgggccatcccctgagtggatgctgcagcacgatctgatccccggagatctgcgtgacctaagggtagaaccagtgaccaccagcgttgcgaccggtgattactctatactgatgaatgtctcctgggtcctgagagccgatgcgtcaatccgcctgctgaaggcgactaagatttgcgtgacaggcaaaagcaattttcagtcttattcttgtgttagatgtaattacaccgaggcatttcagacccaaacaagaccttccggaggtaaatggaccttcagctacatcggattcccagtggaactaaatacagtttattttattggagcccacaacattccaaatgcaaacatgaatgaggatgggccatccatgtccgtgaatttcactagtcctggatgcctcgaccatatcatgaagtacaagaaaaagtgcgtcaaagccggaagcttgtgggacccaaatatcactgcttgcaagaagaatgaagagaccgttgaggtgaattttaccacaaccccattgggcaaccgttacatggctttaattcaacacagtacaatcattggcttctctcaggtctttgaaccccaccagaagaaacaaactcgcgcaagtgtggtcattcccgtaaccggtgactcagagggtgccacagtgcagctgaccccgtactttccaacttgcggttccgattgtatccggcataaaggaaccgtcgtgttatgcccgcagacaggcgttcctttcccactagacaataacaagtctaagcctgggggatggctccctctgcttctcttgtctctcctcgtggctacctgggtgctcgtggccggtatctatttgatgtggcgccacgagaggattaagaaaacctccttttctactaccaccttgttacccccaatcaaggtgttggtcgtgtatccatcagaaatctgttttcatcataccatctgttatttcacggaatttctgcagaatcactgcaggtcagaagtgatccttgagaagtggcaaaaaaagaagatcgctgagatgggcccagtgcaatggctggccacacagaagaaagctgctgacaaggttgtttttctcctcagcaatgacgttaatagcgtgtgtgatggtacgtgcggtaagtccgaaggtagtcccagcgaaaacagccaggatctgttcccactcgcctttaatctgttctgcagtgatctccgcagccaaatccatttgcataagtatgtggttgtttactttcgggagatcgacaccaaagacgattacaacgccctgtcagtgtgtcctaaatatcacctgatgaaagacgctactgccttctgcgcggagctgctgcacgtcaagcagcaagtctcagccggtaagcgctcacaggcctgccatgacggctgttgtagcttatag

SEQ ID NO: 227176 - DNA, 2376 bp, synthetic construct
  misc_feature 1..2376: note = Description of Artificial Sequence: Synthetic coding sequence
  source 1..2376: mol_type = other DNA
atgccagtgccctggtttcttttgtccctggccctaggcagaagtccagtggttttgagtctggaaaggctggtgggccctcaggatgcaacccactgtagccccgtcagcctggaaccctggggagatgaggaacgcctgcgcgtgcagtttcttgcacagcagtctctgtctttagcaccagtgactgccgcaactgctcggaccgccctaagcggcctgagcggagccgacggccgacgtgaggagaggggccgagggaagagctgggtgtgtctcagcctggggggttctggcaacaccgagcctcaaaagaagggattgtcttgcaggctttgggacagtgatattctctgtctgccgggagatattgttcccgctccgggacccgtcctggcgccaacgcacctgcagacagaactggtgttgcgatgccagaaagaaaccgattgcgacctctgcctacgagtggctgtgcatctcgcggttcatggccattgggaggagcccgaggacgaagagaagtttggtggggctgcagacagcggtgttgaagaacccaggaatgcctcccttcaagcgcaggtcgttcttagctttcaggcctaccctaccgctagatgcgtgctgctggaagtgcaggtgcccgctgccctcgtgcagtttggtcagtcagttggctccgtagtctacgactgctttgaggcggcactgggatccgaagtgcggatatggtcatatactcagccaaggtacgagaaggaactcaaccatacccagcagctcccagattgcagaggccttgaagtatggaactcaattccgagctgctgggcactgccctggttaaatgtgtcagccgatggggacaacgtccacctcgtgcttaacgtgtctgaagaacagcattttggtctatcgctttactggaatcaggtccaagggccaccaaaaccaagatggcacaaaaatcttacgggcccacagattatcaccctaaatcataccgacctggtcccgtgtctatgtatacaggtttggccgctcgaacccgatagcgtgagaaccaacatctgtccctttcgcgaggatcccagagcccaccagaatctctggcaagctgccaggctgcagttgctgacactgcaatcatggctgctcgatgccccttgctcactgcccgctgaagctgcgctctgttggcgcgctcccggaggcgatccgtgtcagcctctcgtgccgccactctcatgggagaatgtcaccgtcgacaaggtgttggagttcccgcttctgaagggccaccctaacctctgtgttcaagtcaatagcagcgagaagctccaactgcaggaatgcctctgggcagactcacttggcccactcaaggatgatgtcttactcctcgagacccgcggtccccaggacaaccgtagcctgtgcgctctagagccttccggctgcacttcattgccgtcgaaggccagtacccgcgcagcacgactgggggagtacttgctgcaagacttgcagagcggacagtgcctccaactgtgggacgatgatctgggcgctctatgggcctgcccgatggacaagtatatccacaaacggtgggcgctagtgtggctcgcgtgtctgctctttgccgcagccctaagcctaatactcctactgaagaaagaccacgccaagggatggttaagactattgaagcaagacgttcgctccggagcagcagcaagaggaagggcggctctgttgttatactctgctgacgatagcgggtttgaacgactcgtgggagcactggcctctgccctctgtcaactgccgctaagggtcgccgtggatctctggagtcgccgagagcttagcgcccagggtccagtggcatggtttcacgcacaacgaagacagacgctacaggaggggggtgtggtggttctgctgttttcaccaggtgctgtcgcgctgtgcagcgagtggcttcaggatggggtgtcaggacctggggctcacgggcctcacgatgcgttccgggcttccctatcttgtgtgctgcccgactttttacagggacgagccccaggttcctacgtgggagcctgctttgaccggttactgcatccggacgccgtaccagctctatttcggaccgtgcccgtgtttacgcttccatctcagctgccagacttcttgggcgctttgcagcaacccagagctcctagaagtggacgactccaggagcgggcagagcaggtcagcagagctctccaaccagcactcgacagttactttcacccacccggaacgcccgctccagggaggggcgtcggtcccggtgccggacccggtgctggagatggaacttag

SEQ ID NO: 227177 - DNA, 2118 bp, synthetic construct
  misc_feature 1..2118: note = Description of Artificial Sequence: Synthetic coding sequence
  source 1..2118: mol_type = other DNA
atgcctgtgccctggtttctgctttctctagctctgggtcggtccccagtggtcctttctctcgagagattggtgggtccacaggacgctactcattgtagcccaggtctaagttgcagactgtgggacagtgatatcctgtgcttaccaggcgatattgtccctgcgccaggtcccgtgctcgcaccaacccacttacagaccgaactcgtcctccgctgtcagaaggaaactgactgtgacctgtgtcttcgcgtggctgtgcacctggcagttcacggtcattgggaggagccagaagacgaagagaagttcggcggtgcagcagattctggagtggaggagccacgtaacgccagtctgcaggcccaagtcgtgctgtcttttcaggcttaccccactgccaggtgtgtgctgctggaggtgcaggtcccggcagcactggtgcagttcggccagagcgtcgggtccgtggtttatgactgcttcgaagctgccctggggagcgaagtgaggatctggtcctacacgcagcctaggtatgaaaaggagctgaaccatacacagcagttacccgcactgccctggctaaacgtgagcgccgacggcgacaacgttcacttggtgttgaacgtgtcagaggaacagcactttggccttagcctctattggaatcaggttcagggcccaccaaaacctcgctggcataagaatctgaccgggccacagatcattacactcaatcacactgatctcgtgccatgcttatgtattcaagtatggccgctcgaaccggatagcgtcaggaccaacatatgtccttttagagaggatccgagagcccaccagaatttgtggcaggccgctcggctccagctccttactttgcaaagctggctgcttgacgcaccttgttctctgccagccgaagctgccctgtgctggcgagcacctggaggggatccttgtcagccacttgtccccccattatcatgggaaaatgtgaccgtcgacaaagtcctggagttcccattactcaagggccacccaaacctgtgtgtccaggttaattcgtccgagaaactgcagctgcaggagtgcctatgggctgacagcctggggcctttaaaggacgacgtcctgctcttggaaacccgagggcctcaggataatagatcactttgcgccctggaaccttctggctgtaccagtcttccttccaaagccagtactagagccgctagactcggcgaatatctgctccaagatctccagagcggtcagtgtcttcagctctgggacgacgacctcggagcgctctgggcctgcccaatggacaaatacattcacaagcgctgggccttggtgtggctggcatgcttgctattcgcggctgccctttcgcttattttactgttaaaaaaagaccatgcgaagggttggctgcgtctcctgaaacaggatgtcaggagcggcgcagcggcaagaggccgagccgcattacttctttactcagccgacgatagcggcttcgagcggctggtgggagcgctggcaagtgcactttgtcagctgcctctccgagtcgcagtggacctgtggtcaaggcgcgaactctcagcacaggggccagtcgcctggttccatgcccagcgtagacagactctccaggaagggggtgttgtggtgctgctgtttagcccgggtgccgtggcgctgtgctcagaatggctgcaggatggtgtttccggcccaggggctcatggccctcacgacgcctttagagctagtctatcttgcgtgctccctgacttcctccagggcagggccccaggatcgtacgtgggggcttgcttcgaccgtctactgcacccagacgcagtaccggctttatttcgcacggtgccagttttcacactgccctctcagctccccgattttcttggggcactacagcagcctcgggcaccaagaagtggacgcctgcaggagcgagccgagcaggtgtcccgggctctccagccagccctcgattcctatttccatcccccaggtaccccggcaccaggcaggggcgtgggccctggcgctggacccggtgccggagacggcacatag

SEQ ID NO: 227178 - DNA, 2163 bp, synthetic construct
  misc_feature 1..2163: note = Description of Artificial Sequence: Synthetic coding sequence
  source 1..2163: mol_type = other DNA
atgccagtcccttggtttctattatctctcgccttaggcagatcaccagtggtgttaagtctggagcgactggtgggccctcaggacgctacccattgttcgcccggactttcctgccgactctgggacagtgatatcctgtgcctgcccggagacatcgtaccagcccctggacctgttcttgccccaacccatctacaaaccgagctcgtcctgcggtgtcagaaagaaactgactgtgatctttgcctgcgggtggcagtgcatctagctgttcatggacactgggaagagccagaggacgaggagaaattcgggggtgctgccgactctggggttgaagagcctagaaacgcttcactgcaggctcaagtagtgctgtccttccaggcttatcctaccgctcggtgcgtcctcctggaggtacaggtgccagcggcattggtgcagttcggtcagtctgtgggaagtgttgtgtacgactgcttcgaagcggcactcgggtctgaggttcggatctggtcgtacacccagccacgctatgagaaggaactcaatcacacccagcagttgccagactgtcgtggactcgaagtctggaattctattccgagctgttgggcactgccctggctgaacgtgtctgctgatggtgataacgttcacctggtgctcaatgtatccgaagaacagcactttggactgtctctgtattggaatcaagttcagggaccacccaagcccagatggcacaagaacctcacgggcccacagatcattactctcaaccatactgatctggtgccatgcctttgcatccaggtgtggccccttgagcctgattcagtcagaaccaatatttgtcctttccgtgaggacccacgggctcaccaaaatttgtggcaggcagcgagactccaactgctgaccctacagtcttggcttctcgacgctccttgttcattgcccgcagaagctgccttgtgctggagggcccctggaggagacccttgtcaacctctggtccctcctcttagctgggaaaacgtgaccgtcgataaagtcctcgagtttcccttgctcaaaggccatcccaatctgtgtgtacaggtgaatagtagcgagaaactccagctacaggaatgcctctgggcggatagtctcggccctctgaaggacgacgtcttgctgctggagacgaggggaccccaggataatcgttccctttgtgctctggaacccagcggatgcacgtccctgccctccaaggcttctactagagcagcacgactgggcgaatatctgctccaggatctccaaagcgggcagtgtctgcagttatgggacgacgatctgggagcactctgggcgtgcccaatggacaaatacattcataagaggtgggctctggtttggctggcatgtctgctgttcgccgcagcactttcgctgattttgctgctgaagaaagaccatgctaaaggctggctgagactgttgaaacaggacgtgagatcaggagccgctgccagaggcagggcagctctgctgctgtatagcgccgacgacagcggatttgaacgtctagtcggggctctggcttcagcactgtgtcagctgcccctgagagtcgccgtagacttgtggagcagacgagagctcagtgcacaagggcctgttgcctggtttcacgctcagaggcggcagacactgcaggagggcggtgtggtggtattgctattttcccctggagcagtggctttgtgtagcgaatggcttcaggacggcgtcagcggtcccggtgcacacgggcctcatgatgcattcagagcatcactgagctgcgtccttccagactttttgcagggaagggcgcctggatcttacgtcggggcatgctttgacagactgttgcatcctgatgccgtcccagctttattcagaactgttccagtatttactctgccatctcaactgcctgactttttaggcgctctacaacagccacgtgctcctcgtagtggtcgcctgcaggaaagggcagaacaggtgagcagggcccttcaacctgcattagacagctatttccatccacccggtacacctgcccctggcaggggcgtaggccctggcgctggccctggagccggagatgggacatag

SEQ ID NO: 227179 - DNA, 1641 bp, synthetic construct
  misc_feature 1..1641: note = Description of Artificial Sequence: Synthetic coding sequence
  source 1..1641: mol_type = other DNA
atggcctatccaactgcaaggtgtgtgctgctggaggtgcaggtgcctgccgctctggtacagttcggtcaatccgtcggctccgtggtgtacgattgtttcgaggcagcccttgggagcgaagttcggatctggtcctacacacagccacgatacgagaaagaactaaatcatactcaacagctgccggcactgccctggctcaacgtgagtgccgatggagacaacgtacacctcgtattgaacgtgtctgaggagcaacattttggactttccttgtattggaatcaggtacaaggaccaccaaaacccagatggcacaaaaacttaaccggcccacagatcatcacattaaatcacactgatttagtcccatgcctttgtatacaggtgtggcctctggagccagacagtgtgcggactaatatctgtccatttagagaagacccacgtgcccaccagaatttgtggcaggccgcaagactgcagctgctgactttgcagtcttggctgcttgacgccccatgtagcttgccagctgaagctgccctgtgttggagagcccctgggggtgacccgtgtcagcctttggtgcctcccttgtcgtgggaaaatgtcacagtagatgttaactcctccgagaaacttcagttgcaggagtgtctgtgggccgacagtctgggtcctctgaaggacgacgtgctccttttggagacccgaggtccacaagacaatcgatctttgtgtgcccttgagccttctggttgcacatccctaccctccaaagcatccacacgggctgcgcgtcttggcgagtatctgctgcaggatcttcagtctggccagtgccttcagctgtgggatgatgacctgggtgctttgtgggcttgtcccatggacaagtacatacataagcgctgggcactggtgtggctcgcgtgtttattgttcgcagccgcactgagtctgatcctgctcctgaaaaaagaccacgctaaggccgctgccagggggcgagcagctttgctactctatagcgccgatgactctggatttgagaggctcgtgggggctctggccagtgccctttgccagttgccacttcgggtcgctgtggacctatggagtagaagagagctttctgcccaggggcctgtggcctggttccacgctcagcggagacagacattgcaggaaggtggagtggtcgtgttgctgttctctccaggagctgtcgcactctgcagcgaatggctgcaggacggtgtgtccgggcctggcgctcatggaccccatgacgcctttagagccagcctgtcttgtgttctgcccgatttccttcagggcagagcacctgggagttacgtaggagcctgttttgatcgtctcttgcaccctgacgccgtgccggctctcttccggaccgtgcctgtgttcaccctgccatctcaactgcctgatttcctgggcgctttgcagcagccacgggctcctagatctggacgtctgcaggagagagccgaacaagtcagtcgagcactacagcccgcactggactcctactttcacccgcctgggacccctgcccctggaaggggtgtcggaccaggcgctggcccaggagccggagatggcacttag

SEQ ID NO: 227180 - DNA, 2124 bp, synthetic construct
  misc_feature 1..2124: note = Description of Artificial Sequence: Synthetic coding sequence
  source 1..2124: mol_type = other DNA
atgccagtgccatggttcctgctgtcactggctctgggtaggtctccagtggtactgtcactggagcgcctggtggggcctcaggatgctacacactgcagccccggactgtcttgccgactttgggattcagacatactttgtctccctggtgacatcgtgcctgcacccggaccagtgctcgctcccacacacctgcaaacagaactggtgcttcgatgccagaaagaaacagactgcgatctgtgcctaagggtggcagtccacctcgccgtgcatggtcactgggaagaacccgaggatgaagaaaagttcggcggagctgccgacagtggggtagaggaaccgaggaatgcatctttgcaggcccaggtcgtcctcagctttcaagcctacccgacagcacgatgtgtactacttgaagtgcaggtgcctgctgctcttgtgcagtttggacaaagcgttggaagcgtagtgtatgattgctttgaagcagcactgggaagcgaagtcagaatctggtcctatacccagccacggtacgagaaagaactcaaccacacccaacagctccccgactgtagaggattggaggtgtggaattcaatcccatcgtgttgggctctcccatggctgaatgtgagtgctgatggagataacgtccatttggttttgaatgtcagtgaagagcaacacttcggacttagcctctattggaaccaagtgcagggccctcccaaaccacgctggcataagaatcttacgggtccccagatcatcacattgaatcataccgaccttgtgccttgtctgtgcattcaagtgtggcctctggaaccagactcggtgcgcacaaacatttgtccatttagggaagaccctcgagcgcatcagaatctgtggcaggctgccaggctccagcttctgacgctgcagtcttggctgctggacgccccatgctctctgcccgcagaggctgctctttgctggcgtgcccctgggggtgacccatgtcagcccctggtgccccctctgtcctgggagaatgttacagtcgacaaagttttagagtttccgttgttaaagggccaccccaatctgtgcgtccaggtcaatagctctgaaaagctgcaactgcaggagtgtttatgggccgacagtcttgggccactgaaggatgacgtactgttgctcgaaactcgaggccctcaagataacaggagcctctgcgctttagaaccttctggctgcacctccctcccttctaaggcaagcacacgtgctgcaagactgggcgaatatttacttcaggatctccagagcggccagtgcctacaattgtgggatgacgatctaggcgctctctgggcttgcccgatggataagtatatccacaaacgatgggccctggtgtggttagcgtgcctgctcttcgctgccgctctgagtctaatcttgctactgaagaaagatcatgccaaagcagccgcaagaggccgtgccgctctgcttttgtactccgccgacgattctgggttcgaacggttagtgggggctcttgcttccgccttgtgtcagcttcctttacgagtcgctgttgatctgtggtcaagacgggagttgtctgcacagggccctgtcgcttggttccatgcccagagacgacaaaccctgcaggagggtggcgtggttgtcttgctcttcagcccaggcgctgtggctctttgtagcgagtggctccaggacggggttagcggaccaggcgcacatggcccacacgatgccttcagggcatccttatcatgcgtcttgcctgactttctgcagggacgggctcccggaagctatgtgggggcttgctttgatcgcctgttgcaccccgatgccgttcccgcactgttcaggaccgtaccagtgttcacactgccaagtcagctccctgatttcttgggtgctcttcagcaaccacgtgcgccaagatccgggagactgcaagaacgggctgaacaggtgagcagagccctccagccagctttggatagttattttcatccgcctggcacccccgcacccggtcgcggagtggggccaggcgcaggccctggagcgggagacggaacctag

SEQ ID NO: 227181 - DNA, 213 bp, synthetic construct
  misc_feature 1..213: note = Description of Artificial Sequence: Synthetic coding sequence
  source 1..213: mol_type = other DNA
atgccagtaccctggtttctgctatctttggctctgggacgctcccccgtggtcctctcactggaacggctggtggggccacaggacgccactcactgctcacccggtcttagctgtcgtctgtgggttacatatagtgcctgtctcggcacctcatgtctcctgcgagccccttgctggagactacgcacctgtcgacagtcgtggtgttag

SEQ ID NO: 227182 - DNA, 2067 bp, synthetic construct
  misc_feature 1..2067: note = Description of Artificial Sequence: Synthetic coding sequence
  source 1..2067: mol_type = other DNA
atgcccgtgccatggttcctcctctctcttgccctcggacgaagtcccgtggttctgtcactggagcggttggtggggcctcaggatgccactcattgctctcccggactatcctgtcggctctgggactcggacatcttatgcctccctggcgatattgttcccgctcccggaccggttttggccccaacccacttacagacagaactagttctgcggtgtcagaaggagactgattgcgatctgtgcctccgtgtcgccgtccatctggctgtgcatgggcattgggaggagcctgaggatgaggagaaattcggcggtgccgcagatagtggcgttgaagagcccaggaacgcctccctacaggcgcaagtcgtgctgtctttccaggcttaccctactgccagatgcgtgctgctagaagtgcaggtgcccgcagccctggtccaatttgggcagtctgtgggttcagtggtgtatgactgcttcgaggcggcacttgggtctgaggtacgcatttggagctacacgcagccaagatacgagaaggaactgaatcacacccagcaattgccagccctcccatggctcaatgtgtccgccgacggcgataatgtccatcttgtgctgaacgtttctgaagaacagcactttggattgtccctgtattggaaccaagtgcagggacccccaaagccaagatggcacaaaaatctaacagggccacagattattactctgaatcatactgatttagtcccatgcctctgcattcaagtatggcccctggaaccggactctgtccgcacaaatatctgccctttcagggaagacccccgagctcaccaaaatctgtggcaagccgctcggttgcagctgctgaccctgcaatcctggttgttagacgcgccttgtagcctgcctgcagaggccgctctgtgttggagagccccaggtggcgatccctgtcagcctctggtacccccattgtcttgggagaatgtgaccgtggacgtaaactcgtctgagaaactgcaactccaggaatgcttgtgggcggattccttaggcccactaaaagacgatgtgcttctgttagaaacccggggaccgcaggacaaccgttcactgtgcgctctcgagcccagcgggtgcacatcacttccatccaaggcgtctactagagcagcccgtctgggagaatacctgttgcaagacttgcagtctggtcagtgcttgcaactgtgggatgatgatctcggagccctgtgggcctgccccatggacaagtacatccacaaacgctgggccttggtctggttagcgtgtttgctatttgccgcagcattatcccttatcttgctcctcaaaaaagatcatgcgaaaggatggctccgactgcttaaacaggacgttagatccggggctgcagctagggggcgagcagctctgctcctgtatagcgccgatgatagcggctttgagagactggtaggagccctcgcctctgccctgtgtcagcttcccctcagagtcgccgttgacctttggtctaggagagaactttccgcacagggcccagtggcttggttccatgcccagaggagacagacgcttcaggaggggggtgtcgtggtgttactcttctccccaggtgcagtagcactgtgctccgaatggctccaggacggtgtcagcggccctggggctcacggcccacacgacgccttccgggcttctctgtcatgcgtgctccccgatttccttcaaggtcgtgctccaggctcttacgtaggagcttgcttcgatcgtctgctccaccccgacgccgtgccagcccttttccggaccgtcccagtgttcacgttgcccagccagctgccagactttcttggcgcactccaacagcctagggcacccagaagtggtagactgcaggaaagagctgaacaggtgtctagggctctacagccagccttggactcgtactttcaccccccagggacgcccgctcccggacggggagtaggacctggagctggcccaggagccggagatgggacctag

SEQ ID NO: 227183 - DNA, 2220 bp, synthetic construct
  misc_feature 1..2220: note = Description of Artificial Sequence: Synthetic coding sequence
  source 1..2220: mol_type = other DNA
atggcaccttggcttcagctctgctctgtgttcttcactgtaaatgcctgtctcaacggtagtcagctggcggtcgctgctgggggtagcggcagggcaagaggtgcggacacctgcggatggagaggagtggggcctgcctccagaaatagtggcctgtacaacattacctttaaatacgataactgtacaacatatctcaaccctgtgggcaaacatgtcattgccgacgcccagaacatcacgatttcacaatacgcctgccacgaccaggtagccgtgactattctctggagtcccggtgccctgggcattgaatttctgaaaggctttagggtgattttggaagaactcaaatccgaagggaggcagtgtcagcagctcatcttgaaggacccaaagcaactaaatagctctttcaaacggacagggatggaatctcagcctttcctgaacatgaaatttgagactgattacttcgtaaaagtggtcccgttccccagcattaaaaacgaatcgaattaccatcccttttttttccgtaccagagcgtgcgacctcttactgcaacctgacaatctggcgtgtaaacccttctggaagcctaggaacctgaacatttctcagcatggttcagatatgcaggtgtcatttgatcacgcccctcacaacttcgggttccgcttcttttatctgcattacaaattgaaacacgaaggtccctttaagcggaaaacgtgcaaacaggaacagactacagagacaacatcttgtctcctgcagaacgtaagcccaggtgattacataatcgagttggtcgatgatacgaatactactcgcaaagtgatgcattatgcattgaaacctgttcacagcccctgggccggaccaatacgtgccgtcgcaatcacagtgcccttagtagtcatatcagcgtttgcaacccttttcacagttatgtgtcgcaagaagcagcaggaaaacatttatagccacctggatgaagagtccagcgaatcatccacctacacggctgccttgccgagggagagattgagaccaaggcccaaagtatttctctgttacagcagtaaggacggacagaatcatatgaatgtggtccagtgctttgcctacttcctgcaagatttttgcgggtgcgaagtggccctcgatctctgggaagacttctcgctgtgccgggagggccagcgggagtgggtgatacagaagattcatgagtcccagttcataattgtagtgtgcagcaagggtatgaaatacttcgtggacaagaaaaactataagcataaagggggaggccgtggctctggcaaaggcgagctgtttctcgtggctgtcagcgcgattgccgagaaactgcggcaggccaagcagtctagcagcgctgccctctcgaagtttatcgcggtgtatttcgactactcatgtgagggtgatgttcctggcatattggacctctcgacaaaatatcgcctgatggataatctaccccagctttgcagtcatctgcacagtcgggatcacggattgcaagagccaggtcagcatacgagacagggctcgcgccgaaactacttcagatccaagtccggcagaagtctgtatgtggccatatgtaacatgcaccaattcatcgatgaagagcccgattggtttgagaaacagtttgtgccttttcacccacccccactacgatacagagagccggtactggagaaattcgattctggactggtgctgaatgacgtgatgtgtaaaccagggccagagtccgacttctgtctcaaagtggaagctgccgtgctaggggcaaccggccctgccgatagccagcatgaaagccagcacggcggtttggatcaggacggggaagctcggcctgccttggacggtagtgccgcacttcagcctctcctacacaccgtaaaggcgggatctcccagcgatatgcccagagattccggaatctatgacagttcagtacctagtagcgaactaagcctgccactgatggagggattgtccacggatcaaacagaaacttcatccctcaccgagagcgtctcatccagctcaggcttgggcgaggaagagccacctgccctgcctagcaagttgctgtcctctgggtcatgtaaggccgatctaggatgccgttcctacaccgatgagctgcatgccgtcgcccctctgtag

SEQ ID NO: 227184 - DNA, 1788 bp, synthetic construct
  misc_feature 1..1788: note = Description of Artificial Sequence: Synthetic coding sequence
  source 1..1788: mol_type = other DNA
atggaatcacaaccttttctaaatatgaagtttgagaccgactactttgtgaaagtggtcccattcccctctattaaaaatgagtccaactatcatcccttcttttttaggacgcgagcctgcgacctgctgttacagcccgataatttggcctgtaagcctttctggaaacctaggaacttaaacatatcgcagcacggcagcgacatgcaggttagctttgaccacgctcctcataactttggattccggttcttctatcttcattataagctgaaacacgaagggccatttaaaagaaagacctgcaagcaggaacaaacaaccgagacaacctcctgtctcttgcagaatgtgtccccaggggactatatcattgaactggtggacgacactaacacaacgagaaaggtcatgcattacgctctgaaacccgtgcactcaccatgggcgggacccatccgtgcagtcgctattacagtgccactcgtcgtgatcagcgcgtttgccaccctgtttacggtgatgtgcagaaaaaagcaacaagagaacatctacagtcacttggatgaggaaagcagcgagagttcgacgtataccgcagctttgccaagggagcgactccgaccaagaccgaaggtgttcctctgctactcctcgaaggatggacagaatcacatgaacgttgtgcagtgttttgcttatttcttacaggacttttgtggctgcgaagtcgccttggatctgtgggaagacttttcactatgtagagaggggcagcgggagtgggtcattcaaaaaatccatgagagtcagttcattatcgtggtatgcagtaagggaatgaagtacttcgttgacaaaaagaactacaagcacaaagggggagggcgtggctcgggcaagggcgaactcttcctggtagctgtgagtgcaatagcagagaaactgagacaggccaaacagtccagcagcgctgcgctgtccaaatttatcgcagtctacttcgattattcgtgcgaaggagatgttccaggcattctggacttaagcacgaaatatcgactcatggataacctgccacagctctgcagtcatctccattcccgagaccacggactacaggaaccaggacagcacactcgccagggttccaggagaaattattttagatctaaatcgggacgctccttgtacgtggcaatttgcaacatgcatcagtttattgatgaagagcctgactggtttgagaagcagttcgtgccttttcatccacccccactgcggtaccgggaacccgtactggagaaattcgattccgggctggtactgaatgatgtaatgtgtaagcctggccctgaaagcgacttttgcctgaaggttgaggccgctgtgcttggggctacgggacctgctgattcacaacacgagtcacagcatggcggtctagatcaggacggagaagctaggcctgccctggacgggtctgctgcactccagccgttgctgcataccgtgaaagccggttcccctagcgacatgcctcgcgactcaggaatctacgatagtagcgtgccatcttcagaattaagcctcccattgatggaggggctatcgaccgatcagaccgaaacttccagccttactgagagcgtctctagcagttccgggctgggtgaagaggagcccccagcactgccatcgaaattgctgtctagtggttcgtgtaaagccgacttgggctgccggtcgtacacagatgagctccacgctgtggcgccactttag

SEQ ID NO: 227185 - DNA, 2148 bp, synthetic construct
  misc_feature 1..2148: note = Description of Artificial Sequence: Synthetic coding sequence
  source 1..2148: mol_type = other DNA
atgcccagggcgtccgctagcggtgtccccgctctctttgtgagcggtgagcagggcgtcggccctgcgtctcggaacagcgggctgtacaatatcacttttaaatacgacaactgcaccacctacctaaaccccgtaggtaaacacgtgattgcagatgctcaaaatattactattagccagtatgcttgccacgatcaggtcgcagtcactatcctgtggagcccaggcgctctcggaatagaattcttgaaggggttcagagttattctcgaggaactgaagagtgagggacggcagtgccaacagcttattctgaaagaccccaagcagctgaatagcagcttcaagaggactggcatggaatcacaacccttcctcaacatgaaattcgagacggattactttgtcaaagtagtcccgtttccaagcataaagaacgaatccaattaccaccctttttttttcagaacgcgcgcttgcgacttgctgctccagcccgacaacctggcttgcaaacctttctggaagcccagaaacctcaatattagtcagcacggctctgacatgcaagtctctttcgaccatgctccccacaattttgggtttcgctttttttacctccactacaagctgaaacacgaagggccattcaaacgaaagacttgcaagcaggaacagactacagagaccaccagttgcctgttgcagaacgtgtccccgggagactacataatcgaactggtcgatgataccaacactacccgtaaggtgatgcactatgccctgaagccagtgcactcgccatgggcgggtcccatcagggctgtcgccattactgttcccctggtggttatctccgccttcgctacgctctttacagtcatgtgtagaaagaagcaacaagaaaacatttactcccatctggatgaggaatcatctgagtcttccacgtacacagccgcactcccacgggagcgcctccggcctcggcctaaagtttttctgtgctacagttcaaaagacggacagaaccatatgaatgtcgtccagtgtttcgcctattttcttcaggatttctgtgggtgcgaggtcgcactcgatctctgggaagatttctctctttgtagagaaggccagcgggaatgggtgattcagaagatacacgaaagccagtttatcatcgtcgtctgctctaagggaatgaagtatttcgtggataaaaaaaactacaaacataagggaggaggcaggggatcagggaagggagagctgttcctggtcgccgtgagtgctatagccgaaaagttgcgccaggccaagcagtcatcctctgctgctctgtcgaaatttatcgccgtctacttcgactacagttgcgaaggagatgtgcctgggatcttggatctcagcacaaaatatcgcttgatggacaatctcccacagctgtgttcacacctgcattcacgagatcacggtcttcaagaaccaggacagcataccaggcagggcagtcggcgtaactactttcgcagtaaatctggacggtccttgtacgtcgccatttgcaacatgcatcagttcatcgatgaggagccagactggttcgaaaagcagtttgtccccttccatcccccacccttgcggtaccgggagcccgtgctcgaaaaatttgactctggactcgtgctcaatgatgttatgtgcaagccagggcctgaaagtgacttctgtttgaaagtggaggccgcagtgctcggcgcaacaggcccagcagactcccaacacgagtcacagcacgggggactggatcaagatggagaagccagacccgctctggatggcagtgctgccctgcagccactgttgcacaccgtcaaagccggatcaccaagtgatatgccgcgagactctggaatatacgactcatctgtgccctcttctgaattaagcctcccactgatggagggcctctcaacagatcagacagaaacctctagcctaactgagtcagtgtcctcctcgagcggcctcggcgaggaggagccccctgccttaccgtccaaactgctgagcagcggatcatgcaaggccgatctgggttgtcggagttacaccgatgagcttcacgccgtcgctccattgtag

SEQ ID NO: 227186 - DNA, 1788 bp, synthetic construct
  misc_feature 1..1788: note = Description of Artificial Sequence: Synthetic coding sequence
  source 1..1788: mol_type = other DNA
atggaatcccaaccatttctgaatatgaagttcgagactgattacttcgtaaaagtggttcctttcccaagcattaaaaacgaatccaattaccaccctttcttcttcagaaccagagcttgtgacctgctgttacaaccggacaacctagcctgcaagcctttttggaagccgaggaatttgaacatcagccagcacggttccgacatgcaagtgtcattcgatcatgcaccccacaactttggcttccgcttcttctacctgcactataagctcaaacatgagggccctttcaagcgtaagacttgcaagcaggaacagactacagagaccactagctgtttgctgcagaacgtgtctcctggcgactatatcatcgaactcgttgacgatactaacacgacaagaaaggtgatgcactatgctcttaagccagtccattcaccatgggcagggccaatcagagccgtggctatcactgtgcccctggtcgttattagtgccttcgccaccttattcacggtaatgtgcagaaagaaacagcaggagaatatatacagtcatttggacgaggagtcatctgagagttctacatacacagcggcacttcctagggagcgcttaaggccccgtcccaaggttttcctgtgctattcttcaaaagatggccagaatcacatgaacgttgtgcaatgtttcgcttatttcctgcaggatttctgcgggtgtgaggtcgctcttgacttgtgggaggacttttccctatgccgtgaggggcaaagggagtgggtgatacaaaagatccacgaatctcagttcatcatagtggtgtgctcaaagggtatgaaatattttgtggataagaagaactacaaacataagggcggagggcgagggtccggcaagggcgagctgtttctggtggctgtctctgccatcgccgagaaactgcgtcaagctaagcagtctagtagcgccgctctgagcaaattcatcgctgtgtacttcgactactcgtgtgagggggacgtgcccggtatactggacctgagcaccaaatacagattaatggacaatcttccccaactgtgctctcacctgcattcacgagatcatggcctgcaggaacctgggcagcatacaaggcaggggtcaagacggaactatttcagatccaagagtggtcgcagcctgtatgttgctatctgtaatatgcaccaattcattgacgaagagccagactggttcgagaagcagttcgtgccattccatcctccaccactgcgttatagggagccagtgctggaaaagttcgacagcgggctggtcctgaatgatgtgatgtgcaagcccggacccgaatccgatttctgtctaaaggtcgaagccgcagtgctgggggctactggacccgctgacagccagcacgaatcccaacacggtggcctcgatcaggatggagaggctcggcctgcgctagacgggtcagccgcacttcaaccactcctgcacacggttaaggcaggcagcccatctgacatgcctcgagactcaggaatctacgactccagtgttccttccagtgagctgagcttgcccctgatggaagggctgtcaaccgatcagacagagacatcaagcctgactgaaagcgtgtcttccagttccggcctgggtgaggaagagcctcctgcattgccttccaagctcctgtcatcagggagttgtaaggcagatctgggctgtaggtcttacaccgacgaactgcatgccgtcgccccactgtag

SEQ ID NO: 227187 - DNA, 222 bp, synthetic construct
  misc_feature 1..222: note = Description of Artificial Sequence: Synthetic coding sequence
  source 1..222: mol_type = other DNA
atggaatctcagcctttccttaatatgaaatttgagacagattattttgtgaaggtggtcccgttcccgagtattaaaaacgaatccaactatcacccattctttttccggacacgagcatgtgatttgctcttgcagcccgataatctggcatgtaagcctttctggaagcccaggaatctcaatatctctcagcatggtagcgacatgcaggttagctag

SEQ ID NO: 227188 - DNA, 1671 bp, synthetic construct
  misc_feature 1..1671: note = Description of Artificial Sequence: Synthetic coding sequence
  source 1..1671: mol_type = other DNA
atgggcttttggatccttgcaatccttacaatactcatgtacagtacagcggcaaagttctccaaacagagctggggactggagaatgaagcactgattgtccgatgccctagacaagggaaacccagctacacagtggattggtactatagtcagactaacaaatctattcctacccaggagagaaatcgcgtctttgcatccggacagctgctgaaattcctgcctgccgcagtggccgacagcggcatttacacctgcatagtgcggtcacccaccttcaatcggaccggctatgcaaatgtgactatttataaaaaacagagtgactgcaatgtcccagactatctcatgtattctaccgtgagcggaagcgaaaagaatagtaagatttattgccccactattgatttgtataactggactgcgccacttgaatggtttaagaattgccaggctttacagggctctcgctaccgtgctcataagtcttttctggtcatcgataatgttatgaccgaggatgcaggtgactacacatgtaaatttattcacaacgagaacggggctaactacagtgtgaccgccacaagatcatttacagtgaaggatgagcagggattcagtctgttccccgtgattggcgctcctgcgcaaaacgaaatcaaggaagtcgaaatcggtaagaacgctaacctgacgtgctccgcctgtttcggaaagggcacccagttcctggcagcagtactgtggcaactgaacggcaccaagattaccgactttggggagccccgtattcagcaagaggaagggcaaaaccagtcattcagcaatgggctcgcatgcctggacatggtactgcgcattgccgatgttaaggaggaggacctcctgttacagtatgattgcctcgccctcaacctgcatggcttgcgacggcatacagtgagactgtccaggaagaatccaatcgaccaccactccatctactgcatcatcgctgtgtgtagtgttttcttgatgctgattaacgtactagtgattattctgaaaatgttctggattgaagcgacgcttctgtggcgagatatcgctaagccctataagacacggaatgacggcaaactgtatgacgcttacgtcgtgtatcccaggaactataagtccagtacagatggcgctagccgggttgagcactttgtgcaccagatcctacccgacgtgctggagaataagtgcggatacaccctctgtatctacggacgggatatgctcccaggcgaagacgtcgtaacagcagtggaaactaatatacgcaaatctagaaggcacatattcatccttactcctcagattacccataacaaggaattcgcctatgagcaagaagttgccctgcactgtgccctgatacagaacgacgctaaagtcattctcatcgaaatggaggctctgtctgaactggatatgttgcaggctgaagcgcttcaggactccctgcagcatttgatgaaggtacagggaacaattaagtggagagaagaccatatagccaacaagcgtagcttgaatagtaaattttggaaacatgtccgctatcaaatgcctgtcccaagtaagattcccaggaaagcatcctccctcacgcctcttgctgcgcagaagcagtag

SEQ ID NO: 227189 - DNA, 513 bp, synthetic construct
  misc_feature 1..513: note = Description of Artificial Sequence: Synthetic coding sequence
  source 1..513: mol_type = other DNA
atgaactgcagggaactgccgctgaccctgtgggttttaatcagcgtcagtacagcagaaagctgtaccagccgtcctcacattaccgttgtggagggtgaacctttctatctaaagcactgttcatgcagcctggcccatgaaatcgagactacaaccaaaagctggtataaatcctcaggatcacaggagcatgttgagttgaatccaaggagctcttccagaattgctttgcacgattgtgtccttgagttttggcctgtcgagctgaatgacacaggctcctacttctttcagatgaagaactacactcaaaaatggaagttaaacgtcataagaagaaacaagcatagctgttttacggaacgtcaggtgacctcaaagatagttgaggtcaagaagtttttccagataacctgtgaaaacagttactaccaaacattagtcaattccacaagtctgtataagatcgggccacccatctgcagaaaaacgagctccgggttgcattag

SEQ ID NO: 227190 - DNA, 1626 bp, synthetic construct
  misc_feature 1..1626: note = Description of Artificial Sequence: Synthetic coding sequence
  source 1..1626: mol_type = other DNA
atgaactgccgagagctgccactcactctttgggtgctcattagtgtgtcaacagcagaatcatgtactagccggccacacatcacagtggtggaaggcgagcctttctacctgaaacactgctcttgctcacttgcacacgagattgaaacaaccacaaagagttggtataagtcatcaggaagtcaggagcacgttgagcttaacccaaggagttcctcccggatcgccctccacgattgtgtgctggagttctggccagtggaactgaacgacacggggtcctattttttccagatgaaaaactacacgcagaaatggaaactcaacgtgattagaagaaataaacatagctgctttacagagcggcaggtcacctctaaaatcgtggaggtgaaaaaatttttccagattacctgcgagaacagttactatcagacgttagtgaacagtacgtccttgtataaaaattgcaagaaactactcctggaaaacaataagaatccgactataaagaagaatgctgaattcgaggatcaagggtactattcatgtgttcacttccttcaccacaacgggaaactgtttaatattaccaagacttttaatattacaatagtggaggatcgtagcaatatcgttccagtcctgctgggacccaagctcaatcacgtcgcagtggagctgggcaagaacgttcgtctgaactgtagcgctctgttgaatgaagaggacgttatatattggatgtttggagaagagaatgggagcgatcctaacattcacgaggagaaagagatgaggatcatgacacctgaaggcaaatggcacgcatctaaggtgttaaggatcgagaacatcggagaatcaaacctcaacgtcctatataattgcaccgtggccagcactgggggaaccgacactaaatccttcatcctggtgcggaaagcagatatggcagatatccccggacacgtgttcacaagggggatgatcattgccgttctcatcttggtggctgtggtgtgtcttgtcaccgtgtgtgtaatttaccgtgtagacctcgtgctcttctatcggcacttgaccagacgagatgagacgctgacagatggcaagacgtatgatgcattcgtcagctacctcaaagagtgtaggcccgagaacggagaggaacataccttcgccgtggagatccttcctcgcgtcctcgaaaagcatttcggatataaattatgtatcttcgagagggacgttgtccccggaggtgccgtggtcgatgagatccactcgctgattgaaaagagccgacgacttattatcgttctgtcaaagtcctacatgtcaaacgaagttcgctatgaactagaatccggcctgcacgaggctcttgtggaacggaaaattaagatcatcctcatcgaattcacaccagttactgacttcacttttttgccgcagtctctcaagctactgaagtcacatagggtgcttaagtggaaggcagataaaagtctgagctacaattcccgattttggaagaatctcctttatttaatgccagcaaaaaccgttaagccaggtcgggacgaaccggaggtgttgcccgtgctttccgagtcctag

SEQ ID NO: 227191 - DNA, 1626 bp, synthetic construct
  misc_feature 1..1626: note = Description of Artificial Sequence: Synthetic coding sequence
  source 1..1626: mol_type = other DNA
atgaactgccgcgaactgcccctaaccctgtgggtgctcatctccgtgtcaactgctgagtcttgcacctcccggcctcacatcactgttgttgaaggcgagcccttttatctcaagcattgcagttgctcccttgcgcacgagatagaaactaccactaagtcatggtataagtcatcgggaagccaggagcatgtagaactgaaccctcggtcttcttcacggatcgcactccatgactgcgtgctagaattttggcctgtagaactgaacgacaccgggagctacttcttccaaatgaagaactacacacaaaaatggaaattaaacgtgatccggcgtaacaaacactcctgtttcaccgagcgccaggtgacaagcaaaattgttgaggtgaagaagttcttccagatcacatgcgaaaacagctactaccaaaccttggtgaatagcacttcgctgtacaaaaattgtaaaaaactgcttcttgagaataataagaatcctactataaagaagaatgccgaattcgaggatcagggctattacagctgtgtgcacttcctacaccacaacggtaaattgtttaatataacaaagaccttcaatatcacaattgtggaggatcgctccaatattgtccccgttctcttgggcccaaagctgaatcacgtagcagttgaactcggcaaaaacgtccgtctcaattgcagtgccctgctcaacgaggaggacgtgatttattggatgtttggagaggagaatggctccgatcctaacattcatgaagaaaaggagatgaggatcatgacacctgaaggtaagtggcacgcctctaaggtgctgcgaatcgagaacattggcgagtccaatctgaacgtgctgtacaactgcaccgtggcctcaaccggcggaactgatacaaagtcttttattctggtgcgcaaggctgacatggctgacatccctggtcatgtgttcacacgcggaatgatcattgccgtgctgattctggtggcagtggtgtgccttgtgaccgtgtgtgttatctatagggttgacttggtcttgttctatagacatctgacgaggcgtgatgaaacactcacagatggcaaaacttacgatgcgtttgtgtcctatttgaaagagtgtcggcctgagaatggggaggaacatacatttgccgtggagatcctgcccagggtgttggagaagcattttggttacaagctttgtatctttgaacgcgacgtcgtacccggtggtgccgttgtggatgagatccacagcttgatcgaaaagagtcggcgtctaatcattgtactcagcaaatcttacatgtccaacgaggtacgatatgaacttgaaagcggcctgcacgaagcgctggtcgaacgcaagattaagatcattctaatcgagttcacccccgttacagacttcaccttcctgccccagagcctgaagctattaaaaagccatagggtccttaaatggaaggctgataagtctttgagctataatagccgattttggaaaaacctactgtacctcatgcccgctaaaaccgtcaagcccggtagggatgaaccagaagtgctgccggtgctcagcgaatcatag

SEQ ID NO: 227192 - DNA, 1800 bp, synthetic construct
  misc_feature 1..1800: note = Description of Artificial Sequence: Synthetic coding sequence
  source 1..1800: mol_type = other DNA
atgctgtgtctggggtggatatttctgtggctcgtcgcaggggaacgcattaaaggattcaacatctccggatgctcaaccaagaagctattatggacatactcaacgcgatcggaagaggagttcgttctattctgtgatctgcctgaaccgcagaagagccatttctgtcaccggaatcgcctgagccctaaacaggttccagagcatttaccttttatgggctcgaatgacctctcggatgttcagtggtaccagcaacctagtaatggcgaccctctggaagatattcggaagtcttatccgcatatcattcaggataagtgtaccctgcactttctgactccaggtgtcaacaactccggctcttatatctgtagacctaagatgatcaagtcgccatacgatgtcgcctgttgcgtcaagatgattctcgaagtgaaacctcagaccaacgcaagttgcgagtattcagcttcccataagcaggacctgttactgggctcaacaggctctatcagttgtccctccctttcatgtcagagcgatgcccaatcccccgctgtcacatggtacaaaaatggtaagctcctctccgtagagcgctctaacaggatcgtagtggacgaagtgtacgattatcatcagggcacctacgtctgcgattacacccagagcgacacggtttcaagttggactgtgcgagctgtagtgcaggtcaggacaatcgtaggagacaccaaactgaagcctgatatcctcgatcctgtcgaagacacactagaagtcgagctgggtaagccactgaccatttcctgcaaagctagattcgggttcgagcgcgtcttcaaccccgtcataaagtggtacataaaggacagcgatctcgagtgggaagtctccgtgcccgaggcaaagtcaatcaagtcaacactgaaagatgaaattattgagaggaatatcattcttgaaaaagttacccaaagggatctgcggagaaagtttgtatgttttgttcagaattctatcggcaacaccacacaaagcgtacaactaaaggaaaaacgcggtgtcgtactcctgtacatcctgctgggcaccatcggtacactggtggccgtgttggcggcttcagccctcctctacagacactggattgaaattgtcctgctgtatcgcacttaccaatcgaaagatcaaaccctgggcgacaaaaaggacttcgatgcttttgtgagctatgccaaatggagctcttttccatctgaggctactagctcgctgagcgaggaacaccttgccctcagcctgtttccagacgtgctggaaaacaagtacggatacagcctgtgccttcttgagagagatgtggctcccggaggcgtttatgctgaggacatagtatccataattaaacgatctaggagaggcatctttatcttgagccccaattatgttaacggaccctccatctttgagctccaagctgccgtaaatcttgcccttgatgatcagacactgaaacttatcttgattaaattctgttactttcaggagcctgagtcattgcctcatctggttaaaaaggcgctcagagtgttgccaaccgtaacctggagggggctgaagagcgtgcctcccaatagtcgattttgggccaagatgcggtaccatatgccagtgaagaattcccaaggttttacctggaatcagcttaggattacatcacgcatcttccagtggaaaggacttagcagaactgaaaccaccggacgcagttcccagcccaaggaatggtag

SEQ ID NO: 227193 - DNA, 1374 bp, synthetic construct
  misc_feature 1..1374: note = Description of Artificial Sequence: Synthetic coding sequence
  source 1..1374: mol_type = other DNA
atgatattagaggtcaaaccccagaccaacgcgtcgtgtgaatactcggccagtcataaacaggacttgctgctgggttccactgggtccatttcttgccctagtctctcttgccagagtgacgcccagagtccagccgtgacctggtacaagaatggtaaattgctctccgttgagagatcaaacaggatcgtcgtggacgaggtctatgattaccatcagggcacttacgtgtgtgattacacccaatccgacacagtttcaagttggacagttcgggctgttgtccaggtgagaactatagtaggggataccaaactgaaaccggacattcttgacccagtggaggatacattagaggtagagctaggtaagcctttaacaatttcatgcaaagcacggttcgggtttgaacgtgtctttaatcctgtgatcaagtggtatataaaagacagtgatttagaatgggaggtgtcggtccccgaggctaagtcaattaaatctactttgaaggatgagatcatcgaacggaatattattctggagaaggtgacacagagggacttaaggcgcaaatttgtttgcttcgtgcagaattccattggaaacacgactcaaagcgtgcagctcaaagagaagaggggggtggtgttactttacattcttctgggcaccatagggaccctggtagccgtcctggccgctagcgccctgctttatcgacattggattgagattgtgttgctgtataggacctaccagtctaaggaccagaccctgggggacaaaaaggatttcgacgcgttcgtgagctatgccaagtggtccagttttccttctgaagccaccagcagtctgtccgaagagcacctcgccttgtctctctttccggatgtgctcgagaacaagtatggttattctctatgtcttttagaacgcgacgtggctcctggcggtgtctacgccgaggacatcgtcagcatcattaaacgtagtaggcgagggatctttatcttgtcccccaattatgtgaacggaccctcaatctttgaactgcaagcagctgtgaatctggccctggacgatcagaccttaaaactcatcctcattaagttctgctacttccaggagcccgaaagccttccccatttggttaagaaggccctgcgagtactgccaacagttacttggagaggactcaagtccgtcccgccaaacagcaggttctgggctaagatgagatatcatatgccagtaaaaaattcacaaggcttcacctggaatcaacttagaatcacctccaggattttccaatggaagggcctatctagaacagagaccaccggcaggtctagccagcccaaagagtggtag

SEQ ID NO: 227194 - DNA, 135 bp, synthetic construct
  misc_feature 1..135: note = Description of Artificial Sequence: Synthetic coding sequence
  source 1..135: mol_type = other DNA
atgctctgtcttggttggattttcctttggctggtcgccggtgaacggataaaggggttcaacatttctggctgttctaccaagaagttactgtggacatactccactcgttccgaagaagaattcgtgttatag

SEQ ID NO: 227195 - DNA, 534 bp, synthetic construct
  misc_feature 1..534: note = Description of Artificial Sequence: Synthetic coding sequence
  source 1..534: mol_type = other DNA
atgaagctccagtgcgtcagcctctggttacttgggactattctgatcctgtgtagcgtggataaccatggccttcgcagatgtttaataagtacggacatgcatcatatcgaggaatctttccaggagattaaacgtgccattcaggcaaaggatacgttcccaaatgtaacaatcctatcaactctcgaaacactgcagatcataaaacctctggacgtgtgttgtgtaacaaagaatttgctggcgttttacgtggacagagtgtttaaggatcaccaggagcccaatcccaagatattgagaaagatatcatcgatagcaaactcttttctctacatgcaaaaaaccctcaggcagtgtcaggaacagagacagtgccactgtcgtcaggaggccaccaatgcgacacgcgtaatacacgacaactatgaccagcttgaggtccacgctgctgcaataaagagccttggggaactcgatgtgtttttggcatggataaataagaaccatgaagtgatgttctctgcgtag

SEQ ID NO: 227196 - DNA, 648 bp, synthetic construct
  misc_feature 1..648: note = Description of Artificial Sequence: Synthetic coding sequence
  source 1..648: mol_type = other DNA
atgtgtactgagggcgcttttccacaccgtagtgcctgtagtctgccactaacccacgtccatacgcacattcacgtttgcgtgcccgtgctgtggggctctgtccctcggggaatgaaactgcagtgtgttagcctatggcttttaggcactatactgatactttgtagtgttgataaccacggacttaggcgatgtctcataagtaccgacatgcatcatatagaggagtcttttcaggaaataaaacgcgcaatccaggcgaaggacaccttccctaatgtcaccattctgtcaacactggaaaccctgcaaatcatcaagcctctggacgtgtgctgtgtaactaaaaacctgttggccttctatgtggaccgcgtgtttaaagaccaccaggaacctaacccaaaaatccttaggaagatcagttccatcgctaactctttcctgtatatgcagaaaactcttcgtcaatgtcaggaacaaagacaatgtcactgcaggcaagaagcaaccaatgcaacacgggttatacacgacaactacgatcagctggaggttcatgcagcggcaatcaaaagtttgggtgagctggatgtgttcctggcttggatcaataaaaatcacgaggtgatgttttcagcgtag

SEQ ID NO: 227197 - DNA, 792 bp, synthetic construct
  misc_feature 1..792: note = Description of Artificial Sequence: Synthetic coding sequence
  source 1..792: mol_type = other DNA
atggattcttatttactgatgtggggcttactgacatttattatggtgcctgggtgtcaggctgaactttgcgatgatgaccccccagaaataccacatgccacttttaaagcaatggcctacaaggaaggtaccatgctgaactgtgaatgcaaacgaggttttaggcgcattaagtctggcagcctctacatgctgtgtaccgggaacagctctcactcatcgtgggacaaccaatgccagtgcacaagctccgcaactcggaatacaacaaaacaggttacacctcagcctgaggagcagaaggaacgcaagaccacagagatgcagtctcctatgcagcccgtggatcaggcctccttgcccggacactgccgcgagcctccgccatgggaaaatgaggcgacggaaaggatctaccatttcgttgtagggcaaatggtgtattaccagtgtgtccaaggctatagggctctccaccgcggaccagccgaatccgtatgtaagatgacgcacgggaaaacgcggtggacccagccgcagctgatctgtacaggggaggaaaagccccaggcaagcccagaggggagacccgagtctgaaacctcctgtctggtcacaacaaccgacttccagatccagacagaaatggcggcaacaatggaaaccagcatctttactacggaatatcaggtcgcggtcgccggttgcgtatttttgcttatttccgtgctactgctgagtggactgacctggcagcgaaggcaacggaaatcccggcgtaccatatag

SEQ ID NO: 227198 - DNA, 603 bp, synthetic construct
  misc_feature 1..603: note = Description of Artificial Sequence: Synthetic coding sequence
  source 1..603: mol_type = other DNA
atggattcctacctgctgatgtggggtctgctgacattcattatggtgccagggtgtcaggccgaactctgtgatgacgatccgcctgagattcctcacgccacatttaaagccatggcatataaagaaggcaccatgctcaactgtgaatgtaaaagaggctttcggaggatcaaatcaggctcactctacatgttgtgcacgggaaatagtagtcactcttcttgggacaaccagtgccaatgtactagttccgccacacggaacaccactaaacaggtcactcctcaacccgaggagcagaaagagcgcaaaaccactgagatgcaatctcccatgcagcccgttgaccaagcgtctctccctggggaggaaaaacctcaggccagtcctgaggggagacctgaaagcgaaacgtcttgccttgtgaccacgaccgatttccagatccagaccgaaatggcggcaaccatggaaacttccatcttcaccacggagtatcaggtggccgtggcgggatgtgtcttcttactcatctctgtacttcttctctccggcctgacctggcaacgcaggcagaggaagtctcggaggaccatttag

SEQ ID NO: 227199 - DNA, 819 bp, synthetic construct
  misc_feature 1..819: note = Description of Artificial Sequence: Synthetic coding sequence
  source 1..819: mol_type = other DNA
atggatagttacctgctgatgtggggcctgctcacctttattatggttcccggatgccaggcggagctttgtgacgatgacccccctgagatcccacacgccacgttcaaggccatggcatataaggaggggacgatgcttaactgtgagtgcaagaggggatttaggcgcatcaaaagtggttcactttacatgttgtgtaccggaaactcctctcactcatcttgggataatcagtgccagtgcacgtccagtgcaacccgcaatacaactaagcaggtgaccccccagccggaggagcagaaagagaggaagacaactgagatgcagagtcccatgcagcccgttgatcaggcaagtctgcccggacactgtcgtgagcccccaccgtgggagaacgaggcgaccgaaagaatctaccatttcgtggtgggccaaatggtgtactatcagtgcgtgcagggttatcgagccctccatcgaggtccagcggaatctgtgtgtaagatgacacacggtaaaacccgatggactcagccacagctgatctgcaccggggaaatggagaccagtcagtttcctggggaagaaaaaccgcaggcttctcccgagggccgacctgagagtgaaacgagttgcttagtcacaacgactgactttcagatacagactgaaatggccgcaactatggagaccagcattttcaccactgaatatcaggtggccgtagccggatgcgttttcctgcttatcagcgtccttttactctccggattgacctggcagagacggcagaggaagtcgcgcaggactatctag

SEQ ID NO: 227200 - DNA, 489 bp, synthetic construct
  misc_feature 1..489: note = Description of Artificial Sequence: Synthetic coding sequence
  source 1..489: mol_type = other DNA
atggtgcccggttgccaggctgaactgtgtgacgacgaccctcccgagatcccacacgcaacattcaaagctatggcctataaggaagggactatgcttaattgtgaatgcaaaagaggatttaggcggattaagagtggttcgctgtatatgctgtgcacgggaaattcgagccactcttcttgggataaccaatgccaatgtacgtcgtcggctacacggaatacaaccaaacaggtgactccacagccagaggagcaaaaggagaggaagaccacggagatgcaaagcccgatgcagccggtggaccaggcctccttacccgactttcagattcagactgagatggccgcaaccatggagacctcaattttcacgacagaataccaagtggctgtggccggatgcgtattccttctcatttccgttctacttctttccggtttgacgtggcagcggaggcagcgcaagtctagacggaccatctag

SEQ ID NO: 227201 - DNA, 330 bp, synthetic construct
  misc_feature 1..330: note = Description of Artificial Sequence: Synthetic coding sequence
  source 1..330: mol_type = other DNA
tgaattccccacgccacctttaaggcgatggcctataaagaaggaactatgcttaattgcgagtgcaaacggggattccgcaggattaagagcggcagcctgtacatgctgtgcacaggcaactcttctcactcctcctgggataaccagtgccaatgcacctcttctgccaccagaaataccactaagcaggtgaccccacagcctgaagaacagaaagagagaaagacgacagaaatgcagagcccgatgcaacctgtggatcaggcctcactccccgacttccagattcagaccgagatggcagctaccatggaaacctccatttag

SEQ ID NO: 227202 - DNA, 1110 bp, synthetic construct
  misc_feature 1..1110: note = Description of Artificial Sequence: Synthetic coding sequence
  source 1..1110: mol_type = other DNA
atggaccccaggaaggtcaacgagttgagagctttcgttaaaatgtgtaagcaggatcccagcgtgcttcacactgaggagatgagatttcttcgtgaatgggttgaatctatggggggaaaagtgcccccagccacacagaaggctaaaagcgaagagaatacaaaggaggaaaagcctgatagcaaaaaggtcgaggaagatcttaaggccgacgagcccagcagtgaagaatccgatctggagatagacaaggagggggtcatagaacctgatactgacgccccacaggaaatgggtgatgagaatgcggaaataacagaagagatgatggatcaagctaatgataagaaagtagccgctattgaagccctgaatgatggcgaattacagaaggccatcgacttattcacggacgcaattaagctgaatccacgactggccatcctgtacgccaaacgagcctcggtgtttgtgaaactgcagaaacctaatgcagccatccgggactgcgaccgcgctatcgagatcaaccctgatagtgcgcagccctataaatggcggggaaaagcgcaccggctgctgggtcattgggaagaagccgctcacgatctggctttggcgtgcaaactcgactacgacgaagacgcctccgcgatgttgaaagaagttcagcccagggcacaaaagatagccgagcatagaagaaaatatgaacggaaaagggaagaaagagaaattaaggagcggatagaacgggtcaagaaagccagagaagagcatgagcgggctcaacgcgaagaagaagccagaaggcagtcaggggctcaatacggcagcttccctgggggtttccctggtggcatgcccggtaacttccccggaggaatgccaggcatggggggagggatgccagggatggccggaatgccaggcctgaacgagatcttgtcagatcccgaggtgctggctgcgatgcaggaccccgaggtgatggtggccttccaggatgttgctcagaacccagccaacatgagtaagtaccagtcaaatcccaaagtcatgaatttgatttcgaagctgtctgccaagtttggaggtcaggcttag

SEQ ID NO: 227203 - DNA, 441 bp, synthetic construct
  misc_feature 1..441: note = Description of Artificial Sequence: Synthetic coding sequence
  source 1..441: mol_type = other DNA
atggcagcccctgctctatcctggagattgccattactgatcctgctgctgcctctggccaccagctgggcatctgccgcagtgaacgggacaagccagtttacatgtttctataactcccgagctaacatcagttgtgtgtggtcacaggatggggctctgcaggatacctcctgccaagttcacgcctggccggataggagacggtggaatcaaacgtgcgagctcttacctgtttcacaagccagttgggcatgcaacctgattctaggagcacccgatagccagaagcttactacagtcgacatcgtgacgttgagggtcctgtgtcgagagggagtgcgatggcgggtaatggccattcaggattttaagccattcgagaatttgcgcctcatggcccctatatctctccaagtggtccacgtcgagacccattag

SEQ ID NO: 227204 - DNA, 267 bp, synthetic construct
  misc_feature 1..267: note = Description of Artificial Sequence: Synthetic coding sequence
  source 1..267: mol_type = other DNA
atggccgcacccgctctcagttggagactgccactgctgatattgttactgccattagccacatcatgggccagcgcggctgtgaatgggaccagtcagtttacctgtttctataattcacgagcaaacatctcttgcgtatggagtcaggatggcgcactgcaagacacatcctgtcaggtccacgcttggcccgaccgcaggaggtggaaccagacgtgcgaactcttgcccgtttctcaggcctcttgggcttgtaacctctag

SEQ ID NO: 227205 - DNA, 567 bp, synthetic construct
  misc_feature 1..567: note = Description of Artificial Sequence: Synthetic coding sequence
  source 1..567: mol_type = other DNA
atggcggctcccgctttgtcttggcgcctaccccttctgatcctgctcctcccattggccacatcctgggccagtgcagccgttaacgggacctcacaattcacatgcttctacaactcgagggctaatattagttgtgtttggagtcaggacggcgcactgcaggacacctcatgtcaggtgcatgcatggcctgatcgcaggcggtggaaccaaacatgcgaattactgcccgttagccaggctagctgggcctgcaacctgatactgggggcacccgattcccaaaagctgacaaccgtcgacatcgtaaccctgcgcgtgctatgtagggaaggagtgaggtggagagtcatggcgattcaggacttcaaacccttcgaaaacctaagactcatggcacccataagcctacaagtagtccatgtggagacacacaggtgtaatatcagctgggaaatcagccaggccagccactacttcgagagacatctggaatttgaagcacgaactctcagtcccggtcacacatgggaagaagcccctctcctgactttgaagcagtag

SEQ ID NO: 227206 - DNA, 297 bp, synthetic construct
  misc_feature 1..297: note = Description of Artificial Sequence: Synthetic coding sequence
  source 1..297: mol_type = other DNA
atggaacccccaaaccccttgggggagcagtactttaaacgcacaatgccacgtatccccactctgaagaacttggaggacctggtgaccgagtatcatgggaatttcagtgcgtggagcggagtgtctaaagggctggccgaaagcttgcagcctgattactctgagaggctgtgtctggtgtccgagatcccgccaaaaggaggcgctctgggagagggcccaggggcaagtccttgcaatcaacattcaccctactgggcacccccttgttataccctcaaaccagaaacctag

SEQ ID NO: 227207 - DNA, 474 bp, synthetic construct
  misc_feature 1..474: note = Description of Artificial Sequence: Synthetic coding sequence
  source 1..474: mol_type = other DNA
atgcttaaaccgagtctgccattcaccagccttctcttccttcaactgcctttgctaggcgtaggactgaacacgaccatcctcacccccaatggcaatgaggatacgaccgcagacttctttctgaccacaatgccgaccgatagcctgtcagtttccaccctgcctctcccggaagtgcaatgcttcgtgttcaatgtggaatatatgaactgtacttggaattctagctccgaacctcaaccgacaaacttgactctacattactggtacaagaactcagataatgataaagtccaaaaatgctcacattacctgtttagtgaggagattacttccgggtgtcagctgcagaagaaggagattcacctgtaccagacctttgtggttcaattgcaggacccgagagagccccgaagacaggcaactcagatgctcaaactgcaaaatcttggtactatatctggactgtag

SEQ ID NO: 227208 - DNA, 1110 bp, synthetic construct
  misc_feature 1..1110: note = Description of Artificial Sequence: Synthetic coding sequence
  source 1..1110: mol_type = other DNA
atgttaaagccgtctctaccttttacatctctcctgtttctccagctgcccctcctcggagtaggcctgaacacgacgatcctcactcctaacgggaacgaggacactaccgcggattttttccttacaaccatgccaaccgactcgctaagtgtgtcaacactaccactgcctgaagtgcagtgctttgttttcaatgtggagtacatgaactgcacgtggaacagctcaagcgagcctcagccgaccaacttaaccctgcactattggtataaaaacagcgacaacgataaagtgcagaaatgttcccactatttgttctctgaggagataacatctggctgtcaactgcagaagaaagagattcatctgtatcaaacctttgtagtgcagctgcaggaccctagggaaccacggagacaggctacacagatgctgaaactgcagaacctagtgataccctgggctccggaaaaccttaccctccataaactgagtgaatcacaacttgagctgaactggaacaaccggtttctcaatcactgcctcgaacaccttgtccagtaccgcacagattgggatcactcatggactgagcagtctgtcgactataggcacaaattttctctgccttctgtagatggtcagaaacgctatacattccgcgtaaggtcaagattcaaccccctgtgtggcagcgctcagcactggtcagaatggtcacacccaatacactggggctctaacactagcaaggagaatccgtttctgttcgcactggaggcggtcgttattagcgtaggatctatgggactaattattagtcttctttgtgtttacttttggctagagcgcactatgcccaggatccctactctcaagaaccttgaagacttggttactgaataccacggaaactttagcgcttggtctggggtgagcaagggattggccgagagtctccagcctgactattcagagcgcttatgtttggtgagtgagatcccaccaaagggaggcgctttaggagaaggccctggggctagcccttgtaaccagcacagtccatactgggctcccccatgctacacattgaagccggagacttag

SEQ ID NO: 227209 - DNA, 540 bp, synthetic construct
  misc_feature 1..540: note = Description of Artificial Sequence: Synthetic coding sequence
  source 1..540: mol_type = other DNA
atgggcatgaaaaccccacagctggaacaatccgtagactatagacacaagttttccttgccaagtgtggatggccagaaacgctataccttccgcgtgaggtccaggtttaacccattgtgcgggtccgctcagcactggtctgagtggtcccatcccatccactgggggagtaatacttccaaagaaaatccttttctgttcgcattggaggccgtcgtgatctctgtggggagcatgggactcatcatatctctcctttgcgtatatttctggctcgagagaacgatgcctcgtatccctaccctgaagaatttggaggacctggtcacagagtatcacggcaacttcagcgcatggtccggagtctcaaagggtctcgctgagtctctgcagcctgactatagtgaacgcttgtgcctcgtgtcagaaatccctcccaagggtggggcactcggtgaaggccctggggcatccccatgcaatcagcacagcccctactgggctcctccatgctacactctcaaacctgaaacatag

SEQ ID NO: 227210 - DNA, 1662 bp, synthetic construct
  misc_feature 1..1662: note = Description of Artificial Sequence: Synthetic coding sequence
  source 1..1662: mol_type = other DNA
atgcgcgctcctgggaggcccgctctccgcccacttcccctgccgccactgctactacttctgctggctgcgccatgggggagagctgtaccctgtgtatccggcggtttacccaagcctgcgaatattacattcctctctataaatatgaagaatgtgctccagtggacccctccggaagggctgcagggggtgaaagtaacttataccgtgcagtatttcatttatggccagaagaaatggcttaacaagtcggagtgcagaaacatcaatcgaacctattgcgacctctccgctgagaccagcgactacgagcatcaatattacgcaaaagtcaaagccatctgggggacaaaatgcagtaaatgggccgaatccgggcgattttatccatttctggaaacccagatcggacctcctgaagttgctctaaccacggacgagaaaagcatatccgtggtgctcaccgctcctgagaagtggaagcgaaatcctgaggacctcccggttagcatgcagcagatttattccaatctaaagtacaacgtttcggttttgaacactaaatccaacagaacatggagccaatgcgtcaccaatcacacgttggtgttgacgtggctcgaaccgaatacactgtactgtgttcacgtggagagctttgtgcctggccctcctaggcgtgcacagccttccgaaaaacagtgtgcacggactctcaaggatcagtccagtgaattcaaagctaaaatcatcttctggtatgtcctgccggtgagcatcacagtgttcctcttctccgtaatggggtatagcatctatcgttacattcacgtcgggaaggaaaaacaccccgcaaacttaatcctgatttatggaaatgaatttgacaagaggttctttgtgccagccgaaaagattgtgatcaactttatcactctgaacatctcagatgattccaaaatctcacaccaggatatgagcttactcggcaaatccagtgacgtgtcctccctgaatgatcctcagccctcgggaaacctgcgacctccccaggaggaagaggaggtgaagcatctcggctatgcatctcatctcatggagatcttttgtgactccgaggagaatacagaaggcaccagtctgacacagcaggaatcactgagccggactataccaccagacaaaacggtgattgagtacgaatatgatgtcagaacaacggatatctgcgcaggccctgaggagcaagagttgagcctccaggaggaggtgagtacccaggggaccctcctggaatctcaggctgctcttgcagtgctgggccctcagactctgcagtattcgtacaccccacagctgcaagatttagatcctcttgctcaagaacatactgattctgaagaaggacctgaggaagaaccatctaccacactggtcgattgggacccgcagacgggacggctctgcatacccagtctatcgtcattcgaccaggacagtgaagggtgtgaaccctctgagggggacggattaggagaggaggggttactctctagactgtatgaagagcccgctccagatcgcccaccaggggagaatgaaacttatttgatgcagtttatggaggaatgggggctctacgtgcagatggaaaattag

SEQ ID NO: 227211 - DNA, 630 bp, synthetic construct
  misc_feature 1..630: note = Description of Artificial Sequence: Synthetic coding sequence
  source 1..630: mol_type = other DNA
atgcgagcgcctggaagacccgctctgaggcctttgcctctgccccctctacttctcttgttactcgccgcaccttgggggcgtgccgtaccttgcgtgtcaggaggcctgccaaaacctgccaatatcactttcctcagtattaacatgaagaacgttctgcagtggacacctcccgaaggccttcaaggcgtcaaagtgacctacaccgtgcagtacttcatatatggtcagaaaaagtggctgaataaaagcgagtgcagaaatattaatcggacgtattgcgacctctcagccgagactagcgattacgagcaccaatattacgcaaaggttaaagcaatctggggcacaaaatgttcaaagtgggcagaatctgggcgtttttacccgttcctggaaactcaaattggaccccctgaggtggccctgactacagatgagaagagcatctcagtcgttctcacggccccagaaaagtggaagcgaaaccctgaagatctaccagtgagcatgcagcaaatctatagcaatctgaaatacaacgtgtccgtgctgaatacaaagtcaaatcggactgtgtccctcaaatggaatggagcatatattcacgtacccttgtgctcttag

SEQ ID NO: 227212 - DNA, 1329 bp, synthetic construct
  misc_feature 1..1329: note = Description of Artificial Sequence: Synthetic coding sequence
  source 1..1329: mol_type = other DNA
atgtcctataacggattacaccaacgggtgtttaaagagctgaagctactgactctgtgctctatctcatcgcagattggccctccagaagtggcactgacaacggacgaaaagtctatttccgtggtgctcaccgcccctgagaaatggaagagaaatccagaggacttgccagtgagcatgcagcagatctacagcaacctaaaatataacgtttctgtgctgaacacgaagtcaaataggacctggagccaatgcgtcacaaaccacacacttgtacttacgtggctggagcccaacacgctctattgcgtgcacgtcgaatccttcgtgcctggtcctcctcgacgcgcacagcccagcgagaagcaatgtgctcgtaccttgaaggatcagagcagtgagttcaaagccaagatcatcttttggtacgttttaccggtctcaatcaccgtgtttctcttttcagtcatggggtactctatctacaggtacatccacgtaggcaaggaaaagcatcctgccaaccttatactgatttacgggaacgagttcgacaaacgcttttttgttcccgcagaaaagatagtcattaacttcatcaccctgaacatttctgacgacagtaagatctcccaccaggatatgagtctcctggggaagtcttcagatgtgtccagcctcaatgacccacagccgagcggcaacctacgcccaccccaggaggaagaagaagtgaaacatctcggatacgcaagccatctgatggaaattttttgtgactcggaagagaataccgaggggacgagcctgacccaacaagagtcgttgagcagaacaataccaccagacaaaacggttatcgagtacgagtacgatgtacgtactaccgatatttgcgccggaccagaagaacaggaattgtctcttcaagaagaagtgtccacccagggcactcttttggagtcgcaggcagctttagcagtacttgggccacagacactccagtattcttacaccccacagctccaggatctcgaccccctcgcacaggagcataccgacagcgaagagggaccggaagaggaacctagcactacactggtggattgggacccccagaccggaaggctgtgtattccgtcattaagttcattcgaccaggattcggaaggttgcgagccttccgaaggcgacggcctgggcgaggaaggattgctgtcacggctgtatgaggaacccgcaccggatcggccacccggagagaatgaaacttacttaatgcaatttatggaagagtggggactttacgtgcagatggagaactag

SEQ ID NO: 227213 - DNA, 1515 bp, synthetic construct
  misc_feature 1..1515: note = Description of Artificial Sequence: Synthetic coding sequence
  source 1..1515: mol_type = other DNA
atgaagaacgtgcttcagtggactccgcctgaaggcctccagggggtgaaggtgacatacacagtccaatacttcatttacggccagaagaaatggctgaacaagtccgagtgcagaaacataaatagaacttactgtgatctctctgccgagacttcagattacgaacatcaatattacgccaaagtgaaggcaatttggggcactaagtgctcaaagtgggcggagtccgggcgtttttacccgttccttgaaacccagattggccctcccgaagtggctttaaccactgacgagaaatccattagcgttgtgcttaccgcacctgagaaatggaaacggaacccggaagacctgcctgtcagcatgcaacaaatatactccaatctgaagtataatgtctcagtgctcaatactaaaagcaataggacttggtctcagtgcgtgactaaccacactttagttcttacctggctcgagcctaatacactctattgtgttcatgtcgaatctttcgtgcccggacccccaagacgagcccagccgagcgaaaagcagtgcgctagaacactgaaggatcagtcaagtgagttcaaggccaaaattatcttctggtatgtgttgcctgtgagtatcactgtgtttttgttctctgtcatgggttacagtatttaccggtacatccatgtggggaaggaaaaacaccctgctaatttgatccttatctatggtaatgaatttgataagcggttttttgtaccagcagagaagattgttataaatttcataacgttgaacatttctgatgattcaaaaatatctcaccaggacatgagtctgctcggcaagagtagcgacgtttctagtctgaatgacccacagccatcaggcaatctgcgtcctccacaggaagaagaagaggtgaagcacctcggatatgccagccacctgatggaaattttctgcgactctgaagagaataccgaggggacttccctcactcagcaggagagcctgagccgcacaataccacccgacaaaacggttattgaatatgaatacgatgttcgcacaaccgacatctgcgctggtcctgaggaacaagagctcagcctccaggaggaggtgtctactcaaggcacactgctggaatctcaggccgcactggcagtgctgggcccacagacactccagtatagttacacccctcagctgcaggacctcgatcctctggcccaggagcatactgattcggaagagggcccagaggaagagcctagtaccactctcgtggactgggacccacagaccggcaggctgtgcatcccatccttgtcttcgtttgatcaggattctgaaggctgtgaaccttccgaaggagacggcctgggagaagaaggtctgctttctcgcctgtatgaagagcctgcgcctgatagaccacccggtgaaaacgaaacttacctcatgcagtttatggaggaatggggtctttacgtacagatggagaattag

SEQ ID NO: 227214 - DNA, 1617 bp, synthetic construct
  misc_feature 1..1617: note = Description of Artificial Sequence: Synthetic coding sequence
  source 1..1617: mol_type = other DNA
atgcctagggggtgggcagccccactgctgctcctcctgctgcagggtgggtggggctgtcctgacctggtgtgttacacagactacttacagaccgtaatttgtatcctcgaaatgtggaatctgcatcccagtacattgacgctcacctggcaggaccagtatgaggagctgaaagatgaggcaaccagttgctcattgcaccggagtgcacacaacgctacccacgctacctatacctgtcacatggatgtttttcacttcatggccgacgacatcttttctgtcaatattactgatcagagcggcaactacagccaggaatgtggctccttcttgctcgccgaatccatcaagccagctcctccctttaatgtgactgtgactttctcaggtcagtataatatcagctggaggagtgattacgaggaccccgcattctacatgctgaaggggaagctccagtacgaactgcagtaccgcaaccgcggtgacccatgggcagtgagccctcggagaaaacttatatctgtggattctaggagcgtttccctgctcccattggaattccgcaaagattccagctatgagctccaagtgcgtgccggaccaatgccagggagctcataccaggggacatggtcagaatggtcagatccagtaatttttcaaactcagagcgaggagttgaaggagggctggaacccacatctactactcctgcttttgcttgtgatagtgttcataccagccttttggtcgctgaagacccatccgctttggaggctttggaagaagatctgggcagttccaagtcctgaacgctttttcatgcccctttataaaggctgcagtggagacttcaaaaagtgggtaggagcaccgttcacaggctctagtctggagctggggccttggagtcctgaagttccgtcaaccctggaagtgtactcttgtcatcctccacgctcgcctgccaagcgcttgcagctgacagagctccaggagccagctgagctggtcgagtcagacggcgtgccgaagccgagcttttggcctacggcccagaacagtggcggaagtgcttactccgaggagagagatagaccctatgggctggtcagtatagacacggttacagtgctcgacgcagaaggcccatgtacttggccatgcagctgtgaggacgatggataccctgctctcgatttggatgcaggacttgagccaagcccaggccttgaggatccgctgctggacgccggaacaactgtgctttcgtgcggatgtgtcagcgctgggtctccagggctcggaggaccactgggaagtctcctggataggctgaagccacccctagctgatggcgaagattgggccggtggcttgccgtggggtggtcgctctcctggcggagtgtcggagagtgaggctggttccccactggctggactcgacatggacactttcgatagcggctttgttgggagcgactgctcgtcccctgtggagtgtgattttacatctcctggggacgagggtcctccccgatcgtacctccggcaatgggtggtcatcccaccccctttgtcttcaccaggacctcaggcttcctag

SEQ ID NO: 227215 - DNA, 1617 bp, synthetic construct
  misc_feature 1..1617: note = Description of Artificial Sequence: Synthetic coding sequence
  source 1..1617: mol_type = other DNA
atgccccgaggctgggcagcacctctgctcctgctcctcttgcaggggggttggggctgtcctgatctggtgtgctacacggattacttgcagacggttatatgcatcctggaaatgtggaatctgcatccctccacccttacactaacctggcaggatcagtacgaggagctcaaagatgaagctacctcatgctcactgcaccgctcggcacacaatgccactcatgccacttatacctgtcacatggacgtgttccatttcatggctgatgacatttttagtgtgaacatcacagatcaaagtggaaattactctcaggaatgtgggtcattcctgctggccgaatccatcaagccagccccacctttcaacgtgactgtgactttctctggtcagtacaacatttcttggaggagcgactacgaggaccccgctttctacatgcttaaaggaaaactccaatacgaactgcagtatcggaacagaggggacccctgggccgtctcccccaggagaaaactgatatctgtggactcaagatctgtgtccctgctgccgctggaattcagaaaggactcctcctacgagttgcaggttagagccggacccatgcctgggtcctcttatcaagggacgtggagcgaatggtctgatcctgtcatatttcagactcagtcagaggaactcaaagaagggtggaacccccacttgcttctgctcctgctactcgttatcgtgtttatccctgccttctggagtcttaagacacaccccctctggcgtctctggaagaagatctgggctgtgccctcccctgagcggtttttcatgcccctgtataagggctgtagtggcgacttcaagaaatgggtgggcgcaccctttactgggtcatcactggaactgggcccatggtcccccgaggttccctcgactttggaggtctacagctgccaccctcccaggagccccgctaaacggctgcagctcaccgagctccaggaacctgcagaactagtggagagtgacggcgtgcctaaacctagcttttggcccacggctcaaaacagtggaggaagcgcctacagcgaagagagggaccgcccttatggactggtgagcatcgataccgtgacagtgctcgacgccgaaggaccatgcacatggccatgttcttgcgaggatgacggttatcctgccttggacctggacgccggtcttgagccaagccctggcctggaagacccgctgctggatgccggaactaccgtactctcatgcggatgcgtgtccgccggaagtccaggactcggtggacccctgggttccctcctggatcgcctgaagccacctctcgccgacggagaagactgggcgggtggattgccctggggaggcaggtcacccggaggggtttcagaatcagaggccggtagccccctggctggcctcgatatggatacctttgatagtggtttcgtcggctcagactgcagcagccccgttgaatgtgactttacatctccgggagacgagggtccacctaggtcgtatctgagacagtgggtggtcatccctccacctctgtcgtctccgggaccccaggccagttag

SEQ ID NO: 227216 - DNA, 1617 bp, synthetic construct
  misc_feature 1..1617: note = Description of Artificial Sequence: Synthetic coding sequence
  source 1..1617: mol_type = other DNA
atgccaagaggttgggcggcaccacttctcctgcttctgttgcagggcggatggggctgtccagatctggtttgctataccgactatttacagaccgtgatttgcatcttggagatgtggaacctccacccaagcactctcaccctgacttggcaggaccagtacgaggagctgaaggatgaggccacatcttgttctcttcacaggtccgcacacaatgcgactcacgcaacctacacctgtcatatggacgtgttccatttcatggccgatgatatcttcagcgtgaatattaccgaccagtccggcaattattctcaggaatgtggcagtttcctcctcgctgagagcattaaacctgccccaccgtttaatgtcactgtgacgttttctgggcagtataatattagctggaggagcgattacgaggatcccgcattttacatgctcaaggggaagctgcagtacgaactacaatatcgcaacaggggggatccctgggccgtttccccaaggagaaaactcatctccgtggattcaagatctgtctctctgctccctcttgagttcagaaaagacagctcctacgaattgcaggttagagctgggcctatgccaggaagtagttatcaggggacctggagtgagtggtcggaccctgtcatattccagactcagtcagaagaactgaaggaaggatggaacccccatcttcttctcctgctgttgttagtgatcgtatttattcccgcattttggtcactgaaaacccaccctctatggaggctgtggaaaaaaatttgggccgtgccttcccccgagcgcttttttatgccattatataagggctgctccggggattttaagaagtgggtgggtgctccttttactggttcctcactcgaactcgggccatggagcccagaggtcccctcaaccctggaggtatactcctgccatcctcccagatctcctgctaaaagacttcagctcaccgagctgcaggagccagctgagttggtggaatcagacggggtgccaaaaccatcattttggccaactgcccagaactcaggtggctctgcgtactcagaggagcgggatcgaccgtacggtctggtaagtatcgacaccgtgacagtgctggacgcagagggcccatgcacctggccatgctcttgtgaagacgacgggtatcccgcactggacctcgacgccggactggaaccctctcctggcctcgaagacccattgctcgacgcgggaactactgtcctgtcctgtgggtgcgtatccgcgggttccccagggctcggaggtccactcggctccctgctcgatcgactcaagcccccactcgctgatggtgaggactgggccggtggattgccttgggggggtcggtcccctggcggtgtatcggagagcgaagctggatcacctctagcaggactggatatggacacattcgactcaggcttcgtcgggagcgattgctccagcccagtggagtgcgatttcacgagtcccggagatgaaggtccaccacgatcctacctgagacagtgggtggtaattccaccccctctgagcagccctggcccacaggcctcctag

SEQ ID NO: 227217 - DNA, 792 bp, synthetic construct
  misc_feature 1..792: note = Description of Artificial Sequence: Synthetic coding sequence
  source 1..792: mol_type = other DNA
atgatgcctaaacactgcttcctgggatttctgataagtttttttctgaccggcgtggcaggaacccagagtacacacgagtctctcaaaccacagcgcgttcagtttcagtctcggaacttccacaatatcctgcaatggcagccagggagagctctgaccggcaattcttccgtatatttcgttcagtacaaaattatgttctcctgctcgatgaagtccagtcatcagaagccgtccggatgctggcagcacatctcatgcaattttcccggttgcagaacccttgcaaagtacggtcagcgccaatggaagaataaggaagactgttggggcacacaagagctctcctgtgacctaacctcggaaactagtgacatccaagaaccatattatgggagggtgcgagccgcaagcgccggttcctactctgaatggtctatgacaccgaggtttaccccgtggtgggagactaagatcgatccacccgtgatgaacatcacccaggtcaacggcagcctgttggtaattctccacgccccaaatctgccttaccggtaccaaaaggagaagaacgttagtatcgaagactattatgagttactttacagagtgtttattatcaacaattccttagagaaggaacagaaggtgtatgagggtgctcaccgcgctgtggaaatcgaggccctgacaccacactcatcatattgcgtggtggccgagatctatcaaccgatgctggaccgaaggagtcagcgctctgaggagcgatgtgtcgagatcccctag

SEQ ID NO: 227218 - DNA, 393 bp, synthetic construct
  misc_feature 1..393: note = Description of Artificial Sequence: Synthetic coding sequence
  source 1..393: mol_type = other DNA
atgatgccaaaacactgctttctcggatttctgatcagctttttcctgactggggtggccggaactcagagtacccatgaatccctcaagccccagcgcgtacaattccagtcccggaactttcacaatatattacagtggcagcccggtcgcgcactcacaggaaactcctccgtctacttcgttcaatacaagatttacggacagagacagtggaagaacaaggaggattgctggggcacccaggagctgtcatgcgacctgacttctgagacatccgacatccaagagccttactatggaagagtgcgcgcagctagcgccggatcttattccgaatggagtatgacgccgaggttcaccccatggtgggaaagggctaaggggctctag

SEQ ID NO: 227219 - DNA, 696 bp, synthetic construct
  misc_feature 1..696: note = Description of Artificial Sequence: Synthetic coding sequence
  source 1..696: mol_type = other DNA
atgatgcctaagcattgcttcctcggtttcttaatcagtttttttttgacaggagtggccggaacccagtccacccacgagtctctaaaacctcaacgagtccagttccagagcaggaactttcacaacattctgcagtggcagcccggaagggcattgaccggaaacagttccgtatattttgtgcagtataagatctatggccagcgtcagtggaagaacaaagaagactgttgggggactcaagagctgtcttgtgacctgacttctgagacttccgacattcaggagccttattatggcagggttcgggcagcctctgcgggttcatacagcgagtggagcatgactccgcgtttcacaccctggtgggagacgaagattgaccccccagtcatgaacatcacacaggtcaacggctcactccttgtcattctccatgccccaaacctgccttaccggtaccagaaagagaaaaacgtttccatcgaggactactatgagctactttatagagttttcataatcaataattcgcttgagaaagagcagaaagtctacgaaggagcacatagggcggtagagatagaggcactgactccacacagcagctactgtgtggtggcagagatttaccagcctatgttggatcgtagaagtcagagaagtgaagagcgctgtgtggagattccatag

SEQ ID NO: 227220 - DNA, 1563 bp, synthetic construct
  misc_feature 1..1563: note = Description of Artificial Sequence: Synthetic coding sequence
  source 1..1563: mol_type = other DNA
atggctggacccgagcgctggggcccacttctgctgtgcctgcttcaggcagctcctggcaggccgcgactggccccaccccagaacgtaacgctgctttcccagaatttttccgtgtacctgacttggcttcccggtctgggaaacccccaagatgttacctattttgtggcttatcaatcatctcctacacgccgtcggtggcgggaggttgaggaatgtgctgggactaaggagcttctgtgttccatgatgtgtctgaaaaaacaggacctgtataacaaattcaaggggcgagtgaggaccgtttccccctcctccaagtcaccctgggtggagtctgaatatctcgactatctcttcgaagtcgagcctgcgccaccagtgttggtgcttacacaaaccgaggagatcctgagcgccaacgccacctatcaacttccaccttgcatgcctccattggatctcaaatatgaggtggcgttttggaaggagggcgcaggaaacaaaacactgttcccagtaaccccacacgggcaaccggtccagatcactttacaaccagcagcttcggaacatcattgcctgtccgccagaacgatttatacctttagcgttccgaagtactccaagttctctaagccaacctgcttcctcttggaagtacccgaagctaattgggcattccttgtcctgccctccttgttaatccttcttctggttatcgcggcagggggtgttatttggaagacccttatgggcaacccatggttccagcgtgccaagatgccgagagccctggatttttccgggcacacacacccggtcgctacatttcagccgagccggcctgagagcgtaaacgaccttttcctctgcccccaaaaggaattgacacggggagttcgccctactccaagagttagagcccctgctacccagcagacaaggtggaagaaggatctggcggaagatgaagaagaggaggacgaggaggacaccgaagatggcgtgtcctttcagccatatatcgaaccaccttcattcttgggccaagagcaccaagcccctggacactctgaagccggaggtgtggatagcggaaggccgcgagctccactggtccccagcgagggaagtagtgcctgggatagtagcgatcgatcatgggcctctacggttgacagctcatgggatcgtgccggaagttcggggtatttggctgaaaaagggcctggacagggcccaggaggcgatggccatcaggaatcgctgcctccccctgagttcagcaaagactccgggttcctggaagagcttccagaggataacctctcttcctgggcaacatggggtactctgccccctgagccaaacctcgtgcctgggggacccccagtgagtctgcagacactgactttctgctgggagagctctcctgaagaagaggaagaagcacgtgagagtgagatcgaggactccgatgccggatcttggggagccgagtccacacagcgcaccgaggatcgaggcaggaccctcggccattatatggctcgctag

SEQ ID NO: 227221 - DNA, 735 bp, synthetic construct
  misc_feature 1..735: note = Description of Artificial Sequence: Synthetic coding sequence
  source 1..735: mol_type = other DNA
atggcaggtcctgagagatggggacccctgctgctgtgtctgctgcaggccgctcctgggcgtcccaggctggcccctccccagaacgtgacgctactcagtcaaaattttagtgtgtatcttacgtggctgcccggattaggaaacccacaggatgttacttatttcgttgcctatcaatctagtccaacccgtagacgctggagagaggtcgaggaatgcgcgggaacaaaagaacttctgtgtagcatgatgtgtctgaaaaaacaggacctgtacaataaattcaagggccgtgtgcgcacagtaagcccatcttctaaaagcccttgggtggagagtgagtacctggactatctctttgaagtggaacccgcacccccagtgctggttcttactcagaccgaggaaatcctgagtgctaatgccacgtaccaactgcccccatgtatgcccccactggacctaaaatatgaagtcgcgttttggaaagaaggcgcaggaaacaaaactctgtttcctgtgacccctcacggccagcctgtacaaattactttgcagcccgcagcatctgaacaccactgcctaagcgctaggaccatatacacgttttcagtccccaaatattctaagttcagcaaaccgacttgttttctactcgaggtgcctgggttgttctggacacataccccctgtggcaacttatctgcccaacagaccagagtgagggagtag

SEQ ID NO: 227222 - DNA, 636 bp, synthetic construct
  misc_feature 1..636: note = Description of Artificial Sequence: Synthetic coding sequence
  source 1..636: mol_type = other DNA
atggccggacccgagagatggggcccattgctgctgtgtctcctccaggctgctcctggacggccaaggctagcacctccacagaacgtgactctactcagtcaaaatttctctgtctaccttacatggctgcccggacttggcaacccccaggatgtgacctacttcgtcgcctaccagtctagcccaacgaggaggcggtggagagaggttgaggagtgcgccggaacaaaagagctcctgtgctccatgatgtgtctcaagaagcaagatctatacaacaagttcaagggacgcgtgcggactgtgtccccgtctagtaagagtccctgggtggagagtgagtaccttgactatctgtttgaggttgaacctgcgccaccagtgcttgtacttacccagactgaggaaattttaagtgctaacgccacatatcagctgcccccatgtatgccacccctcgacttgaaatatgaagtcgccttctggaaggagggggcagggaacaaagtgggctcaagtttcccagcacctagactggggcctttactacacccttttctcctgcgcttttttagcccatcacagccagctccggctcccttactgcaggaggtgttcccagtgcattcctag

SEQ ID NO: 227223 - DNA, 558 bp, synthetic construct
  misc_feature 1..558: note = Description of Artificial Sequence: Synthetic coding sequence
  source 1..558: mol_type = other DNA
atgatgtgcttaaagaagcaggatctttacaacaagtttaagggccgagtccgtaccgtgtctccttcatctaagtctccttgggtggaatctgaatatcttgactacctgttcgaggttgagccagctcccccagtgctcgtgctgactcagaccgaagagatcctgtctgcaaatgctacctatcagctgcctccttgtatgcctccacttgatttaaaatatgaagtcgccttctggaaggagggagctgggaacaagaccttatttcctgtgactcctcacggccagccagtgcaaatcactttgcaacctgcagccagcgagcatcactgtctaagtgctaggactatctatacctttagcgttccgaagtatagcaaattttctaagccaacatgcttcctcttagaggtcccggaagccaactgggcttttcttgtcttgcccagcctccttattctgttgctggtgatcgccgcaggcggtgtgatttggaaaacattgatgggcaatccttggttccagagagcaaaaatgccgagggctctcgtgtag

SEQ ID NO: 227224 - DNA, 1476 bp, synthetic construct
  misc_feature 1..1476: note = Description of Artificial Sequence: Synthetic coding sequence
  source 1..1476: mol_type = other DNA
atggcaggccctgaaagatggggcccactcctcctgtgtcttttgcaggctgcgccaggacgcccaagacttgccccaccccagaacgtgacattgttgtctcagaacttcagcgtgtacttgacgtggctaccgggactgggtaacccacaggacgtcacgtacttcgtcgcctatcaatcctctccaacccgtagaagatggcgggaggtggaagagtgtgccggaaccaaagagctcttgtgctctatgatgtgtcttaaaaagcaggacctctacaacaagttcaaggggagggtccgcacagtgtccccgtctagcaagtcaccctgggtggagtccgaatatctagattatttattcgaggtagagccagcgccaccagtcctggtcctgactcagaccgaagagattctgtccgccaacgccacctatcagcttcctccctgtatgccacctttggatctcaagtatgaggttgcgttctggaaggaaggagccggtaacaaaactctcttcccagtgacgccacatggacagccagtgcagattacactgcaacccgcagcctcagaacaccactgtctgtctgccagaactatttacacttttagtgtacctaagtacagtaaattcagtaagcctacttgcttcctactggaggttcctgaggccaattgggccttcctggtccttccgtcactgctgatactgctgctcgtgattgctgctgggggagtaatctggaaaaccctcatggggaacccctggttccaaagagccaagatgcctcgggctcttgagctcacacgtggagtgcgcccaacccccagggtcagggccccagccacccaacaaacccgctggaagaaagacctggcagaggacgaggaggaagaagacgaagaggataccgaggatggagtgtccttccagccctatattgagcccccttcatttctgggccaagaacatcaggccccagggcactcagaagctgggggagtggatagtggccgaccacgggctccactcgtcccatctgaaggatctagcgcttgggattcgtccgaccgctcctgggcctctacggttgattcaagctgggacagggccggttcctccggttatctagccgaaaaaggtccaggtcaagggccaggcggagacgggcaccaggagtcactgccaccccctgaatttagcaaggactcggggtttcttgaagaactgcccgaggacaacttaagttcttgggcgacgtggggtaccctcccgccagagccaaatctcgtacccggaggtccgccagtgagcttacaaacattaacgttctgctgggagagtagcccagaggaggaggaggaggccagagagagtgagatcgaggactcagacgcagggtcttggggggcagagagcacccaaagaacagaggataggggaagaacattgggccattacatggccagatag

SEQ ID NO: 227225 - DNA, 459 bp, synthetic construct
  misc_feature 1..459: note = Description of Artificial Sequence: Synthetic coding sequence
  source 1..459: mol_type = other DNA
atgtccaggctgcccgtcctcctgctgctccagctgttagtaagacccggattacaagcccctatgacgcaaactaccccactgaaaacttcatgggtcaactgctctaacatgattgacgagatcattacgcatttgaagcaaccccctcttccactcctggacttcaataacctgaacggagaagatcaggacattttgatggagaataaccttcgcagaccaaatttggaggcattcaaccgcgctgtgaaatccctccaaaacgcctctgccattgagtctattctgaagaatctgttgccttgtttacccctggctactgcagcccctacacggcaccccattcacattaaggacggtgattggaacgagtttaggagaaaattaacattctaccttaagaccctagagaatgctcaagcccaacaaactacgctttcattggctatcttctag

SEQ ID NO: 227226 - DNA, 1137 bp, synthetic construct
  misc_feature 1..1137: note = Description of Artificial Sequence: Synthetic coding sequence
  source 1..1137: mol_type = other DNA
atggtgttgctctggttgacgcttctattgatcgcgcttccatgtttgcttcagaccaaggaggacccgaatccacctatcactaatctcaggatgaaagccaaagcacaacagcttacatgggacctaaatcggaatgtgaccgatatcgagtgtgtaaaagatgcggactactcaatgcctgctgtgaacaattcatactgtcagttcggcgctatctccctgtgcgaggtgaccaattatactgtgagggtggctaaccccccatttagcacgtggatcttgttccctgaaaactctgggaaaccatgggccggtgcggagaacttaacctgctggatccacgatgtggacttcctgagttgctcatgggcagtgggacctggcgctcctgcagatgttcagtatgacttgtacttgaacgtggctaatagaaggcagcagtacgaatgtctgcattacaagaccgatgcccagggaacccggatcgggtgccgattcgacgatatttcaagactatcttccggctcacaatcttcacacatcctggtcagaggacggtctgcagccttcgggatcccgtgcaccgacaagtttgttgtgttttcacagatcgaaatccttacccctcctaacatgaccgccaagtgcaataagacgcactcgttcatgcattggaagatgaggtcccatttcaataggaagttccgctatgagctccagatccagaaacggatgcagcctgttattactgaacaggtgagggaccgcaccagctttcaattgctgaatcccggaacatacactgtacagattcgcgcacgagaaagggtttacgagttcctgagtgcttggagtaccccccagagatttgaatgcgaccaggaggagggggctaacacacgggcatggcggacgtctctgttgatagcccttggcaccctgctcgccctggtgtgcgtgttcgttatctgccggcgatatctggtcatgcagaggcttttcccgagaatccctcacatgaaggaccctatcggcgattcatttcagaacgataagctggtcgtttgggaagccggaaaggctggtctggaggaatgtttagttaccgaagtacaggtcgttcagaagacttag

SEQ ID NO: 227227 - DNA, 903 bp, synthetic construct
  misc_feature 1..903: note = Description of Artificial Sequence: Synthetic coding sequence
  source 1..903: mol_type = other DNA
atggtgctgctgtggctcactctccttctcattgccctgccctgtctcctccagacgaaggagggcggtaagccatgggctggggctgagaaccttacctgctggatccacgacgtggatttcctcagctgttcctgggctgttggcccaggggcacccgctgatgtccaatacgatctctacctgaatgtggctaaccgccgacagcaatacgaatgtctccattacaaaaccgacgcccaggggaccaggattggttgtaggtttgatgatatctcccgcctgagctccgggagccagtctagtcacattctggtgcgcggtagatcggcagcatttggaattccttgcaccgacaagtttgtggtgttttctcagatcgaaatcctcacacccccaaatatgactgccaagtgtaataagacgcatagctttatgcattggaaaatgagatcgcactttaacaggaagttccggtacgagctgcagatccagaagcggatgcagcctgttataacggaacaggtgagggataggacctcattccagctcctgaaccccggaacctacacagttcagattcgcgctagggaaagagtttacgagttcctgtcagcatggtccacccctcagcggttcgagtgcgaccaggaggaaggggctaacacgcgtgcatggcggacatcattacttatagctctaggcacactactggccctggtctgtgtatttgtgatctgccgcagataccttgtgatgcaacgcttgttcccaagaatcccccatatgaaagaccccatcggggattcattccagaacgataaactggtcgtgtgggaagcgggaaaagccggattggaggagtgcttggtcaccgaggtgcaggtggtgcagaagacctag

SEQ ID NO: 227228 - DNA, 495 bp, synthetic construct
  misc_feature 1..495: note = Description of Artificial Sequence: Synthetic coding sequence
  source 1..495: mol_type = other DNA
atggtgttgctgtggctgactctcttgctcattgcactgccatgtctgctgcagacaaaagaaggtggcaagccctgggccggagctgagaacctcacctgctggatccacgacgtagacttcctgagctgctcatgggccgtaggcccaggagcccctgcagacgtacagtatgatctttacctaaacgtggccaatcggcgtcaacagtacgagtgtctgcattataagacagatgctcaagggacaaggattggatgccgcttcgacgatatatcccgactctctagtggtagccaatccagtcacattctcgttaggggcaggtctgccgcatttggtattccttgtaccgataaatttgtggtgttttctcagatagaaatcctcacccctcccaacatgacagcaaagtgcaacaagacccacagctttatgcactggaagatgagaagccactttaatcgtaagtttaggtacgaactgcaaatctag

SEQ ID NO: 227229 - DNA, 1323 bp, synthetic construct
  misc_feature 1..1323: note = Description of Artificial Sequence: Synthetic coding sequence
  source 1..1323: mol_type = other DNA
atgacttattggcgtctagaaaacatcgctaagaccgaaccacccaagatttttagggtgaagcctgtgctcggaattaagcggatgatccaaatcgaatggattaagcccgaactcgcacccgtgtccagtgacctcaagtacaccctacgctttcgaaccgtaaactcgaccagctggatggaggtcaacttcgcaaagaacagaaaggacaaaaaccagacatataatctcactggactgcagcctttcaccgaatatgtgattgcattgagatgtgcagtgaaagagagtaaattctggagtgattggtcccaagagaagatgggcatgactgaggaagaggcaccttgtggcctggagctttggcgggtactcaaaccagccgaggctgatgggcgaagaccagtacggctgctttggaaaaaggcaaggggtgctcctgtgctggaaaagacactgggatacaacatatggtactaccctgagtcaaacacgaatctgactgaaacgatgaacaccaccaaccagcaactggaactgcacttaggtggcgaatcgttttgggtgagcatgatcagctacaattcattaggcaagagtcctgtcgccactttgaggattcccgcaatccaagaaaagtccttccagtgtatcgaagtaatgcaggcatgcgtcgccgaggatcagctggtagtgaagtggcagtcctctgccttggacgttaatacatggatgattgaatggttcccagacgtcgactccgagcctaccaccctgagctgggagtccgtctcccaggctaccaattggaccattcagcaggataagcttaaaccattctggtgttataacatctcagtgtaccctatgttacatgacaaggtcggtgaaccttacagtatacaggcttatgcaaaagagggggtccccagtgagggccctgaaaccaaagtcgagaacatcggagtgaagactgtcacgattacgtggaaagaaattccaaaaagcgaacgaaagggaattatctgcaattacactatcttctatcaggccgaagggggtaagggcttttgcaagcacgcccatagcgaggtggagaagaatccgaagcctcagatcgacgccatggacaggcccgtggtcggaatggcacccccttcacattgtgatctgcagccaggaatgaaccacctggcaagcctgaatctgtcagagaacggtgctaagtccacacacctgcttggattctggggcctcaatgagagcgaagtgaccgtccccgagcgccgagtcctgagaaagtggaaggaactgctgtag

SEQ ID NO: 227230 - DNA, 1989 bp, synthetic construct
  misc_feature 1..1989: note = Description of Artificial Sequence: Synthetic coding sequence
  source 1..1989: mol_type = other DNA
atgaagctgagtccccagcctagctgcgtgaacctggggatgatgtggacctgggccctgtggatgttgccgtccttgtgtaagtttagcttggccgctctgcctgccaagcccgaaaatatcagctgtgtctactattatcggaagaacctgacgtgtacatggtcccccggtaaagaaacctcttatactcagtacacagtgaagcgtacctacgcttttggtgaaaagcacgataattgcacgactaactcaagcacttcggagaaccgagcttcatgttcctttttcttgcctaggattaccatcccagataactacacaattgaagttgaggctgagaatggggatggtgtaatcaaatcacacatgacatattggcgactagagaacattgcaaagaccgaaccccctaagatcttccgggtaaagccagtgctgggtataaagcggatgatccagatagaatggatcaagcctgagttggctccagtgtctagtgatctcaaatacaccctccggtttcggacggtgaattctacctcttggatggaggtaaacttcgcaaaaaatcggaaagacaaaaaccaaacctacaacttgaccggattgcagcccttcactgaatacgtgattgccctccgatgcgcggtgaaagagtctaaattttggtcagactggtcccaggagaaaatgggcatgactgaagaggaagcaccttgcggactagagttgtggagagtgctgaagccagcggaagcagacggcaggaggcccgtgaggctgctttggaagaaagctcgcggtgctccggtgctcgagaaaacccttggctacaatatctggtactaccctgagagcaacacaaatctaaccgagacaatgaatacgacaaatcagcaacttgagctgcatcttggcggagagagcttctgggtaagcatgatatcatataactctttgggtaaaagccctgtcgcgaccctcaggataccagctatccaggaaaaatccttccagtgcatcgaagtcatgcaggcctgtgtcgcagaagatcaactggtggtgaagtggcaaagttcagcccttgatgtaaatacttggatgattgagtggtttcccgacgtggatagtgaacccactacactttcatgggagtcagtcagtcaggcaaccaattggaccatccagcaagacaaactgaagcctttctggtgttataatatttctgtctatccgatgttgcacgacaaggtgggtgagccatacagtatccaggcctacgcgaaggagggggtcccttccgaaggcccagagaccaaggtggaaaatatcggggtgaagacggtaacgatcacgtggaaggagatccccaagagcgagcggaaaggcatcatatgcaattacactatcttctaccaagcagagggtggtaaaggcttctctaagactgtgaactcgtcgattctgcagtatggtctcgaatccctgaagagaaagactagctacatcgtgcaggtgatggcttcgacctcagccggtgggacaaatgggacctctattaactttaaaaccctcagcttcagcgtctttgagattatcttgatcacctcactcatcgggggaggcctattgattctaataattcttactgtggcctatggcctgaagaagcctaacaaactgacacatttgtgttggcccactgttcccaaccccgcagaatcctctatagcaacgtggcacggagacgactttaaggataaactaaaccttaaggaaagcgatgattctgtaaacaccgaggacaggattctgaaaccctgtagcacacctagcgataagctggtgatagataagttggtcgtcaatttcggtaatgtgctccaagaaattttcacagatgaggccaggaccgggcaggaaaacaatctggggggagaaaaaaatggcacacgcattttgtcgtcttgcccaacttcgatatag

SEQ ID NO: 227231 - DNA, 2046 bp, synthetic construct
  misc_feature 1..2046: note = Description of Artificial Sequence: Synthetic coding sequence
  source 1..2046: mol_type = other DNA
atgtgcataagacaactcaaattcttcacaacagcatgcgtctgtgagtgcccgcagaacatcctctctcctcaaccaagctgcgtcaaccttggtatgatgtggacatgggcgttgtggatgcttcccagcctgtgtaaattctctttggccgcactccccgcaaaaccagagaacatcagctgcgtctattactatcggaagaacctgacgtgtacgtggtcccctgggaaggaaacttcttatacccagtataccgtcaaaagaacttatgctttcggagaaaagcacgacaactgtactactaatagctcaacgtctgaaaatcgagccagttgctcttttttcctcccacgaattactatccccgacaactataccattgaggtggaggcagagaacggggatggggtgatcaagagtcatatgacatattggaggctggagaacatcgcaaagacagaacccccaaaaatttttagggtcaagccagtgctggggatcaagaggatgatccagattgaatggatcaagccagaactggctcctgtgtcgtccgatctgaagtatactctgagattccgcacagttaactctaccagttggatggaggttaacttcgccaagaatcgtaaagataagaaccagacctataacctgaccgggctgcagccattcaccgagtacgtgatagcactgcgctgtgcagttaaagaatccaaattctggagcgattggtcacaggagaagatgggaatgaccgaagaggaggctccctgcggactggagctctggcgggtccttaaacctgctgaagcagatggcaggagaccagtgcggctcctctggaagaaagccagaggagcgccagttttagagaagaccctgggctataacatctggtactatccagagtctaatacaaatctcactgaaacgatgaatacaaccaatcaacagctcgagcttcacctggggggagagtccttctgggtgtcaatgatcagttacaacagcttgggcaaatctcccgtggccacgttacggattcccgctatccaggagaagagctttcaatgcatcgaagtgatgcaagcgtgcgtcgccgaggaccaactagtcgtaaaatggcagagtagcgcccttgatgtgaacacatggatgatcgagtggttccccgacgtcgattctgaaccgaccacgttaagctgggagagcgtgtcacaggctactaattggactatccagcaggacaagctaaaaccgttctggtgttacaacattagcgtgtaccccatgctgcacgataaggtaggcgagccctacagtattcaagcatacgcgaaggagggtgtgccgtctgagggacctgaaactaaggtggagaacatcggcgtaaagacagtaactatcacttggaaggagattcccaagagtgagagaaagggcataatttgcaactatacaatattctaccaagcggaagggggaaaggggttctcaaagacagtgaattctagcattctccagtatggcctggagtccctaaagcggaaaacatcttatattgtacaggtgatggcttccacttccgccggtggcactaatgggactagcataaacttcaaaaccctaagcttctccgttttcgagatcatccttataacgtctctgattggcggtggtttactcatcctcattatcctgacggtggcgtatgggctgaaaaagcccaacaagctgactcatctctgctggcccaccgtgcctaaccccgcagagtcttctattgcgacatggcatggggatgacttcaaggacaaattaaacctgaaagaatccgacgactctgtgaacacggaagatcggattctcaaaccttgttctactccaagcgacaaactggtgatcgacaagttggtcgttaatttcgggaacgtgctgcaggagatcttcacggatgaggccaggacagggcaggaaaacaatctgggaggtgagaagaacggcacacgcatcctgagttcttgtcctacctccatctag

SEQ ID NO: 227232 - DNA, 1989 bp, synthetic construct
  misc_feature 1..1989: note = Description of Artificial Sequence: Synthetic coding sequence
  source 1..1989: mol_type = other DNA
atgaagctgagccctcagcccagttgcgttaatttaggcatgatgtggacctgggctctgtggatgctgcctagcctgtgtaagtttagcctggccgctttaccagcaaaacccgaaaatatctcctgtgtgtattactacaggaagaacctgacatgtacttggagtcctggaaaggagacatcttacacgcagtacacagtgaaacgaacatatgcttttggggaaaaacatgataactgtacgaccaatagttctacatctgagaacagagcgagttgtagtttcttcctgcctaggatcactattccagacaattacactattgaggtggaagcggagaatggagatggtgtgataaaatcccatatgacttattggcgcctggaaaacatagccaaaacggagccgcctaaaattttccgtgtcaaaccggtactgggtatcaaacgcatgatacaaatagaatggatcaagcctgagctcgccccagttagttcggatctcaaatatacattacggttccgtaccgtgaatagtactagctggatggaggtgaattttgctaaaaaccggaaggataaaaaccagacctataatcttaccgggctccagcccttcacggagtacgtgattgcgctaagatgcgccgtgaaggagtctaaattctggagtgattggtctcaggagaagatgggaatgacagaggaggaggccccatgtggattagagctgtggagggtgctcaagcctgcggaggcagatggtcgtaggccagtccggttgctctggaaaaaagccaggggtgcgcctgtccttgaaaagacactcggatataacatttggtactatcccgagagtaacacaaacctgaccgaaacaatgaacaccacaaaccagcagctggaactgcacctagggggagaaagtttctgggtttccatgatctcctataactcactgggaaagagtcctgtggcaaccctgagaatccccgctatccaggagaagagcttccagtgcattgaagtgatgcaggcgtgtgtggcagaggatcagctggttgtcaaatggcagtcttccgctctggatgtgaacacatggatgattgaatggttcccggacgtggatagcgagcccaccaccctctcttgggaaagcgtgtcacaggcaaccaattggaccattcagcaggataaactcaaacctttttggtgctataatatcagcgtttatccaatgttacacgacaaggtgggagaaccctattctattcaggcctatgccaaagagggggttccaagtgaggggcctgaaacaaaagtagagaatataggagttaaaaccgtgactataacctggaaagagatcccaaaatcagagcggaagggaattatctgcaattatacaattttttaccaggctgaaggtgggaagggattttccaaaacagtcaacagctcgatccttcaatacggtcttgagtctctgaagaggaaaacttcctacattgtccaggtaatggcatcaacatcagcagggggtactaacggtacatctatcaattttaagactctgtcctttagtgtttttgaaattatcctcattacttccctgattgggggtggattgctgattctgatcatcctgaccgtggcgtatggacttaagaagcccaacaagctaacccatctctgttggcctaccgtgcccaacccggctgaatcttctatcgcaacttggcatggcgacgattttaaagataagctcaacttaaaagagtcggatgacagcgtgaacacagaggatcgcatcctcaagccatgctctacgcccagcgacaagttagtcatagacaaattggtcgtcaacttcggcaacgttctacaggagatcttcaccgatgaggccagaacaggccaggaaaacaatctcggcggtgaaaaaaacggaacacgaatcctgagctcctgtccgaccagcatttag

SEQ ID NO: 227233 - DNA, 1749 bp, synthetic construct
  misc_feature 1..1749: note = Description of Artificial Sequence: Synthetic coding sequence
  source 1..1749: mol_type = other DNA
atgtgtatacgacagctgaagttctttacaactgcatgcgtgtgcgaatgtccacagaatattctaagcccacagccatcatgcgtgaacttggggatgatgtggacttgggcactttggatgctgccctccttgtgcaaatttagcttagctgctttgcccgcaaagccagaaaacatctcttgcgtgtattactataggaaaaacctgacatgcacctggagtccagggaaggagacgagttatactcagtataccgttaagaggacttatgcttttggcgaaaagcatgacaactgtactaccaactctagtacctctgagaacagggcatcttgctcgttcttcctccctcgcatcaccatcccggataactacacgattgaggttgaggctgagaacggagacggtgtcataaagtctcacatgacatactggcgcttagaaaatatcgcaaagactgaacccccaaagatttttcgtgtcaagcccgtgctcgggatcaagcggatgatacagatcgaatggattaagcctgaactggcccctgtgtctagtgacctgaagtacaccttgaggttcagaacggtcaattccaccagttggatggaagtcaacttcgccaaaaacagaaaagataagaatcaaacttacaatctcaccggtctgcagccattcaccgagtatgtgattgcgttacgctgtgcagttaaggaaagcaaattctggagtgactggagtcaggaaaaaatgggaatgacagaggaagaagcaccttgtggcctggagctgtggcgggtcctaaaaccggctgaagctgacggtcggagacccgtacgcctgctgtggaagaaagccaggggagcgccagttctagagaagaccttaggttataacatctggtattatccggagtctaacaccaacttgactgagacgatgaatacaacaaaccagcagttggagctccacctgggtggcgaatcattctgggtgtcaatgatttcttacaactcccttggcaaatcccctgtcgctacactgcgcattccagcaattcaggagaaatcattccaatgtatagaggtgatgcaggcctgcgtcgctgaagatcagctggtggtgaagtggcagtccagtgccctggacgttaatacttggatgatcgaatggttccccgatgtagattctgaacctaccactctgagctgggagtcggtgagtcaagctaccaattggactatccagcaggacaagctgaagcctttctggtgctacaatatttccgtatacccaatgctgcatgacaaagttggcgagccttattccatccaagcctacgccaaggagggagtgccctcagagggacctgaaaccaaagtagagaacatcggagtcaaaaccgttactatcacatggaaggagatacccaaaagcgagcggaagggcattatctgcaattacactattttctaccaggcagaaggtggcaaaggattctgtaaacacgctcattcagaggtggagaagaatcctaagccgcagatagatgccatggacagacctgtcgtgggtatggctccaccttcacactgcgacctgcagccaggtatgaatcacctggctagtctgaacctgtccgagaatggggctaagagcactcacttgctcggtttctgggggttgaacgagagcgaggttaccgtgccggagcgcagggtgctccgcaagtggaaagagctgctgtag

SEQ ID NO: 227234 - DNA, 2295 bp, synthetic construct
  misc_feature 1..2295: note = Description of Artificial Sequence: Synthetic coding sequence
  source 1..2295: mol_type = other DNA
atgtgcattcgccagctaaaattctttaccacagcctgcgtgtgcgaatgtcctcagaatattctgtcgcctcagcctagttgtgtaaatcttggaatgatgtggacttgggctctttggatgttgccctcactttgcaaattctccctggccgctcttccagcaaaacctgagaacatatcttgtgtgtactactatcgcaagaaccttacctgcacttggtccccaggaaaagagacatcatacacccagtacaccgtgaagagaacctacgcctttggcgaaaaacatgataattgcaccaccaactcctccaccagcgagaacagggcatcctgttcattttttcttccaagaatcactattcctgacaactacacaattgaggtcgaggccgagaacggagacggcgtcattaaaagtcacatgacatattggagactcgaaaatatcgctaaaacggagcccccaaaaatcttccgtgtaaaacctgtcctgggaattaagaggatgatccagatcgaatggatcaagccagagctggcccctgtgagctcagatttgaaatataccctgaggttccgcacggtgaattcaactagctggatggaagtcaacttcgctaaaaaccggaaggacaaaaaccagacatacaacttgaccggcctgcaaccattcacggagtacgtgatcgccttgaggtgtgccgtaaaagaatccaaattctggagtgactggtctcaagaaaagatgggcatgaccgaggaagaagccccatgtggccttgaattgtggagggttctaaaacccgctgaggccgatggcagacgcccagtgcggttgctgtggaaaaaggccaggggtgcccctgttttggagaagactctcgggtacaacatctggtattatcctgagtccaacaccaatctgaccgaaactatgaataccactaaccaacagctggagctgcatttaggcggagagtccttttgggtgtccatgatctcttataatagccttggcaagagcccagtcgctacactcaggatccccgcaattcaggaaaaaagttttcagtgcattgaagtgatgcaggcctgcgtggccgaagaccagttagtggtgaaatggcagtcgtctgcgctcgatgtcaatacgtggatgatcgagtggtttcctgacgtggactccgagccaacgaccctctcgtgggagtctgtgtctcaggctactaattggacaatccagcaggataagctgaaacctttctggtgctataatatttctgtctaccccatgcttcacgataaggttggggaaccttactccatacaggcctacgccaaagagggcgtgcccagcgaaggacccgaaacaaaggtcgaaaatattggtgtaaagacggttaccatcacttggaaggaaatccctaagagcgaacgcaagggaatcatttgtaattataccatattttaccaggcggaaggcggaaagggattctctaagacagtgaactcctcaatcctgcagtacggactggaatctcttaaacgtaagacttcatacattgtccaggtgatggcttccactagcgcgggtggaacaaatggaactagtatcaatttcaagaccctgtctttttctgtcttcgagattattctgatcactagcctcatcgggggaggattactgatcctgatcatcttgaccgtggcatacggccttaaaaaacccaataaacttacccacctatgttggcccactgtgcctaatccagcagagagcagtatcgctacatggcacggcgatgacttcaaagacaagctaaacttgaaggaatccgacgacagtgtgaacacggaggatagaatcctgaaaccctgctctacccccagtgataagctcgtgatcgataaactcgtggtgaattttggcaatgtcttgcaagagatcttcactgacgaagccaggaccggccaggagaataatctaggtggagagaaaaacgggtacgtgacctgccctttccgacccgattgccccctgggaaagtcctttgaggaactgcccgtgtctcccgaaatcccccctagaaaatcacagtacctgcggagcaggatgcctgagggcacccgcccagaggcgaaagagcaactgctcttttctggacaatcgttagtgcccgaccatctgtgtgaggagggcgctcctaatccctatctgaagaactctgtgacagctcgagagtttctcgtgagcgaaaagctgcctgagcacactaaaggcgaggtgtag

SEQ ID NO: 227235 - DNA, 1869 bp, synthetic construct
  misc_feature 1..1869: note = Description of Artificial Sequence: Synthetic coding sequence
  source 1..1869: mol_type = other DNA
atgacatactggcgtctggagaacatcgcaaagaccgagccgcctaagatcttccgtgtgaaacctgtcctcggcatcaagcgcatgatccagatcgaatggatcaaacccgagctggcgcctgtttcttccgatctcaagtacacgctgcgcttcaggacagtgaattcgacgagttggatggaggttaactttgctaagaatcgtaaagataaaaaccaaacttacaatttgacagggttacagccttttactgagtacgttatcgctttacggtgcgccgtgaaggaatcgaagttttggtccgattggtcacaggagaagatgggtatgacggaggaagaagccccatgtggacttgagttgtggcgggtgctaaagccagcagaagccgatggtcggcgacctgttagattgctctggaagaaggcacgcggagccccagtgcttgagaagactctcgggtacaacatttggtactatcctgagagcaacaccaatcttactgagacaatgaacaccacaaatcagcagctcgagctccacttaggtggcgaaagtttctgggtgtcaatgattagttataattcacttggcaagagcccagtggcaactcttcgaattcctgccatccaggaaaagtcgttccagtgtatagaggtcatgcaggcctgcgtggctgaggaccagctggtggtaaagtggcagtcgtcagcactggatgtgaacacttggatgatcgagtggtttccagatgttgatagtgagcctactacgttgtcctgggagtccgtgagtcaggccactaattggacaatccaacaagataagttgaagccgttctggtgttataacatctcagtatatccaatgctgcacgataaggtgggggagccatactctatccaagcttacgctaaggagggtgtgcccagcgaaggacccgaaacaaaggtcgagaatataggtgtcaaaaccgtcacaattacctggaaagaaatccccaagtctgagagaaagggcataatctgtaattacacaatcttttaccaggctgaaggcggtaaaggattctccaaaacagtcaactcatctattttacagtacggactggagtccctaaagcggaagacttcttatatagtccaggttatggctagcacctctgctggcggaaccaacggtacctctataaattttaaaaccctcagcttctcagtatttgagatcattttaataactagcctgattggcggaggcctactgattctgatcattctcacggtcgcttatgggctaaaaaagccaaacaagctcactcatctgtgctggccaacggtccctaatcccgctgaaagctctattgctacttggcacggagatgatttcaaagacaagctgaatttgaaggaatcagacgattccgtaaacactgaggacagaatcctcaagccttgtagcaccccctcggacaagctggtaattgataagctcgtggtgaattttgggaatgtcctacaggaaatctttactgatgaagcgcgaacgggacaggaaaataatttgggtggggaaaaaaatggatatgtcacatgcccattccgtcccgattgccccctgggcaagagtttcgaggaactgccagttagtcccgaaatcccccctcggaaaagccaatatctccgctcgagaatgccggagggaacaaggcctgaagccaaggagcagctcctgttctccggacagagcctcgtaccagatcatttatgcgaggaaggcgcaccgaatccctacctaaaaaactccgtcacagccagagagttcttagtcagcgagaagctgcctgagcacacaaaaggggaggtgtag

SEQ ID NO: 227236 - DNA, 468 bp, synthetic construct
  misc_feature 1..468: note = Description of Artificial Sequence: Synthetic coding sequence
  source 1..468: mol_type = other DNA
atggtgctctctggcgctctttgctttaggatgaaagattcagctctgaaagtgctctacctacacaacaatcagctacttgccggaggcctgcatgcgggtaaagtcattaagggcgaggagatcagcgtggttccaaaccgatggctggacgctagcctgagcccagtgatcctcggggttcaaggcggaagtcagtgtctgtcatgcggagttggccaggagccaaccctgaccttggagcccgtcaacataatggagctgtacctgggtgccaaggagagtaaatcctttactttctatcgccgtgacatgggcctgactagttctttcgagtccgccgcatatcccggatggttcctctgtactgtgccagaggcggaccagcccgtcaggcttacccagctgccggaaaatgggggatggaatgccccaatcaccgacttctactttcagcagtgcgattag

SEQ ID NO: 227237 - DNA, 468 bp, synthetic construct
  misc_feature 1..468: note = Description of Artificial Sequence: Synthetic coding sequence
  source 1..468: mol_type = other DNA
atggtcctgtctggggcattgtgttttcggatgaaggattccgcactgaaggtcctttatctccataataaccagctgctcgccggagggcttcacgccggtaaggtgatcaagggagaggagataagcgtggtgccaaatcggtggctggacgcatcactgtcccctgtcattctcggagtgcaggggggttctcagtgcttatcatgcggcgtcggacaggaaccgaccctcacactggagccagtgaacatcatggagctctacctgggcgcaaaggaatctaagagtttcaccttttaccgcagagatatgggtctgaccagcagttttgagtccgctgcgtatccaggctggttcttgtgtacagtgccagaagctgaccagcccgtaaggttgactcagctgcccgaaaatggcggatggaacgcaccaattacagatttttattttcagcaatgtgactag

SEQ ID NO: 227238 - DNA, 354 bp, synthetic construct
  misc_feature 1..354: note = Description of Artificial Sequence: Synthetic coding sequence
  source 1..354: mol_type = other DNA
atggtgttaagtggtgccctctgttttcgtatgaaagactccgccctaaaagtgctgtatttgcataacaaccagctgttggccggaggcttacacgctgggaaggtaattaagggcgaggagatttccgttgtgcccaaccggtggctcgacgcgtcattgagcccagtgattctcggggtgcaaggcggttcacaatgtctgagctgtggtgtgggacaggaacctaccctgactttggaacctgttaacataatggaactttacctcggtgcaaaagagtcaaagagctttacattttatcgccgagacatggggttgacctcctcatttgagtctgccgcatatccctag

SEQ ID NO: 227239 - DNA, 2478 bp, synthetic construct
  misc_feature 1..2478: note = Description of Artificial Sequence: Synthetic coding sequence
  source 1..2478: mol_type = other DNA
atgggatggctgtgctctggactgctcttccctgtgtcctgcctcgtactcctccaggttgcatccagcggcaatatgaaggtcctacaggagcccacgtgtgtctccgactacatgtcaatcagcacgtgcgagtggaaaatgaacggacccacaaactgctccacagaacttcggttactgtatcagctggtatttttgctctcagaagcccacacctgcatccccgaaaataacggaggagcaggatgcgtgtgtcacctccttatggatgacgtggtatctgctgacaattacactctggacctgtgggccggacagcagctgctctggaagggatctttcaagccttcagaacacgtcaagcccagagccccaggcaatctcacggtgcatacaaatgtttccgacactctgcttctgacttggagcaacccttatcctcccgataattacttgtacaatcacttgacatacgctgtaaacatttggtctgaaaacgaccccgcagacttccgaatttataatgttacttacctggagccgtcactgaggatcgccgcttccactctgaagagcgggatttcctatcgcgctcgggtaagggcctgggcacaatgttataatactacttggagtgagtggagtccttccacgaaatggcataattcctaccgagaaccctttgagcagcatctgttgttaggagtgtcagtaagctgtatcgttattttggccgtgtgtctcttgtgctatgtttctatcaccaagattaaaaaagagtggtgggaccagatacccaatcctgccaggtcccgcctggtcgccattattatacaggacgcacaggggtcccagtgggaaaagaggagccgtggacaggaacctgccaaatgcccacattggaagaactgcctcaccaagttgctgccttgttttcttgagcacaacatgaagcgcgatgaagacccacataaagctgccaaagaaatgccattccagggctccggtaagagcgcctggtgcccagtggagattagcaaaaccgtcctctggcccgagagcatttccgtcgtacgatgtgtggaattgttcgaggcacccgtggaatgtgaggaggaagaggaggtggaagaggaaaaggggagtttctgcgcatctccggaatcaagcagggatgatttccaggagggtcgggaagggatcgtggctcgcctaaccgagtcattgtttctagatctcctgggtgaggagaacggcggtttctgccagcaggacatgggggaatcctgtttactccctccctccgggtctacatcagcccacatgccttgggatgagtttccaagcgcgggacctaaagaggcgcctccatggggcaaagaacagcccctccacctcgaaccctctccgcctgctagccctacacaatccccagacaatctgacgtgcacggagacacccctggtgatcgcgggaaaccccgcttatagaagcttcagtaactctctctcacaaagcccctgtcccagggagctgggcccagaccccctccttgctcggcatctggaagaggtcgagcccgagatgccctgtgttccacaactgtcggagcctaccaccgtccctcaaccagagccggaaacatgggagcagatcctgaggcgcaatgtcctccagcacggggcagccgcagcccctgtgagcgctcctacatcggggtaccaggaattcgtgcatgccgttgaacagggaggaacgcaggcatctgcagtggtaggtcttggccctcccggagaagctgggtataaggccttctcatccctcctggctagcagcgccgtcagccctgaaaagtgtggattcggagcgagttcaggtgaagaaggctacaaacccttccaggacctgattccagggtgtcccggtgaccctgcgccagtaccagtgccattatttacattcggtctcgacagagaaccaccacgtagcccacaatcaagccatctaccctctagcagcccagagcatcttggtctggaacctggagaaaaggtagaggatatgcccaagccccctctgccccaagaacaagccaccgaccctctagtggattcccttgggagcgggatagtttactccgcccttacctgccatctgtgcgggcacttgaagcagtgtcatggccaggaagacgggggacagactccagttatggcctcaccctgctgtggatgctgttgtggcgaccggtcctcaccacccacgacacccctccgtgcacccgacccatctcctggcggagttccactcgaagctagcctgtgcccggcatccttggccccaagtggaattagtgaaaagtcaaagtcgtcatccagctttcatccagcccctggcaacgcgcagtccagtagccaaacaccaaagatagtgaattttgtgagcgtgggtcctacttacatgcgggtgtcttag

SEQ ID NO: 227240 - DNA, 2433 bp, synthetic construct
  misc_feature 1..2433: note = Description of Artificial Sequence: Synthetic coding sequence
  source 1..2433: mol_type = other DNA
atgcagaaggatgccaggcgcgagggcaacatgaaagtactgcaggaacccacatgcgtgtcagactatatgagtatcagtacctgcgaatggaaaatgaacggaccaaccaattgctcaacggaactgcggttgctgtatcagctggttttcttgttgtctgaggcccacacgtgcattccagaaaacaatggcggagccggatgcgtgtgtcacctccttatggacgatgtagtgtccgcagataactataccttagatctatgggcgggtcagcagctgctctggaagggctctttcaagcccagtgagcacgtaaagccaagggcccctgggaatttaaccgtgcatacgaacgtctccgacacccttctccttacatggagcaacccatatcctcctgacaactatctgtacaatcaccttacttacgctgtgaacatctggagtgagaacgatcccgctgacttccgcatctataacgttacttaccttgagccctccctgcggatagctgcgagtaccctgaaaagtggcatttcctatagagccagggtgcgcgcttgggcccagtgttataacacaacttggtctgagtggagcccgtctacaaagtggcataattcatacagggaaccttttgaacaacacttgctacttggtgtctccgtcagctgtatcgtgatactcgcagtgtgtctgttgtgttacgtatcgattacaaaaatcaagaaggaatggtgggatcagattccgaatcctgctcgctctagactggtggctatcatcattcaggatgctcaagggtcccagtgggaaaaacgaagtcgcggtcaggagcctgccaagtgcccgcactggaaaaactgtctgactaaattgctgccatgcttcctggagcacaatatgaagagggatgaggaccctcacaaggcagccaaggaaatgccatttcagggcagtggtaagtccgcctggtgccccgtggagatctctaagaccgtgctctggcccgaaagcattagcgttgtacgctgtgtggaattatttgaagcccctgtagagtgcgaagaagaggaggaggtggaagaggagaaagggagcttttgcgcatcgcccgagtcgtcccgcgacgatttccaggaaggcagagagggcattgttgcgaggcttactgaatcactgtttctcgatcttttgggcgaagagaacggtggtttctgccagcaagacatgggagagtcttgcttactacctcccagcggatcaacaagcgcacatatgccatgggatgagtttccctcagccggtcccaaagaggctccaccttgggggaaggagcagcccctacacctcgaaccaagcccccctgcctcccccactcagagcccagacaacctcacctgtactgagacgcccctggtgatcgctggcaatccagcctaccgctccttttctaactcgttatcccagtccccctgtcctcgtgaactgggcccagaccccttgttagccaggcacctggaagaagtggaaccagagatgccatgcgtgcctcagctgtcagagcctacaaccgtccctcagccagagcctgagacctgggagcaaatcctaaggagaaacgtcttgcagcacggggcagcggctgcacccgtgtccgctccaacctcaggatatcaggaatttgtccatgctgttgagcaagggggaacccaagcttctgccgtggtggggcttggcccaccaggggaggcgggttacaaagccttcagctccctgctggcatcgtctgccgtcagccccgaaaagtgtggatttggagcttcttccggggaagaggggtacaagccatttcaggatctcataccaggttgccccggtgatccagctcctgtacctgtccctctcttcaccttcgggcttgatcgcgaaccccctcggtcgccacaaagttcacacctcccttcctccagccccgaacaccttggcctcgagcctggggagaaagtggaggacatgccaaagcccccactgccccaggagcaggcaacagatccactcgtggacagtcttgggagcgggatagtttacagcgcattgacatgtcacttgtgcgggcacctgaagcagtgccacggccaagaagacgggggtcagactcccgtcatggcaagcccgtgctgcgggtgttgttgtggagatcggtccagtccgcctaccacgccactgcgcgcacctgatccgagccccggaggagttcccttggaggccagcctttgcccggctagtcttgccccatctggcattagcgagaagtccaagtcgtcatcctcctttcacccagcgcctggcaatgctcagagtagctcacaaacaccaaaaatcgtgaatttcgtgtcagtgggcccaacatacatgcgggtgtcctag

SEQ ID NO: 227241 - DNA, 684 bp, synthetic construct
  misc_feature 1..684: note = Description of Artificial Sequence: Synthetic coding sequence
  source 1..684: mol_type = other DNA
atgggatggctttgctctggcctactgttcccagttagttgtctggtgctgttacaggtcgcgtccagcggcaatatgaaggtgctgcaggagccaacctgcgtgagtgactacatgtcaatctccacttgcgagtggaagatgaatggtccgactaattgttcaacagagctgaggcttttgtatcagttagtattcttgttgagtgaagctcatacctgcatcccagagaataacgggggtgcagggtgcgtgtgtcatctcctaatggacgacgtcgtcagtgccgacaactataccctggatctctgggccggtcagcagttgttgtggaaaggctccttcaagccaagcgaacacgttaaacccagagccccaggtaatctgacggtgcatactaatgtgtccgataccctcctgctgacctggtccaacccatacccacccgataattatctctacaatcacttaacatacgctgttaatatatggagcgaaaatgaccccgctgattttaggatctacaatgttacttacttggaaccatctttgagaattgctgctagcactctgaaatccgggatttcatatcgcgcacgtgtaagggcttgggcgcagtgctataatactacttggagtgagtggtctccttctacgaagtggcacaatttttctgtatgctag

SEQ ID NO: 227242 - DNA, 2478 bp, synthetic construct
  misc_feature 1..2478: note = Description of Artificial Sequence: Synthetic coding sequence
  source 1..2478: mol_type = other DNA
atgggctggctgtgcagcgggttgctctttccagtgtcatgcctcgtcctgctccaggtagcttccagcggaaatatgaaagtccttcaggagcccacctgtgtaagcgactatatgtccatcagtacttgcgaatggaagatgaacggccctaccaattgttccactgagcttaggctcctgtaccagctcgtgttccttctttctgaggcccacacttgcattccagagaataacggtggagcgggatgcgtgtgccacctacttatggacgacgtggtgtcagcagataactacacactggacctgtgggctggccagcagctgttgtggaagggatccttcaaaccaagcgaacacgttaaaccccgagcgccaggcaacttgaccgttcacacgaatgtaagcgataccctgctcctcacatggtctaatccctacccccctgataactacttgtacaatcatttgacgtatgccgtgaatatctggagtgagaatgaccccgcagactttaggatctataacgtgacctacctcgagccatccctgcgcattgctgcatccacactcaagagcggtatttcatacagagcccgtgttagagcctgggctcaatgttacaatactacctggtccgaatggtctccatccacgaaatggcataacagttacagggaacccttcgaacagcacctgctgctgggagtgagcgtgagttgcatcgtaattctagcagtgtgccttctttgttatgtgtcgatcacaaagatcaagaaagagtggtgggaccagattcctaatccggctagaagcaggctagtcgcgataatcatccaggatgcgcaggggtctcagtgggagaagcgcagccgcggacaagagcctgcgaaatgcccgcattggaaaaactgcctgacgaaactcctaccttgtttccttgaacacaacatgaagagagacgaggaccctcacaaggcagctaaggaaatgccgttccagggatccggcaaatctgcctggtgtccggtcgagatatccaagactgtgctgtggcctgaaagcattagcgtagtgcgatgcgtggaacttttcgaagctcctgtggagtgtgaagaggaggaggaagtggaagaagagaagggatctttttgtgcctcccctgaatctagcagagacgattttcaggagggaagagaaggtatcgttgctaggttgaccgagagcctgttcttagacctgctcggagaggaaaatggtggattctgccagcaggacatgggcgaatcttgcctgctgccaccatcagggagtacatccgcgcacatgccttgggacgaatttcccagtgctggacccaaggaagccccaccttggggcaaagaacagccattacatctcgaaccttctcccccagcctccccaacccagagtcctgacaatctaacttgcacggaaacccccctggttatcgcgggaaaccctgcctaccgcagctttagcaattccctgagccagtcaccgtgccccagagagttgggacccgatcctctgctcgcacggcatctggaggaggtggagcccgaaatgccttgtgtgccgcaactctctgagccaaccacagtacctcagcccgaacccgaaacatgggagcaaattctcagacgcaacgtcctgcaacacggcgcagccgcagcccctgttagcgcaccgacatcaggttaccaagaatttgtccatgccgtggaacagggcggaacccaagcctctgcagttgtaggcttaggcccacccggagaggcaggctataaggcattttccagcttacttgcctcaagcgcagtgtccccagagaaatgcgggtttggtgcatcctcgggagaagagggctataagccttttcaagacctgattccaggttgcccgggagaccccgctccagtccccgttccactgttcacttttggccttgacagagagccacctcggtctccacagagctcccacttgccgtcttcatcaccggaacacctgggactggaaccgggtgaaaaggtcgaagatatgcctaaacctcctctgccgcaggagcaggcaaccgatcccctcgtggattcactgggctctgggatcgtgtactcagccctcacttgccatctgtgcggtcacctgaaacagtgccacggtcaagaggacggcggacagacaccggtgatggctagcccttgttgtggctgttgctgtggtgataggtcatccccacccacaacccctttacgggctcccgacccctcccctggcggtgtgccactcgaagcaagcctgtgtccagcatcattagctccatctggaattagcgaaaaatcgaagagtagctctagtttccaccctgccccaggtaatgcgcaatcctcttcccagacacctaagattgtgaacttcgttagcgtgggaccaacatatatgagagtgtcctag

SEQ ID NO: 227243 - DNA, 684 bp, synthetic construct
  misc_feature 1..684: note = Description of Artificial Sequence: Synthetic coding sequence
  source 1..684: mol_type = other DNA
atgggatggttgtgctcggggttgttgttcccagtctcctgcctggtgctcttgcaggtcgccagctccgggaacatgaaggtgctgcaggagcccacatgcgtatctgattacatgtcaatcagcacctgcgaatggaagatgaatgggcctacaaattgcagtacagagctcagactgctctaccagctggtctttctgttaagtgaggcacatacatgcatccccgagaacaatgggggtgccggatgtgtgtgccacctgctgatggacgacgtcgtgtccgccgacaattataccttggatctgtgggctggccagcagctgctttggaaagggagtttcaaaccctccgagcatgtgaagcccagggcccctggaaatctgacagtgcatacgaatgtgagcgacacactactgttgacatggtcaaacccctaccctcccgacaattacctctacaatcacttgacttatgctgtaaatatttggtctgaaaatgatcctgcagacttccgaatttacaatgtgacctacctggagccctcactgcgaatcgcagcttccactctgaaatccgggatttcttatcgggctcgcgtgcgtgcatgggcacagtgctataatactacttggagtgaatggagcccatctaccaagtggcacaactccaacatttgctag

SEQ ID NO: 227244 - DNA, 2478 bp, synthetic construct
  misc_feature 1..2478: note = Description of Artificial Sequence: Synthetic coding sequence
  source 1..2478: mol_type = other DNA
atgggctggctctgctccggactgctgttccctgtgtcatgccttgttctactacaggtggccagctcgggcaacatgaaggtcctccaagagccaacgtgcgtctcagattatatgtctatttcaacgtgtgagtggaaaatgaatggcccaaccaattgcagcactgagcttaggctgctctaccagttggtgttcctcctcagtgaagcccacacttgcattcctgagaacaatggaggagccggatgcgtgtgtcaccttcttatggatgatgtggtcagtgctgacaactatacattggacctgtgggctggacaacagctcctgtggaaagggtcattcaagcctagtgagcatgtgaagccccgagctcctggtaacctgactgtgcacaccaacgtctcggacactctccttctcacatggagtaatccttatcctccagataactacctctacaaccaccttacctatgcagtgaacatatggagcgaaaatgatcctgctgactttcgcatctataacgttacatacctggagccttccttgaggattgctgccagcacacttaagtcaggtatttcgtacagggcacgggtcagagcatgggcacagtgctacaataccacatggtcggagtggtccccaagcactaagtggcacaattcctatcgggagccatttgaacagcacctgctgctaggagtatccgtgagttgcatcgtgatccttgctgtgtgtcttctttgttatgtgtccattaccaagataaagaaggaatggtgggaccagatcccaaacccggcacgttctcgcctggtggcgatcatcattcaggacgcacagggctctcaatgggagaaacgctctcgtggccaggaacccgctaagtgtccgcattggaagaactgtctgacaaaactgcttccatgcttcctggagcacaatatgaaaagggatgaggatccccacaaggcggcaaaggaaatgccttttcagggatccgggaagagtgcctggtgtccagtcgaaatttctaaaacagtgctctggccagaatctatttctgttgtacgatgcgtagaactgtttgaagctcccgttgaatgtgaggaagaagaagaagtggaagaggaaaagggcagcttttgcgcttctccggagtcctctcgcgatgactttcaggaaggcagggaaggcattgtggctaggcttacagagtcactcttccttgacttgctgggtgaggaaaatggcggtttctgccagcaggacatgggggaatcctgcctgctgcccccttccggtagcacctctgcacatatgccatgggatgaattccctagcgcgggtcctaaagaggcgcctccctggggtaaggaacagccgctacaccttgaaccaagcccacctgcgtctcccactcagtcccctgacaatttaacgtgcacggagactcccctggtcatagcaggcaaccccgcttaccgcagtttttccaactccctgagtcagtctccctgtccacgggagcttggccctgatcccctgttagcccgacacctggaggaagtggaacctgagatgccatgtgtgccgcagctttccgagcccacgaccgtcccccagccagaaccggaaacttgggagcaaattctccgtagaaatgtccttcagcacggagccgctgcagctccagtgagcgcacccacatctgggtaccaagagttcgttcacgccgtggaacaaggcggaacccaggcgagcgctgtggtcggcttagggccacccggtgaagctgggtacaaggctttttcttccctgctggcctcaagcgccgtctctcctgagaaatgcggcttcggcgctagtagcggggaggaagggtataaaccatttcaggacctcatccctgggtgccccggtgacccagctcctgtgccagtgcccctctttacctttggcctcgaccgagagccgccaaggtcgccccaatcaagccatttgccctcttctagccccgaacacctcggcttggagcctggggaaaaagtggaagatatgcctaagcctccattaccgcaagaacaagctactgacccactcgtcgatagcttaggatcaggcatagtgtactcagcgctcacgtgtcatctgtgcggacacctaaagcagtgccatggtcaggaggatgggggacaaacgcccgtgatggcaagtccctgttgcggctgctgctgtggtgaccgcagctcacctcccacgactcctctgcgcgcacccgaccctagtcccggaggcgttccccttgaggcatccctgtgtcctgccagtctggccccaagtggcataagtgaaaaatctaagagctcaagtagtttccatccagctcctggaaatgcacagtcaagcagtcagactcccaagatagtgaattttgtgtccgtaggtcccacatacatgcgagtgagctag

SEQ ID NO: 227245 - DNA, 1263 bp, synthetic construct
  misc_feature 1..1263: note = Description of Artificial Sequence: Synthetic coding sequence
  source 1..1263: mol_type = other DNA
atgataatcgtggcccatgtgctgctcatcctcctgggcgcaactgaaattctccaagcagacctgctgcccgacgaaaagatctctctcctcccgcctgtcaactttaccatcaaagttaccggcctggcccaggtgcttctgcagtggaaacctaaccctgaccaggaacagaggaatgttaacctggagtatcaggttaaaattaatgctcccaaggaggacgactacgagacaagaatcactgaaagcaaatgtgtgaccatcctacataagggattttcagcctctgtgagaactatcttgcagaacgatcacagcctcttggcaagctcctgggctagcgcggagttacacgcccctccgggtagcccaggtacatcaattgttaatctgacatgcacgacaaacaccactgaggacaattattcccggcttagatcctatcaggtttctctgcactgcacatggctcgttggcactgacgcccctgaagacacccagtacttcctctactacagatacgggtcttggaccgaagagtgccaggagtacagcaaggacaccctggggaggaacatagcttgttggtttccgaggacattcattctgagcaaggggagggactggctagccgttctcgtgaatggcagctccaaacatagtgctattcggcctttcgaccagctgtttgccctgcatgctatagatcagatcaatccgccactgaacgtgacagctgaaatagaagggaccagactcagtatacagtgggaaaaaccagtctccgcatttcccattcattgttttgattacgaggtgaagatccataatacacggaatggctatctgcagatcgagaagctgatgactaacgcctttatcagcatcatcgatgatttatctaaatatgatgttcaagtgagagcggcagtgagttcaatgtgtcgggaggcgggactgtggtcggagtggagccagccaatatacgtcggcaacgacgagcataaaccactcagggagtggttcgttatcgtgatcatggcgacgatttgctttattcttcttatcctcagtttgatttgcaaaatttgtcacctgtggatcaagctgttccccccaatcccagcccctaagagtaacataaaggacctgtttgtcaccaccaactacgagaaggctggctcaagtgagaccgaaattgaggtgatctgttacattgagaagccaggggttgagacccttgaagactctgtgttctag

SEQ ID NO: 227246 - DNA, 1008 bp, synthetic construct
  misc_feature 1..1008: note = Description of Artificial Sequence: Synthetic coding sequence
  source 1..1008: mol_type = other DNA
atgataattgtcgctcacgttctgcttatacttctgggggctaccgagatcctccaggccgacctgttaccggatgagaaaatttccctgctcccacctgtcaactttacaatcaaagtcacaggtctggcccaggttctcttgcagtggaaacctaaccccgaccaggaacagcgcaacgttaaccttgagtatcaggtcaagatcaacgcccctaaggaggacgattatgagacacgaattacagagagcaagtgcgtgaccatactgcataaggggttctcagccagcgtgaggaccatcctgcagaatgatcatagcctgttggcctcttcatgggctagcgctgagctccacgcccctccaggttcgccgggtacaagcatcgtgaatctgacctgtacaactaataccactgaggataattactctcgtcttagaagctaccaggtgtctctccactgtacatggcttgttggcacggatgctccggaggacacccagtattttctttactatcgctatgggagttggacagaagaatgccaagagtactctaaggatacactggggagaaatattgcctgctggttccctcggacattcattctctcgaaaggacgcgactggctggccgtgctggtgaacggaagctctaagcatagcgccatccggccttttgaccagctcttcgctctgcacgcaatcgaccagatcaatcccccattgaacgtcacggcagagatcgagggcacaaggctgagcatccagtgggaaaaacctgtgagtgccttcccgatacactgttttgattacgaagttaagattcataacaccaggaacggctatcttcagatcgagaaactaatgacaaacgctttcatatctatcatcgacgatttgagtaaatatgatgtgcaggttcgcgctgcagtttccagcatgtgcagagaggccggactctggtccgagtggagccagcccatctatgtgggttttagtcgctag

SEQ ID NO: 227247 - DNA, 453 bp, synthetic construct
  misc_feature 1..453: note = Description of Artificial Sequence: Synthetic coding sequence
  source 1..453: mol_type = other DNA
atgacaaacgcgtttatctccattatcgatgacctgagcaagtacgatgttcaggtgcgcgctgcggtatcctctatgtgtagagaggcgggtctctggtcagagtggagccagccaatttatgtgggcaatgacgagcacaaaccgcttagggaatggttcgtgatcgtcatcatggcgaccatttgcttcattctgctgattctgtccctcatatgcaaaatttgccacctgtggatcaagctctttcctccgattcccgctcccaagagtaacatcaaggacctgtttgtcacaacaaattacgaggtgctctgtatttttatttacatcttggactcggctgataattttctacagaagaaaaaagctggctcatcagagaccgaaatcgaagtgatctgctacatcgagaagcccggagtggagaccctggaggattctgtattctag

SEQ ID NO: 227248 - DNA, 1008 bp, synthetic construct
  misc_feature 1..1008: note = Description of Artificial Sequence: Synthetic coding sequence
  source 1..1008: mol_type = other DNA
atgatcatcgtggcacatgttctgctcatcctcctcggcgctacagagattcttcaggcggacctacttcccgacgagaaaatcagtcttttgccccctgttaattttaccattaaggttaccggactcgcccaggtgcttttacagtggaaacccaaccctgatcaagagcagcggaatgtgaatttggaataccaagtgaagatcaatgcaccaaaagaagatgactatgagaccaggatcactgagagtaaatgtgtcaccatccttcataaggggttctccgccagcgtgagaaccatcttgcagaacgaccactcactccttgccagtagttgggcaagcgcggagttacacgctcccccaggctcacccggtacatctattgtgaacttgacatgcactactaatactactgaagacaattattcaagactaaggagttatcaggtttccctgcactgcacctggctggtgggtacagatgcccctgaggatacccagtacttcctctactacagatatggaagctggactgaagaatgccaggaatactcaaaagacactctgggcaggaatatcgcttgctggtttcctagaacattcatcctaagcaaaggtcgggattggctggcagtgcttgtgaacggatcctctaagcactctgctataagaccttttgatcagttgtttgcgctccacgcaatcgaccagataaacccacccctgaatgtgactgccgagattgagggaacgcgactgtctattcaatgggagaagcccgtgagtgccttccctatacactgtttcgactacgaggtgaaaatccataatacacgtaatggatacttgcagattgagaaactaatgacaaacgcattcatttccattattgacgacctaagtaagtatgacgtccaggtcagggcagctgttagcagcatgtgccgcgaggcaggattgtggagcgagtggtctcagccaatctatgtcggcttcagtcgctag

SEQ ID NO: 227249 - DNA, 978 bp, synthetic construct
  misc_feature 1..978: note = Description of Artificial Sequence: Synthetic coding sequence
  source 1..978: mol_type = other DNA
atgatcattgtggcacatgtccttctcatccttctcggcgcaacagagatcctgcaggcggatctgttgcctgatgagaagatcagccttcttcctcccgtgaacttcaccataaaagttaccggacttgcgcaggtgctgttacagtggaagcctaaccccgatcaggagcaacgcaacgtgaacctggagtaccaggttaagatcaacgcaccaaaggaggatgattacgagacaaggatcaccgaaagcaaatgcgtgacaattctgcacaaagggttcagcgcatctgtgcggactattttgcaaaatgaccacagtttactggccagctcttgggcctcagccgagctgcatgctcctccaggatctccgggtacctctatcgtgaatctgacttgcactacgaatacgacggaggacaactatagcaggctcagatcgtaccaggtgtccttgcactgcacatggctagttggtacggatgcaccagaagatacccagtattttttgtactatcggtatggctcttggacggaagagtgccaggagtactctaaagatacactgggcagaaatatcgcctgctggttccctcggaccttcatcctgagtaaaggccgagattggttggccgtccttgtgaatgggtcttcaaagcactcagccataagaccattcgatcagctcttcgcgctgcacgctatcggaaatgatgaacataagccgttacgagagtggtttgtgattgtgatcatggcaactatctgttttattcttctgattctcagcctgatatgtaagatctgccatctttggattaaattatttccccctattccggctcccaagtcaaatattaaagacctttttgtcacgacaaattacgagaaggcaggctcttccgaaacagaaatcgaggtgatttgctacatcgaaaaaccgggtgtggaaaccctggaggactccgtgttttag

SEQ ID NO: 227250 - DNA, 330 bp, synthetic construct
  misc_feature 1..330: note = Description of Artificial Sequence: Synthetic coding sequence
  source 1..330: mol_type = other DNA
atgattattgtagcacacgtccttttgatcctgctgggcgcaactgaaattttgcaggcagatctactgccggacgaaaaaatctcactcctcccacccgtgaacttcaccataaaggtcactggtttagcccaggtgctgctgcagtggaagcccaatccagatcaagagcaacggaacgtgaatctcgagtaccaggttaagattaacgcccctaaggaggacgattacgagactcgaatcactgagagcaagtgtgtaacaattctgcacaaggggtttagcgcttccgtgcgtacaatcctgcagaatgatcatagtctgttgtag

SEQ ID NO: 227251 - DNA, 1002 bp, synthetic construct
  misc_feature 1..1002: note = Description of Artificial Sequence: Synthetic coding sequence
  source 1..1002: mol_type = other DNA
atgattatcgtggcccacgtgctacttatattgcttggcgctaccgagatacttcaggccgacttgctgccagacgagaaaatcagtttgctgcctcccgtgaactttacgataaaggttaccgggctggcccaggttctactgcagtggaaacctaaccctgatcaggaacagagaaacgtcaacttggaataccaggtgaaaatcaacgccccaaaagaggacgactacgagactagaatcactgaatctaaatgcgtgacaatcctgcacaaaggcttttcagcgtccgtgcgcaccatcctgcaaaacgaccattccctcctggcgtcaagctgggcgtctgctgagctgcacgctcccccaggttctcccggaacctccatagtcaacttaacctgtacaacaaacaccactgaagacaactattcccgcttgagaagttatcaggtaagcctgcactgcacttggctggtggggactgatgctcctgaggacacacagtactttctctattaccggtatggatcctggactgaggaatgccaagaatactctaaagatacgttggggagaaacatcgcctgttggttcccacgcacattcatattgtctaaaggacgggattggttagcagtcctggtgaacggcagtagcaagcatagcgcaattaggcccttcgaccagctgttcgcactccacgcaatcgaccaaatcaacccacctttgaacgttacagctgagatcgaagggactaggctgagtatccagtgggaaaagccagtgagcgcttttcctatacattgtttcgattacgaggtcaagattcacaacaccaggaacgggtatctccagatcgaaaagcttatgacgaacgccttcatatcgattatcgacgacctgtcaaagtacgacgtgcaggtcagagcagccgtgagcagcatgtgccgagaggcaggcctttggtctgagtggagccagcccatctacgtgggtaaatag

SEQ ID NO: 227252 - DNA, 1137 bp, synthetic construct
  misc_feature 1..1137: note = Description of Artificial Sequence: Synthetic coding sequence
  source 1..1137: mol_type = other DNA
atgattatcgtcgcccatgtgttgctgattttgctgggcgctaccgaaatcctccaggccgaccttctgccggacgagaagatttctcttcttccacctgtgaatttcacaattaaggtgacaggactcgcccaggtcctgttgcagtggaaacctaaccccgatcaggagcagcgtaacgtgaatctggagtaccaagtcaagatcaatgcgcctaaagaggatgattacgagactcgcattactgaatcgaaatgcgtaacaattctgcataagggtttctccgcctccgtgcgcaccattctccaaaatgaccatagtctgctggcaagctcctgggcttccgccgagttacatgccccacctggaagcccgggaacctccatcgtgaatttgacttgcactactaataccaccgaagataattatagcaggctcagatcgtaccaagtgtcactgcattgtacttggcttgtgggcacggatgccccagaggatacacagtacttcctctattaccgttacgggtcctggaccgaggaatgtcaggagtactctaaagatacgttgggaagaaatatcgcttgctggtttcctcggaccttcatcctgtctaaaggccgagactggctcgcggtgctcgtaaatggctcaagcaaacacagcgcgatcagaccctttgaccagctgtttgcactgcacgctatcgaccagattaatcctccgctaaatgttaccgcagagatcgaaggaactaggttatctatccagtgggagaagcccgtatccgcattccccattcattgttttgattacgaggtcaagattcataatacgcggaacggatatcttcagatcgagaaactaatgacaaacgcttttatctccataatcgacgacttatctaagtatgatgtgcaggtgcgggcagccgtttcttccatgtgcagagaagctgggctttggagcgagtggtcacagcccatctacgtgggcaacgacgaacataaaccactgagggaatggtttgtcatcgtgatcatggcaactatctgcttcattctcctgatcctgtccttaatctgtaagatcaaactcggaccagttcgcagaaagcttaaaagctccgttatttag

SEQ ID NO: 227253 - DNA, 591 bp, synthetic construct
  misc_feature 1..591: note = Description of Artificial Sequence: Synthetic coding sequence
  source 1..591: mol_type = other DNA
atgatcatcgtcgcacatgtgctgcttatcctcctcggggctacagagattcttcaggccgacctcctcccagatgagaaaatatccctgcttccgcctgtaaattttacgattaaagtgacgggtctggctcaagtgctgctgcagtggaaaccaaatccagaccaggagcaacgtaacgttaatctggaataccaggtgaaaattaacgcaccaaaagaggacgactacgaaacacgcattacagaatctaagtgcgttactatcttacacaaagggttttcggccagcgtgcgtaccatcttacaaaatgaccattcattgttggccagctcttgggcttcagcagaattgcatgcaccccctgggagtccagggaccagtatcgtgaatctgacctgcaccactaatactacagaagataactattctcggcttagaagttatcaggtgtctttgcattgcacctggctggtgggaaccgacgcaccagaggatacacagtactttctttattatcgctatgggagttggacagaagagtgccaggaatattcgaaagacaccctagggaggaacattgcttgctag

SEQ ID NO: 227254 - DNA, 636 bp, synthetic construct
  misc_feature 1..636: note = Description of Artificial Sequence: Synthetic coding sequence
  source 1..636: mol_type = other DNA
atgatcatcgtggcacatgtgttgctcatcctgctgggcgcaacagagatcttacaggccgacctccttcctgacgaaaaaatcagtcttctgcccccagtgaatttcaccatcaaagtgacgggattggcacaggtcctgttgcagtggaagcctaacccagaccaggaacagcggaatgtaaatctggagtatcaggtgaagatcaacgctcctaaagaggatgattacgaaacaagaatcacagagagcaagtgtgtgacgattctgcataaggggttcagtgccagcgtgaggacaatcctccagaatgaccactccctgcttgcgtctagctgggcgtcagcagagctacacgcaccaccaggcaacgacgaacacaagccactgagagagtggttcgtcattgtcattatggccaccatctgcttcattctactcattctgtccttgatctgcaagatctgccacctgtggataaaattgtttccacccattcctgcgcctaagtcaaatatcaaggatctcttcgtgaccacaaactacgagaaagcgggtagctctgaaactgaaattgaagtgatttgctatatcgagaagccaggagtggaaacgctggaagatagtgttttctag

SEQ ID NO: 227255 - DNA, 1263 bp, synthetic construct
  misc_feature 1..1263: note = Description of Artificial Sequence: Synthetic coding sequence
  source 1..1263: mol_type = other DNA
atgatcattgtggcccacgttctgttgatcctcctcggggcaacagaaatacttcaggccgacttactgcccgatgagaagatatcactcttacccccagtgaatttcaccataaaggtgactggcttggcacaggtgctgttgcagtggaaacccaatccggaccaagagcagcgtaatgtgaatctagagtatcaggtgaagatcaatgcccctaaggaggacgattacgagacccgtatcacagagtccaaatgtgtgaccattctccacaagggatttagcgctagcgtgcggactatactgcaaaatgatcattcactgctggctagctcttgggcatctgcagagttgcacgccccaccgggttctccgggtaccagcatagtcaacttgacatgcacaaccaatactacagaagacaactattctcgcctgcgctcgtatcaggtgtcactgcactgtacatggttagtgggaaccgacgcccctgaggacacacagtactttttgtattataggtatgggtcttggaccgaagaatgccaagagtatagcaaggacactctcggtcggaacatcgcttgttggttcccacggactttcatcctaagtaaaggtagagattggctggcggttctagtgaatgggagttccaaacacagcgccatcaggcctttcgatcagctgttcgcactgcacgccatagatcagatcaaccctcctcttaacgtcactgcggaaattgagggcacccgcctgtccatacagtgggagaagccagtgagcgcttttcccattcattgctttgattacgaggtgaagatccacaatacacgcaacggttacctacagattgagaagctcatgactaacgcctttatctccatcatcgacgatcttagcaaatatgacgtacaggttagagcggcagtgtccagtatgtgtagagaggccggattatggagcgagtggagtcagcccatctacgtaggcaacgatgaacacaaacctttgcgggagtggttcgtaattgtaatcatggctaccatctgttttatcctcctaattctctcgctcatttgtaaaatttgtcacctgtggatcaaactgttccctcctatacctgcgcctaaatctaacataaaagatctttttgtcaccactaactacgagaaagctggctcctctgagacggaaatcgaggtaatatgctacattgaaaagcccggtgtcgagaccctggaagatagtgtgttttag

SEQ ID NO: 227256 - DNA, 1002 bp, synthetic construct
  misc_feature 1..1002: note = Description of Artificial Sequence: Synthetic coding sequence
  source 1..1002: mol_type = other DNA
atgataattgtggcccacgtactcttaatcttgctaggagccacggaaatccttcaggccgacctccttcctgacgaaaaaatttccctgttaccgcctgtcaattttacaatcaaagtgaccggcttagcacaagtgttgttgcaatggaaaccaaatcctgaccaggagcaacgcaatgtaaatttagagtaccaggtcaagattaacgctcccaaggaggacgactatgaaacccgcatcactgagtccaaatgcgtgactattctgcacaaggggttcagtgctagtgtgaggacaatcctccagaatgaccatagcctcctggccagcagctgggcatccgctgagctgcacgctccccctgggagccccggaacaagcattgtaaacctgacatgtaccacaaacactactgaggacaattactcgagattgcggtcttatcaggtctctctccattgcacatggctagttggcacggatgctcccgaagatacacagtattttctctactataggtacggatcatggaccgaggagtgccaggaatactcgaaggacacactgggtcggaacattgcgtgttggtttcccaggacatttatcctgagtaagggcagagattggcttgccgtgctcgtgaatgggagttctaaacatagcgctatccgcccttttgatcagcttttcgccctccacgctattgaccagattaacccacctctcaatgtgacagccgagatcgagggaacgagactctctatacagtgggagaaacctgtcagtgctttccccattcattgttttgactacgaagtgaagatacacaacacccgcaatggctatctgcaaatagaaaagctcatgacaaatgcgttcattagcataatcgatgacttgagtaaatacgatgtgcaagttagagctgccgtatccagtatgtgcagggaggcgggactatggtctgaatggtcacaaccaatttatgtcggtaaatag

SEQ ID NO: 227257 - DNA, 1098 bp, synthetic construct
  misc_feature 1..1098: note = Description of Artificial Sequence: Synthetic coding sequence
  source 1..1098: mol_type = other DNA
atgttggctgtcggctgtgcgttactggcggctctcttggccgcaccaggagcggctctggccccaagaaggtgcccagcacaggaagtagcgagaggggtgctaaccagtttaccaggcgattcagtgaccttaacttgtcctggcgtggaaccagaagataacgccactgtgcattgggtgcttagaaagcccgctgcaggatcccaccctagccgatgggccggaatggggagaaggctgctcctgagatccgttcagctacatgattccgggaactatagctgctacagggccggaaggcccgctggtacagttcatctgttagttgacgtaccccctgaagaacctcagctgtcttgctttagaaaatccccattgagtaatgtagtgtgcgagtgggggcctagaagcacccctagtctaacaaccaaggctgtgcttcttgtgagaaagtttcaaaatagcccggctgaggactttcaggaaccatgtcagtacagtcaggaatcccagaaatttagctgtcaactggccgttccagaaggtgattcgagcttttatattgtcagcatgtgtgtggccagcagcgtcgggagtaagttcagcaagacacagacctttcagggttgcggtatcctacagcctgatccccctgccaacattactgtgacagcagtcgctcggaatccaagatggctctcagtgacctggcaggatccccactcatggaatagctcattctatcgcctgcgatttgagctgaggtaccgcgctgaaaggtctaagacctttacgacctggatggtgaaagatctgcagcatcattgcgtcattcatgatgcctggtccggcttaaggcacgtagtccagttgagagcgcaggaggaattcggccagggtgaatggtcagagtggtcaccagaagcaatggggactccgtggacagaatcccggtctcctccagccgagaatgaagtctccaccccaatgcaggccttaaccaccaacaaggatgacgacaatatcctatttcgggattctgcaaacgcaaccagcttgcctggtagtcggagacggggaagttgtgggttatag

SEQ ID NO: 227258 - DNA, 1407 bp, synthetic construct
  misc_feature 1..1407: note = Description of Artificial Sequence: Synthetic coding sequence
  source 1..1407: mol_type = other DNA
atgctggctgtgggctgcgcactcttggccgcattacttgctgcgcctggagccgctctggcccctcgaagatgtcccgcacaagaggtggcccgaggcgtcctgacctctctcccaggggattctgtaacattaacctgtcctggagtcgaaccagaagacaatgctactgtgcattgggtcttgcgcaagccggcagctggctcccaccccagcagatgggcgggtatgggaaggcggctgctgctcagaagtgtgcaactgcatgattccggtaactacagctgctatagggctggcagacccgctgggacagttcatctgttggtggatgtccctcccgaggaacctcagctgtcctgcttccggaagtcacccttatcgaatgtggtttgtgagtggggccctaggagtactccctcactgactaccaaagccgtgctgctcgtgaggaaatttcaaaatagccccgctgaggacttccaggagccttgccagtactcccaagagagccagaaatttagttgccagctcgcagtgccagaaggcgattcttcattctacattgtgtcaatgtgcgtcgctagtagtgtggggagtaaatttagtaaaactcagacgttccagggttgcggcattctgcagcccgacccacccgcaaatattacggtaacagccgtggcacgtaacccacgctggctatccgtcacttggcaggaccctcactcatggaattccagcttttatcggttacgctttgagctgaggtatagagccgaacggtccaaaacattcacaacttggatggttaaggacttgcaacaccattgtgtcattcacgatgcatggtctgggcttcgtcacgtggttcagctgagagcccaggaagaatttggacagggtgagtggtcggagtggtcccccgaagccatgggcactccctggaccgaaagccgtagccctccggctgaaaacgaggtgtccaccccgatgcaggctctgacaacaaacaaagacgatgataacatcctgttccgggactctgcaaatgcgaccagtctcccggtacaggattctagttccgtcccacttcctacctttctggtggcaggcggtagcttagcctttggcacactgctttgtatcgccatcgttttaaggttcaagaaaacatggaaactccgcgctctcaaggagggtaagaccagcatgcacccaccatacagcctcggccaactggtccccgagcggcctagacccacacccgtcttggtgccgttgatctcaccccctgtgtctccatcttctctagggtcagacaataccagctcccacaaccggccagacgccagggatcccagatcaccttatgatatctcaaataccgactatttctttcctaggtag

SEQ ID NO: 227259 - DNA, 2757 bp, synthetic construct
  misc_feature 1..2757: note = Description of Artificial Sequence: Synthetic coding sequence
  source 1..2757: mol_type = other DNA
atgctgaccctgcagacatggctggtgcaagccctttttatcttcttaacaacagagtccacgggtgaactgctggacccctgtggctacattagccccgaaagtcccgtggtccaactgcactctaatttcactgcggtctgcgttctgaaggagaaatgcatggattactttcacgtgaacgccaattacattgtttggaagactaatcatttcaccatacccaaagagcagtacaccataataaatcgcaccgccagttcagtaactttcacagacatagcatctttaaatattcaactgacttgcaacatcttaacctttggccaactcgaacagaatgtgtatggaattacaataatctcaggtctgccccctgagaaacctaaaaatctgtcttgcatcgtgaacgaagggaaaaaaatgagatgcgagtgggacggagggcgtgaaactcatctggaaacaaacttcacactgaagtccgagtgggcaactcacaaattcgccgattgtaaggctaagcgcgacactccgacatcatgcacggtggattattcaaccgtctatttcgttaatattgaggtgtgggtggaagctgaaaatgcactaggcaaagtcactagcgatcacattaatttcgaccctgtgtacaaagttaagccaaaccctccacataatcttagcgttatcaattctgaggaattgtcctcaatcctgaaactgacctggactaacccctccatcaagtccgtcatcattttaaagtacaatatccaatacaggaccaaggacgcttctacatggtctcaaattcctccagaggacacagctagcacacgaagtagttttactgtccaggacctgaagcctttcaccgagtacgtattccgaatccgctgcatgaaggaggatgggaaagggtattggagcgattggagcgaggaagcttcaggaatcacctatgaagaccggccttctaaggcacccagcttttggtataagatcgacccttcacatacacaggggtaccgaaccgtgcagctggtctggaagacactgcccccttttgaagcaaacggcaagatcttggactacgaagtgaccctaaccagatggaaaagccacctgcaaaactatacagtcaacgccacaaagctcaccgtgaatctcaccaatgatcgatatctggccacactgactgtgcggaatctggtgggcaaatccgatgcggcagtgctgacaatcccagcttgcgactttcaggctactcacccagtgatggacctgaaggctttcccaaaagataatatgctttgggtcgagtggaccacaccaagagagagcgtgaagaaatacatcctggaatggtgcgtgctttcagacaaagccccttgcatcaccgactggcagcaggaggatggcacagttcatcgcacctacctcagaggtaatctggctgaaagtaagtgttacctgatcaccgtgacacctgtgtacgcagatggtcccggatcacctgagagtataaaggcgtacctcaaacaagcaccgccatcaaaagggcctacagtcaggacgaaaaaggtcgggaagaacgaagccgtcctcgaatgggatcagctgccagtggatgtgcagaacgggttcatccgaaactacactatcttctaccggacaattattggaaacgaaaccgccgtaaacgtcgactccagtcatacagagtacactctgtcttctcttacatctgataccctgtacatggtgaggatggcggcttacacagacgagggcggaaaagatgggccagagttcacctttactacgcccaagttcgcacagggtgaaatcgaagcaatcgtggttcctgtgtgcttagcctttctgttgacaaccctgctgggagtgctgttttgctttaataagcgggacctcattaaaaagcacatctggccaaacgtacctgaccccagtaagtcccatattgctcagtggtctccacacactccccctaggcataatttcaattccaaggatcagatgtattctgacggtaacttcacggatgtgtccgttgtggaaattgaagcaaatgataaaaaacctttccccgaggacctgaagagcctggatctgttcaaaaaagagaaaataaacactgagggtcacagtagtggaatcggaggaagttcgtgtatgtctagctccaggccatccatctcttcctctgatgaaaacgagagctcccaaaatacttcatcaacagtgcagtattcaaccgttgtccatagcgggtacaggcaccaggtgccttccgttcaagtgttctctcgtagtgaaagcacgcagccactgttagattcagaggaaaggccagaggatctgcaactggtcgaccacgtggatgggggagatggtatcctgcccaggcaacagtatttcaaacaaaattgttctcagcacgaatcaagccccgacatctcccattttgagagatccaaacaggtcagctcggttaacgaggaggacttcgtgcgtctcaagcagcagatctctgatcacatcagtcagagttgcgggtctggtcagatgaagatgttccaggaggtatccgcagctgacgcatttggcccagggaccgaggggcaagttgagaggttcgaaacagtcgggatggaagccgctactgacgaggggatgccaaaatcttatctacctcagaccgtgcggcaaggtgggtatatgcctcaatag

SEQ ID NO: 227260 - DNA, 990 bp, synthetic construct
  misc_feature 1..990: note = Description of Artificial Sequence: Synthetic coding sequence
  source 1..990: mol_type = other DNA
atgctaacgctccagacttggttagtgcaggcgctcttcatatttcttacaacagagagtacaggcgaactgctcgatccatgtggatatatcagtccagagtccccagtcgtccagcttcacagcaactttacagcggtgtgcgtgctgaaggagaaatgtatggactacttccacgtgaatgccaactacatagtctggaagacaaaccattttaccattcccaaggaacagtatacaatcattaaccggaccgcctcatcagtgacgttcaccgacattgcctccctcaacattcaattaacctgcaatatcttgacttttgggcagctcgagcagaatgtctatgggattacaataatttccggtctcccgccagagaagcccaaaaatctcagctgtatcgtgaatgaaggaaagaaaatgcgttgcgaatgggacggaggaagggagacacaccttgagacaaacttcactctgaagagcgagtgggccacccacaagttcgccgattgtaaggcaaagcgggatacacccacaagttgtactgtggattacagcaccgtttacttcgtgaacattgaggtgtgggtggaagctgaaaacgcactcgggaaagtcacaagtgaccacatcaacttcgatcccgtgtacaaggtaaaaccaaacccgccacataatctgtccgtgatcaattcagaggagctcagcagtatactgaagctcacatggactaatccttctatcaagtctgtgataatccttaaatacaatattcagtatcgtaccaaagacgccagcacctggtcacaaattccaccggaggatactgccagcacgcgttcctcatttacagtccaagacctgaaaccatttacagaatacgtttttcgcatacgctgtatgaaggaagatggtaagggctattggtcagactggtcagaggaggcgagcggcattacgtacgaggacaatatcgcctctttctag

SEQ ID NO: 227261 - DNA, 2574 bp, synthetic construct
  misc_feature 1..2574: note = Description of Artificial Sequence: Synthetic coding sequence
  source 1..2574: mol_type = other DNA
atgttgacattgcaaacctggctggttcaggctctgtttatcttcctgacaacagagtcaactggcgaattattggacccatgtggctacatctctccagaatcaccagtggtacagcttcactccaactttacagccgtctgcgtactaaaggaaaaatgtatggactattttcatgtgaatgctaactacatcgtctggaaaaccaaccacttcaccatcccaaaagaacagtatacaataatcaaccgcacagctagttctgtgaccttcacggacatcgcttcgctgaatatacagcttacctgtaatatactcacattcggtcagctcgagcagaacgtgtacggcatcaccatcatctcaggattacccccagagaagcccaagaacctcagttgcatcgtgaatgagggaaaaaagatgcgctgtgaatgggacggcggaagggagactcatttagagactaattttaccctgaaaagtgagtgggctactcataagttcgccgattgtaaggcaaagcgggatactccaacctcctgtacagtggactattctactgtgtatttcgtgaacatcgaagtttgggttgaagctgagaatgctcttgggaaggtgacatcggatcacatcaattttgaccctgtatacaaagtgaaacctaacccacctcacaacttgtccgtgattaactcagaggaactctcatcaattctcaagctaacctggacgaatccatctatcaaatcggtgataatcctgaagtacaacattcagtacaggactaaggatgcaagtacatggagccaaataccaccagaagatacagccagcaccaggagttcatttacggtgcaagatctgaaaccgtttactgagtatgtcttccgtatccgctgcatgaaagaagatggtaaagggtactggtccgattggtctgaggaagcgtccggcatcacatatgaggaccgtccctctaaagcaccttcgttctggtacaaaattgacccatcccacacacagggatatagaacagtgcagctcgtctggaaaacactcccacccttcgaggctaacggaaagatactggattatgaggtgaccttgacaagatggaagagtcacttgcagaattacactgttaacgccacaaaactaaccgtgaatctcaccaacgatcggtacctagctaccttaacagtgcgtaacctcgttggaaaaagtgatgccgcagtccttacaatacccgcttgtgatttccagggtaatctggctgagtccaagtgctatcttattaccgtgacccctgtgtacgcagacgggccagggtcacctgagtcaattaaagcctacctgaaacaggcacccccatctaagggtccaactgtcagaactaagaaagtgggaaagaacgaggccgttctggagtgggaccagctgcctgtcgatgtccaaaacgggtttatccgcaactatactatcttctacaggactattattgggaacgaaacagcagttaatgtggactcatcacacacagagtatactttaagtagcctgacaagcgacactctgtacatggtaagaatggccgcatacactgacgagggaggtaaggacggacccgagtttactttcaccacacctaagttcgcccaaggcgagatcgaggctattgtcgtaccagtgtgtctcgcttttcttttgacaacactgctgggggtgctcttttgctttaataagcgggatcttatcaagaagcacatttggcctaatgttcccgatccgagcaaatcccacatcgcccagtggtcccctcatacgccaccacggcataatttcaactccaaagatcagatgtatagcgacggaaacttcacagacgtcagtgtcgttgaaatcgaagctaacgacaagaagccatttcctgaggatttgaaatccttggacctgttcaagaaggagaagatcaacaccgagggacacagttctggcattgggggatcatcttgcatgagcagttcacggccatccataagcagttctgacgagaatgaaagtagccaaaacacttcttcaaccgtccaatattccactgtcgtacattccggttataggcatcaagtgccgtcagtgcaggtgttcagtcgcagcgaatctacccagccactattggactccgaagagcgcccagaggacctgcagctggtggatcacgtggacggcggtgacggtatcctgcccaggcagcagtattttaagcagaattgctcccagcacgagtcttcaccggatatcagccattttgagcgatccaagcaggtctcttctgtgaatgaagaggatttcgtaagactaaaacagcagatttctgatcacatcagccaaagttgcggctctggccagatgaaaatgttccaagaggtgagcgctgccgatgcgtttggacctgggacagaaggtcaggtggagagatttgagaccgtcggcatggaagccgctactgatgagggaatgccaaagtcatatctaccacagactgtgagacagggcggatatatgccccagtag

SEQ ID NO: 227262 - DNA, 2757 bp, synthetic construct
  misc_feature 1..2757: note = Description of Artificial Sequence: Synthetic coding sequence
  source 1..2757: mol_type = other DNA
atgctaacactgcagacctggctggtgcaggccctgttcattttcctgaccaccgagtcgacaggagaattgctggacccatgcggttatattagccccgagtcaccggtggtccagctgcactctaatttcacagcggtctgtgtgctgaaggagaagtgcatggactacttccacgtgaatgcgaactacatagtatggaaaaccaaccactttaccatccccaaagaacagtatacgataattaaccgtacggcttcctcggtgactttcacagatatcgccagtctgaacatccagctgacgtgtaacatcctgacctttggccagctggagcagaatgtgtacggcattactataattagcgggcttcctcctgaaaagcctaagaacctcagttgtattgtgaatgagggtaagaagatgcgctgtgagtgggacggagggcgagaaactcacctggaaactaacttcaccttgaagagcgagtgggctactcacaagttcgcggactgtaaggcaaagagggataccccaacctcatgcacagtagattactccaccgtatactttgtgaacatcgaagtgtgggttgaggcagaaaatgctctcggcaaggtcacaagcgatcacattaacttcgatccagtctataaggtgaagccgaatccacctcacaacctgtctgtgatcaacagcgaggagctctcctcaattctgaagcttacgtggaccaatcccagcattaaatccgtgatcattctgaagtataacattcagtatcgtactaaggatgcctcaacctggtcacaaatccccccagaagacaccgcttctactcggtcttcctttaccgtccaggatttgaaaccattcacagaatatgtgttccggatacgctgcatgaaagaggacggtaaaggatattggagcgactggagcgaggaagcctctggcatcacgtatgaggacagaccaagcaaagcgcctagtttctggtataaaatcgacccctcccatacccaaggttatcgcaccgtccagttggtctggaaaacactgcccccattcgaagctaacggtaagatccttgactacgaagtcacactcacacggtggaagagtcacctgcaaaactacactgtcaatgcgaccaaactaaccgtcaacctcaccaacgacaggtacctcgccacattgaccgtgaggaaccttgtgggtaagtccgatgccgctgtgctgacgatcccagcatgtgatttccaagcaacacaccccgtcatggatctcaaggctttcccgaaggacaacatgttatgggtggagtggacaaccccgagagagtctgtcaagaagtacatccttgagtggtgtgtgctgtctgataaggcaccctgcatcacagactggcagcaggaggacggaacagtacaccgcacttatctccgagggaacctggctgagagtaaatgttatctgatcacagtgacgccagtgtatgcggatggcccaggatcccccgagtctattaaagcctacctaaaacaggcaccacctagcaagggaccaacagtacgcactaaaaaggtgggcaaaaatgaagctgtcctggaatgggaccaactgccagtcgacgtgcagaatggatttatcagaaactatacaatcttctatagaacgattatcggaaacgagaccgctgtgaatgttgattcttcacacaccgagtatactctgtcttccctgacgagtgatacactatacatggtaagaatggctgcttataccgatgaaggagggaaagacggacctgaatttacgttcaccaccccaaagttcgcccagggcgagatcgaggccattgtggtgcctgtgtgtcttgcgttcctgttgactaccctgctgggcgtcctgttctgtttcaacaagagagatctaatcaaaaaacatatctggcccaatgtgcccgatccatctaagagtcatatagcgcaatggtctcctcatacgcctccaaggcacaatttcaatagtaaggatcagatgtattccgatggtaatttcactgatgttagtgttgtggaaattgaagctaacgataagaaaccgtttcccgaagatctgaaatcactcgacttatttaagaaagagaagataaacactgaaggccattcttccgggattgggggatcctcgtgtatgagcagttcgaggccatctattagttcaagtgacgagaatgaatcctcccagaatacctcaagcaccgtgcagtacagtaccgtagtccactctggttatcggcaccaggtgccaagtgtccaggtgttctcaagatcagaatccacccagccgctgctagacagcgaggagcgccctgaggatcttcaactcgttgatcatgttgacggtggggatggcatactgcctcggcagcaatacttcaagcagaactgttcccagcacgagtcttctccggacataagtcactttgaacgctccaaacaggtgagctcagttaacgaagaggatttcgtgcggttaaaacaacaaatttccgatcacattagccagagctgtggatcgggccagatgaagatgttccaggaagtctcagccgcagacgcattcgggccaggcaccgagggacaagtggagaggtttgagaccgtcggtatggaggcagcgaccgatgaaggcatgccaaaatcttatttgcctcagaccgtgcgacagggcggttacatgcctcaatag

SEQ ID NO: 227263 - DNA, 990 bp, synthetic construct
  misc_feature 1..990: note = Description of Artificial Sequence: Synthetic coding sequence
  source 1..990: mol_type = other DNA
atgctaactttacagacttggttagtgcaggccttgtttatttttctaacgaccgagagcaccggggagctactggatccttgcggctacatatcccctgaaagtcctgtcgtgcagctgcatagcaacttcactgctgtgtgtgtgctgaaggaaaagtgtatggactacttccacgtgaatgctaattatattgtgtggaagactaaccacttcacaattcctaaggagcagtacaccattatcaataggactgccagttcagtcaccttcacagacattgcctcccttaatattcagctgacctgcaacatcctgaccttcgggcagcttgaacaaaacgtctacggcattaccattatcagcggtttacccccagaaaaacccaagaacctaagctgcatcgtgaatgagggcaaaaagatgcgatgcgaatgggacggagggagagagacccaccttgaaaccaattttacattgaaatcagagtgggccactcataagtttgcagactgcaaagccaaacgggatacgcctacttcgtgcacagtcgactactctaccgtgtatttcgtgaacattgaggtgtgggtcgaggcagaaaacgcactgggaaaggtcaccagtgatcacatcaattttgatccagtctataaagtcaagcctaatccaccacataatttatctgtaatcaattcagaagagctcagtagtattttaaagttgacatggactaatccctctattaagtccgtgatcatcttaaaatacaatattcaatatcggacaaaggatgcctccacctggtcacaaataccccctgaggataccgcatccacaagatcttccttcactgtgcaagatctaaaaccctttaccgaatatgtgtttcggataaggtgtatgaaagaggatgggaaagggtactggtccgattggtctgaggaggcgagcggaatcacctacgaggacaacattgcatctttttag

SEQ ID NO: 227264 - DNA, 990 bp, synthetic construct
  misc_feature 1..990: note = Description of Artificial Sequence: Synthetic coding sequence
  source 1..990: mol_type = other DNA
atgttaaccttgcagacttggcttgttcaggctctgtttatatttctgaccactgagtctacaggtgagttactcgacccctgcggctacatttcacctgaatcccctgtggtccagctgcactctaactttactgccgtctgcgtgttaaaggaaaagtgtatggactattttcacgtcaacgccaattatattgtgtggaaaaccaatcattttaccattcccaaagaacagtacactattataaacaggactgccagtagcgttaccttcactgacatcgcctctctgaacatccaactgacctgcaacatccttaccttcggccaacttgagcagaatgtgtatggcattacgattatatccggcttgccacctgagaagccaaagaacctgtcctgtatcgtgaatgaggggaagaagatgcgatgcgaatgggatgggggaagggaaacccacctcgagacaaatttcacgttgaagagtgagtgggccacccacaaatttgccgactgtaaggctaaacgggacacaccaacaagctgcacagttgattactctacagtgtacttcgtcaatatcgaagtatgggtggaggctgaaaatgctctcgggaaagtcacttcagaccatatcaatttcgaccccgtgtacaaagtgaagcccaaccctcctcacaatctaagtgtaattaactcagaagaactgagttcaatcctgaagctaacatggacaaatccctctattaaaagcgttattatcctcaagtacaatatccagtaccggaccaaggatgccagtacctggagccaaataccccctgaagatacagccagtacacgctcatccttcaccgttcaggacctcaaaccatttacagaatacgttttcaggatcagatgcatgaaagaagatggcaaggggtactggagtgattggtccgaagaagcgtccggcataacttacgaggacaatattgctagcttctag

SEQ ID NO: 227265 - DNA, 990 bp, synthetic construct
  misc_feature 1..990: note = Description of Artificial Sequence: Synthetic coding sequence
  source 1..990: mol_type = other DNA
atgcttacactgcagacttggctagtgcaggccctcttcatctttttgaccacagagagcacaggcgagttgctggacccctgtgggtatataagtcctgagtcccctgtggttcaactacattctaacttcaccgccgtctgcgtcctcaaggaaaaatgcatggactactttcacgtgaacgccaactatattgtgtggaaaaccaatcactttaccatccctaaagagcagtacactattattaacaggaccgctagctcagtgacatttacagacattgctagcttgaacatccaactaacttgcaacatcctcaccttcggacagctggagcagaacgtttacggtattactataattagcggattgccacctgaaaagcctaagaatctgtcatgtatcgtcaatgaaggaaagaaaatgagatgcgagtgggatggcggacgcgaaacacatttggaaactaacttcacgctcaagtctgaatgggcaacacacaagtttgctgattgtaaggctaagcgggatacaccaacatcatgcaccgtggactactcaactgtgtatttcgtgaacattgaggtctgggtggaggcagaaaatgcattgggtaaagtcacgagtgaccacattaacttcgacccagtatacaaagtcaagcccaaccctccccacaatctctccgtgataaattctgaagagctgagctctatcctcaagctgacatggacaaacccgagtataaagtctgtcatcatcctgaaatacaacattcaatataggaccaaagatgcctcaacttggtcacagatcccgccagaagataccgcgtctaccagaagtagtttcacagtgcaagacttgaaaccatttactgagtatgtcttcaggatcagatgtatgaaggaggacggtaagggctattggtctgattggtccgaggaggcgagcggaatcacgtacgaggatactatcttcagcttttag

SEQ ID NO: 227266 - DNA, 1380 bp, synthetic construct
  misc_feature 1..1380: note = Description of Artificial Sequence: Synthetic coding sequence
  source 1..1380: mol_type = other DNA
atgaccatcttaggcaccaccttcgggatggttttcagcttgctgcaggtcgtcagtggagagagcggctacgctcaaaacggtgatctggaggatgccgagttggacgactatagtttcagttgctatagccagctggaggtcaatggctcgcagcacagtctgacttgcgctttcgaagacccagatgtgaatatcactaatctggagtttgaaatctgcggcgctctcgtggaagtcaagtgcctgaactttcggaagttacaggaaatttatttcattgagaccaagaaatttttgcttattggcaagtctaacatatgtgtgaaggtgggtgagaaatcacttacgtgtaagaaaatagatttaactacaattgtgaaacctgaagcaccatttgatctgagcgtagtttaccgtgagggagcaaacgacttcgtagtaacctttaatacctcacacctccagaagaaatacgttaaagtcttgatgcacgatgtagcctatcgccaggagaaggacgagaacaagtggacccatgtgaacttgagctcaacaaaactgactttgctacagagaaagctccaacctgccgctatgtacgaaattaaggtcagaagcattcccgaccattatttcaaggggttctggagtgagtggtccccctcctactattttagaacgcctgagattaacaacagctcaggtgagatggaccctattctcttaaccatctcaatcttatctttcttctctgtggccctgctcgtgatcctggcttgtgtgttgtggaaaaagagaattaaacccatcgtgtggccaagcctgcctgatcataaaaaaacactcgagcatctgtgtaaaaagccgaggaagaatttgaacgtgagtttcaaccccgagagcttcctcgattgccagattcaccgtgttgacgatatacaagctcgtgacgaagtagagggcttccttcaggatacctttccacagcagttggaggaaagcgaaaagcagaggctgggaggggatgtgcaatcaccgaactgccctagcgaagatgtcgtgattacccccgagagctttggacgggatagctctctcacttgtttagcaggcaacgtttctgcctgtgatgccccaatcctgtcctcttcccgctctctcgattgccgagaaagcggcaagaacgggccacatgtgtatcaggatttgcttctgagcctagggactacaaactcaaccctgccccctccattctcactgcagagcgggatcctcacactgaacccagtcgcacagggccagcctattctgacaagtcttggatcgaaccaggaggaggcctatgtgacgatgagttctttctaccagaaccagtag

SEQ ID NO: 227267 - DNA, 789 bp, synthetic construct
  misc_feature 1..789: note = Description of Artificial Sequence: Synthetic coding sequence
  source 1..789: mol_type = other DNA
atgaccatattgggcacaactttcgggatggtgtttagccttctacaggttgtttctggtgagtcaggctacgcccaaaacggcgatttagaggacgcggaactcgatgactactctttcagctgctactcccagctggaagtcaatggcagccagcacagtctgacgtgcgcctttgaggaccccgatgtgaatataacgaacctcgagtttgagatctgtggtgcgcttgtagaggtgaagtgccttaactttagaaagctgcaagagatctactttatcgaaacaaaaaagttcctcctcatcggaaagagtaacatctgtgtgaaagtgggggagaagagtcttacctgcaagaagatagatctgaccaccatagtgaaacctgaggcgcctttcgacctgtccgtggtgtatcgggaaggagctaatgactttgtggtgacctttaatacgagccaccttcaaaaaaaatatgtcaaggtcttgatgcatgatgtggcataccgtcaggagaaggatgagaacaaatggacccatgtgaacctttcttcaacaaaacttacacttcttcaacggaagcttcaacctgccgcaatgtatgagattaaggtgaggtccatcccagatcactacttcaaggggttttggtcagagtggagcccctcatactacttccggacccctgagattaacaacagcagcgggttgagtctgtcttacggcccagtgagcccaattattagaaggctgtggaacattttcgtccggaaccaggagaagatttag

SEQ ID NO: 227268 - DNA, 786 bp, synthetic construct
  misc_feature 1..786: note = Description of Artificial Sequence: Synthetic coding sequence
  source 1..786: mol_type = other DNA
atgactattctgggaactacctttggtatggttttttctctcctgcaggtggtgagtggcgagtcaggttatgcccaaaatggagatctagaggatgcagagctggacgattatagcttctcttgctactctcagttggaggtcaatggaagtcaacacagcctaacttgcgcgtttgaggatcctgatgtgaacatcaccaacctcgagttcgaaatttgcggtgcgttagtggaagtgaagtgtctcaactttcgcaaactccaggagatctactttattgagaccaaaaaatttctgctaattggcaaatcaaatatatgcgtgaaagtgggagaaaagtcattaacatgtaaaaagattgatttaaccacaatcgtgaaaccggaagccccttttgacctctctgttgtataccgggaaggcgctaacgacttcgtggtgacctttaacacaagccacctgcaaaagaaatatgtgaaagtgcttatgcacgatgtcgcctaccggcaggagaaggatgagaataagtggacccatgtgaatctcagctctaccaaacttacgctgttgcagcgaaaactccagccagccgctatgtacgaaattaaggtgcggtctatacccgaccactacttcaaagggttctggtcagagtggtccccaagttattacttcagaacccccgagatcaataattcctcgggtctgtcactgagctatggccctgtctctcccatcatcaggcggctgtggaatatttttgttaggaaccaagagaaatag

SEQ ID NO: 227269 - DNA, 180 bp, synthetic construct
  misc_feature 1..180: note = Description of Artificial Sequence: Synthetic coding sequence
  source 1..180: mol_type = other DNA
atgacaatcctgggaactacctttggaatggttttctctctgctgcaggttgtcagtggggagagcggatatgcacaaaatggtgacctggaagatgccgagctggacgactactccttttcctgctattcacagttggaagtgaacggtagccaacactccctcacgtgtgcgttctag

SEQ ID NO: 227270 - DNA, 159 bp, synthetic construct
  misc_feature 1..159: note = Description of Artificial Sequence: Synthetic coding sequence
  source 1..159: mol_type = other DNA
atgacaattctcgggaccacctttggaatggtgttttcactgctccaggtggtgagcggcgaatcgggttacgcccaaaacggtgacttggaagatgctgagctcgacgactactccttttcatgttactcacaactggaggtcaacgggtcacagtag

SEQ ID NO: 227271 - DNA, 1566 bp, synthetic construct
  misc_feature 1..1566: note = Description of Artificial Sequence: Synthetic coding sequence
  source 1..1566: mol_type = other DNA
atgggtcttggacggtgcatctgggaggggtggactctggagtcagaagcacttcgaagagacatgggtacctggctgctagcctgtatttgtatctgcacttgcgtgtgtttaggcgttagcgttaccggcgaaggacagggtcctcgaagccgcacattcacttgccttaccaacaatattcttcgcatcgactgtcactggtcagcgcctgagttagggcaagggtcctctccttggctgttgtttacttcgaaccaggctcccggtggcactcacaaatgtattttaagaggaagtgaatgcaccgttgtcctccctcctgaagcagttctggtgcctagtgacaattttaccattacgttccaccactgcatgtccggccgagaacaagtctcgctggttgacccggagtacctgcccaggcgccatgtcaagcttgatccccctagtgatctgcaatccaacatctcatccggacactgtatcctgacatggtcgatctcacctgccctggaaccaatgacaactctactgtcttacgaattagcatttaagaagcaggaagaggcttgggagcaggcccagcatcgggatcacatagtgggtgtgacatggctaatcctcgaggccttcgagctggaccccggtttcattcatgaggcaaggctgcgagtgcaaatggccacactggaagatgacgttgtcgaggaggagcgttacactgggcagtggtcggaatggtcacaacccgtttgtttccaggcgcctcaacgacagggcccattgataccaccttggggctggccgggaaataccctggtggccgtgtctatttttcttctcttgacgggcccaacatatttgctcttcaagttatccccaagggtgaaacggatcttttatcagaatgtgccttcacccgctatgtttttccaacccctgtactccgtacataatggcaattttcaaacgtggatgggcgctcatggagcaggcgtcctgctgtcacaggattgtgccggtacaccccaaggtgcccttgagccgtgcgtgcaggaggccaccgcgcttctcacttgcggaccggcaaggccctggaaaagcgtcgctctggaagaagagcaagagggacctggcacacggcttcccggtaatctttccagtgaagacgttctgcctgcagggtgcactgaatggcgggtgcaaacactggcctacctgcctcaggaggactgggcccctacttctctcactagacccgcaccgcctgactctgaggggagccgttctagctctagcagctcttcatccaacaataataactattgcgctctcggctgctacgggggttggcacctaagtgccctgccagggaacacacagagttctggaccgattcctgcccttgcctgcgggctctcttgcgaccaccagggactggagacacagcagggcgtggcctgggttctggctgggcactgtcagagacctggcttacacgaggacttgcaaggcatgcttcttccgagcgtgctgagcaaagcacggagttggactttctag

SEQ ID NO: 227272 - DNA, 1029 bp, synthetic construct
  misc_feature 1..1029: note = Description of Artificial Sequence: Synthetic coding sequence
  source 1..1029: mol_type = other DNA
atgccacagacttgcgatggcaccggccagatgcacctcggtagcaactgttgcaagaacgggcaaaccctgctgcagcggacctgtcacggggtgagttgctgtggctggtggtttcaggcagcacggagtatattagggaaggggccatcagctcagtccctcgcgggatggactctggagtccgaagctctccgccgtgacatggggacctggcttctggcctgcatttgcatttgcacatgtgtgtgtctgggagttagcgtcactggcgagggacaaggaccacggagtagaacatttacatgtctgactaacaatattctgaggattgactgccattggtccgccccagagttaggccagggatcctcgccgtggcttttgttcactagactcctcgccgctcacattagcgcaagttgtggtgctgtgagtgctccgagctgttgccacctaaggcagtgcagctgccaccttacaatctcaccttctttatctacaacagcatgtttaggcggaagccgcagtgcgtggtggacaaggtcaacatgtcctggcgatacctctaacatcagcagtggacactgtattctgacctggagtatatctccagcactcgaaccaatgacaacactcctctcttacgagctcgcctttaagaaacaggaagaggcttgggagcaagcccagcacagagatcacatagttggcgttacttggttaatcttagaagcttttgagttggatccaggtttcatccatgaggctcgcctcagagtgcaaatggcgaccctcgaagacgacgtggttgaagaggaacgctatactggacagtggtctgagtggtcccagcccgtctgctttcaggctcctcagagacagggacctctgatccctccttggggttggcctggcaacacgttggtcgcggtgtcaatctttttgctgctgaccggtcctacatacctattgttcaagctttcaccgagacttggctggggcccaacagggccagtgtgctgctag

SEQ ID NO: 227273 - DNA, 1503 bp, synthetic construct
  misc_feature 1..1503: note = Description of Artificial Sequence: Synthetic coding sequence
  source 1..1503: mol_type = other DNA
atgggtacctggctcctggcttgtatatgcatctgcacatgtgtgtgtctgggggtgtccgtcaccggtgaaggacaaggcccaaggagccggactttcacatgccttaccaataatattcttagaatagattgtcactggagtgctcctgaactgggccaggggagctctccctggctgttgttcaccagcaaccaggcacccggtgggactcacaagtgtatcttgcggggttctgaatgtacagtggtactgcccccagaggccgtgctcgtgccctctgataactttacaatcacgttccatcactgtatgtccggcagagagcaggtgagtctcgtggatcctgagtatctccctaggcgacacgtgaaactggaccctcccagcgacttacagtccaacattagcagtgggcattgcattctgacgtggagcatcagcccagcattagaaccaatgacaacccttttgtcttacgagctggcttttaagaagcaagaggaggcatgggaacaagctcagcaccgtgatcatattgtgggggtaacatggcttatccttgaagcctttgagttggatcccggtttcatccatgaagcaagactcagggtgcagatggcaaccctggaggacgatgtggtggaagaagaaaggtataccgggcagtggtcggagtggagccagccggtgtgtttccaagctccgcagcggcagggccctctgattcctccctggggttggcccggaaacacattggtcgcagtatctatatttctgttgctgactggacctacgtatcttctgttcaaattgagcccaagggtgaagagaatcttctaccagaatgtacctagccctgctatgttttttcagcctctgtactccgtccacaacggcaatttccagacttggatgggcgctcacggggctggggtgctgctttcccaagattgtgccggtacacctcagggggctctggaaccctgtgttcaggaggctaccgcccttctgacctgcgggccagctcgtccttggaagagcgttgcgctggaagaagagcaggaaggtcccggaaccagactaccaggaaacctgtcctctgaggatgtgctgcctgccggttgtacagagtggagagtgcagacgctcgcctatctacctcaggaggactgggcaccaaccagtctaaccaggcccgcacccccagactccgaaggatccagaagtagcagcagcagttccagcagtaataacaacaattactgtgcactaggttgctatggcggatggcacctgtcagcgctgccgggtaatactcagtcctcaggacccatacccgctcttgcttgcgggctgtcctgcgatcatcaaggattagaaacccagcagggcgtggcatgggtcttagccggacattgtcagaggcccggtctccacgaggatttacagggcatgctcctgcctagcgtcctgtccaaggccagaagctggaccttttag

SEQ ID NO: 227274 - DNA, 990 bp, synthetic construct
  misc_feature 1..990: note = Description of Artificial Sequence: Synthetic coding sequence
  source 1..990: mol_type = other DNA
atgggcacctggctcctcgcatgtatatgcatttgtacatgcgtgtgcctgggggtatccgttaccggcgagggacagggccctcggagccgaacctttacctgcctgaccaacaacattctgagaattgactgccactggtccgccccagaactggggcaaggatcatcaccttggctcctgtttacaagcaatcaggcgccaggtggaacacacaaatgtatactaagaggaagcgagtgtacggtggtgctccccccagaggctgtgctggtcccatccgataattttacaatcacatttcaccattgcatgagtggcagagagcaggtgtctttagtggatccggagtacttgcctcgtagacacgtgaagctggaccccccaagtgatctacaatcaaacatctcttccggccattgtatactgacctggtctatcagtcccgctctggaacctatgacaactttgctgagttacgagcttgcatttaaaaagcaggaggaagcctgggaacaagcgcagcaccgcgatcacatcgtgggtgtgacctggctgatcctggaagcattcgaactcgatcctggattcatccatgaagctagattgagggtgcagatggccacactcgaggacgacgtggtcgaagaggagcgatatactggacaatggtctgagtggagtcaacctgtgtgctttcaggcgcctcagcgtcaaggtccacttattcctccttggggatggccagggaatactttagtggcagtgagcattttcctgctgctgactggacccacctacctgctgttcaagcttagtccccgtgtgaaaagaatattttaccagaatgttccatcccccgctatgttcttccaacctctgtacagcgttcacaacggaaatttccaggtgtgcgccgagactaccgaaggccacggcggtcaaggcctgcccagggcgctagcgtgcccacggtgttggctgtcatag

SEQ ID NO: 227275 - DNA, 999 bp, synthetic construct
  misc_feature 1..999: note = Description of Artificial Sequence: Synthetic coding sequence
  source 1..999: mol_type = other DNA
atgcatctgggctcaaactgttgcaaaaatggacaaaccctgctacagcgcacctgtcatggggtcagttgctgcggttggtggtttcaagcggcacgttcaattctgggtaaaggcccttccgctcagtctctagcgggatggaccttagagagcgaggctcttcggcgagatatgggaacctggctgctcgcatgcatctgcatttgtacttgtgtgtgcctgggggttagtgtcacaggtgaggggcagggacctaggtcgcgcacatttacctgcctgaccaataatatcctacgcatcgattgtcattggtccgcacctgaactaggccaaggctccagtccttggctcctgtttacacgcctgctagcagctcacatctctgcgtcctgtggtgcagtgtcagccccatcatgctgtcatcttcgacagtgttcctgtcacctgacaatatctccaagcctatccactactgcctgtctgggaggcagccggtccgcttggtggactcggtcgacctgtccaggggatacatcaaacatctccagcggccactgcatcctgacatggagcatcagtccagctctggagcctatgacgacacttctgagttatgagctggctttcaagaagcaggaggaggcatgggaacaagcccagcatcgagatcatatagtcggcgtgacatggctgatactagaggccttcgaactggatccagggttcattcatgaagcccgtctgagagtgcagatggctacactagaggacgacgtggtcgaggaagagcgctataccggccaatggtctgaatggtctcagccagtctgctttcaagcccctcagagacagggaccactgatcccaccttggggctggcccggtaatacactagttgcggtctccatattcctgctactaaccggacctacttatcttctcttcaagctgtcacctcggttaggctggggacccactggccctgtctgttgctag

SEQ ID NO: 227276 - DNA, 1878 bp, synthetic construct
  misc_feature 1..1878: note = Description of Artificial Sequence: Synthetic coding sequence
  source 1..1878: mol_type = other DNA
atggcttgttacatctatcagttgccttcttgggtactagacgatttgtgtcgcaacatggatgccctgtccgaatgggactggatggagtttgcgtcctacgtaatcaccgacctcacacagctcaggaagattaagtcgatggagagggtgcagggcgtgtccattacacgtgagttgctatggtggtggggaatgcggcaggcgacagtgcaacagctggtcgatttactatgtaggctggagttataccgggctgcccagatcattcttaactggaagcccgctccggagatccggtgccctatccctgcattccccgactcggtcaaacctgagaaacccctggcggcatcagtccgcaaggctgaagacgagcaggaagaaggtcagcctgtcaggatggccacattccccggacccggatcttcacccgcacgcgctcatcagcccgctttcctgcagcctcctgaagaggacgccccacactcactaaggtcagatcttccaacgtcatcggattccaaggatttctccaccagcatcccaaaacaggagaagctgttgtccttagctggcgactccttgttctggtcagaagcggatgtggtccaagccactgatgactttaaccagaaccggaagatttctcagggcacctttgccgatgtctacagaggccatagacacggcaaaccgttcgtcttcaagaagctgagggagaccgcctgctctagcccgggttccatcgagcggttcttccaggcagagttacaaatttgcctccgctgttgccatccaaatgtcctccctgtgctgggcttttgtgccgcaagacaatttcacagcttcatttacccctacatggcaaacgggtcactgcaagatcgcctgcaagggcagggtggctcagaccccctgccttggccccaacgcgtgagcatttgttcagggctgctgtgtgccgtcgagtacttgcatgggctggagatcattcacagcaacgtaaagtctagcaatgtgctgctggaccagaatctaacaccaaaactggcccaccctatggcccacctttgcccagtcaacaagaggtcaaagtataccatgatgaagacccatcttctgcggacaagcgcggcatatctgcccgaagactttattcgcgtgggtcagctgacaaaaagggtcgatatcttcagctgtggcatagtgctagccgaggtgttgaccggaattcccgcaatggataacaaccggagtcccgtttacctgaaagaccttctgctgagcgatatacccagttctacagcatcattatgtagtcgcaagacaggtgtggagaacgtgatggctaaggaaatctgccagaagtatcttgagaagggcgctggccgtctgcccgaggactgcgccgaagcacttgctactgcggcttgcctgtgcctaagaaggagaaatactagtttgcaggaagtgtgcggtagcgttgccgcagtcgaggaacggttaaggggcagggagactctcctaccatggagcggactctccgagggcacgggttcatctagtaacacacctgaagagaccgatgatgtagacaattcctccctggacgcctcgtcaagtatgagcgttgcgccttgggctggcgctgctacccccctgctgcccacagagaacggagaagggagactgagagtgatcgtaggaagggaagcggattccagtagcgaagcctgcgttggcttggaaccaccgcaagacgtgacagaaacttcatggcagatcgaaattaatgaagccaaaaggaagttaatggaaaatattcttttgtacaaagaagaaaaagttgattctatagagctcttcggcccatag

SEQ ID NO: 227277 - DNA, 1791 bp, synthetic construct
  misc_feature 1..1791: note = Description of Artificial Sequence: Synthetic coding sequence
  source 1..1791: mol_type = other DNA
atggccggaaactgcggggctcggggagccctgagcgcccatactctactattcgacctgcctccagccctactgggggagctgtgtgccgtgctggactcatgcgacggcgcattgggctggaggggcctggctgaacgcctgagcagctcctggcttgatgtccgccacattgagaagtatgtcgatcagggcaaatccggcacccgggagttattatggtcctgggctcagaagaacaaaacgatcggagacctcctccaagtgctgcaggagatggggcataggcgtgccattcatctgattaccaactacggcgcagtgctgtctcccagtgagaagagctatcaggagggtggctttccgaatattctcttcaaggagactgcaaatgttaccgtggataacgttctgattcctgagcacaacgaaaaaggcattctgctgaagagctcaatctcatttcaaaacatcattgagggtacccgcaattttcacaaggacttcctcatcggcgagggcgagatattcgaggtttaccgggtcgagatccagaacctgacttatgccgtgaaacttttcaagcaggagaagaagatgcaatgcaaaaaacactggaagcgttttctaagcgaactggaggtcctcctgctcttccaccatcctaacatactcgagctcgccgcttacttcaccgaaactgagaaattctgtctgatatacccttatatgcgcaatgggacactgtttgaccggctccagtgtgtcggagatacagcccctctgccctggcacatcaggattgggatactcattggaatttcaaaagccatacactatttacataacgtccaaccctgttccgtcatctgtggcagcatcagtagtgctaatatccttctggacgaccagttccagcccaaactgactgattttgccatggctcacttccgctctcatctggagcaccaatcatgcacgatcaacatgacttcctccagctccaagcacttgtggtacatgccggaggagtacatcagacagggtaaattgtctattaagacggatgtgtactctttcggaatcgtgattatggaggtcttaactggatgcagagttgtccttgatgatcctaagcacatccagctacgtgatttgctgagagagctaatggaaaagcgaggtttggacagctgcctctcctttctggacaagaaagtgcctccttgccccagaaacttctctgccaagctcttctgtctggccggtaggtgcgcggctactagagccaagctgaggcccagcatggacgaggtcctgaacactctcgagtcgacacaagcctctttatacttcgccgaagacccacctaccagcctaaagagttttcggtgtcccagtcccctgtttctcgagaacgtgccctctatcccagtcgaggacgatgagtcgcaaaacaacaacttactaccatccgacgaggggctgagaatcgaccgtatgacgcagaaaacgccctttgagtgttcccagtctgaagtgatgtttctatctctcgataagaagcccgagagcaagcgtaacgaagaagcatgtaacatgccctcttcatcatgcgaagagtcttggtttcccaaatacatcgtgccctcccaggatttgcggccttacaaggtgaatatcgatccgagcagcgaggctcctggtcacagttgccggagccgccctgtcgagagcagctgctcaagtaaatttagctgggatgagtatgagcagtacaaaaaggaatag

SEQ ID NO: 227278 - DNA, 1608 bp, synthetic construct
  misc_feature 1..1608: note = Description of Artificial Sequence: Synthetic coding sequence
  source 1..1608: mol_type = other DNA
atggccggtaattgcggggctcgaggggctttgagcgcgcatacactcctgtttgacctcccccctgcactcctgggagagctgtgcgccgttctggactcctgtgacggcgctctgggttggcgcggtctgggcgctgtgctgtcacccagtgaaaagtcctaccaagaggggggatttcctaacatcctgtttaaagaaaccgcgaatgtgactgttgataatgtgctgatcccggaacataatgagaagggaatccttctcaagagctccatctcattccagaacattatcgaagggactaggaacttccacaaagacttcctgattggtgagggcgagatatttgaagtgtaccgcgtcgaaattcagaacctaacttacgcagtaaaactttttaagcaagagaagaaaatgcagtgcaagaagcactggaagaggttcctctccgagttggaggttctgttgctgttccaccaccccaatatattagaactggcggcatattttacggagaccgaaaagttctgtctgatatatccctatatgagaaacgggactctgttcgatcgtctgcagtgcgtcggcgataccgctcccttgccctggcatatccgcattggtatcctgataggaatctctaaggccatacattacttacacaatgtgcagccttgctcagttatttgtggctccattagcagcgccaacatcctgctggacgatcagtttcagcctaaactgactgactttgcgatggcccattttagatctcacctggagcaccagtcctgtacgattaatatgactagtagctccagtaagcatctgtggtatatgcccgaggagtacatccgccagggcaaactgagcatcaaaacagacgtatatagcttcggaattgtcattatggaagtgctcacgggctgtagggtagtgctggacgacccaaaacacatccagctgagagatttattgagagagctgatggagaagcggggtctagattcgtgcttgagtttcttggacaagaaggtccccccatgcccacggaatttctcagcaaaactgttctgtcttgcaggccgatgcgctgccacacgggcaaagttgcggccttctatggacgaagttctcaacaccctcgagtccacacaggcaagcctgtatttcgcggaagatccaccaaccagcctgaagtctttccgctgtccctcccccctcttcctggagaacgtgcccagcatcccagtggaagacgacgagtcacagaacaacaacctattacctagcgacgaaggcctgcgaatcgatcgtatgactcaaaaaactccctttgagtgttctcagtctgaggttatgtttctctcactggacaaaaagccagagtctaagcgtaatgaggaagcctgtaatatgccctctagctcctgtgaggagagttggtttcccaagtacatcgtgccctcccaggacctgcgcccttacaaggtgaacatcgatccatcctcggaagcgcctggccacagttgtcgatcacgcccagtggaaagctcttgctcttctaaattcagctgggatgagtatgagcagtacaagaaagagtag

SEQ ID NO: 227279 - DNA, 657 bp, synthetic construct
  misc_feature 1..657: note = Description of Artificial Sequence: Synthetic coding sequence
  source 1..657: mol_type = other DNA
atgaacaaacccattaccccaagcacctacgtgaggtgcctgaacgtgggactcatccgcaagctgtctgatttcatcgatccacaggaagggtggaaaaaattggctgtagctattaagaaacccagcggcgatgaccgctataatcagttccacatcagacgatttgaggccttgttacagacaggaaagagccctacctctgagctgctgtttgattgggggaccaccaattgtacggtgggggacctcgtggatctgctgattcagaatgagttcttcgctccagcaagtctgttgctgccagatgcagtcccaaagactgccaatactctgccgagtaaagaagccattacggtacagcagaagcaaatgcctttttgcgacaaggaccgcactctgatgacaccggtacaaaacctggaacaatcctatatgccccctgattccagttcccccgagaacaaaagcttggaagtgtccgatacaagatttcacagcttcagtttttacgaactaaagaatgtcacgaataactttgatgagagacccatctcagttggaggaaacaaaatgggcgagggaggcttcggagttgtatataagggctatgtcaataacaactgtgggtccgaggaggcatgctccaacggatag

SEQ ID NO: 227280 - DNA, 1011 bp, synthetic construct
  misc_feature 1..1011: note = Description of Artificial Sequence: Synthetic coding sequence
  source 1..1011: mol_type = other DNA
atgcccttttgtgacaaagatcgaacccttatgactccagtgcagaacctggagcaaagctatatgcctcctgacagtagtagccccgagaataagtccctggaagtaagcgatacccgctttcactcgttttctttctacgagctcaagaacgtcacaaataactttgatgagcgacccatttccgttggcggaaacaaaatgggagaagggggttttggcgtggtatacaagggctatgttaacaacacgaccgtggcggtaaagaagttggcggctatggttgacattacaacagaagagttgaagcagcagttcgatcaggaaatcaaagtgatggccaagtgccagcacgagaatcttgtggagctgttgggtttttcctcagatggggatgacctgtgcctcgtgtatgtatatatgcccaacggaagcctgttggaccggctgtcctgcctggatgggacccctcccctctcctggcatatgagatgcaaaatcgcgcagggagctgcaaatggcattaacttcctgcacgagaaccaccatatccaccgggacattaaatctgcgaatatcttgttggacgaggcattcacggccaaaattagcgattttggattggccagagctagcgaaaaatttgcccaaacagttatgacaagccggattgtgggaacgactgcctacatggcccctgaggcattgcggggagagattacccccaagagcgatatatattcgtttggcgttgtcctgctggaaattatcacggggctccccgctgtggatgagcaccgagagccacagctgctattggacattaaggaggagatcgaagacgaggagaagactattgaggattatattgacaagaagatgaacgatgcagatagtactagcgttgaggctatgtattccgtggctagccagtgtctacacgaaaagaagaataaacgcccagatattaagaaggtccagcagctcctccaggagatgactgcttcttag

SEQ ID NO: 227281 - DNA, 1011 bp, synthetic construct
  misc_feature 1..1011: note = Description of Artificial Sequence: Synthetic coding sequence
  source 1..1011: mol_type = other DNA
atgcctttctgcgacaaggatcgaacactgatgacgccggtgcaaaacttagaacagtcctatatgccgcctgactcctctagccccgagaataaatctctggaagtgtcggatacgagattccacagcttttcattctatgaattgaagaacgtcacaaacaactttgatgaacgacccatcagcgtaggcggaaataagatgggcgaggggggttttggcgttgtgtacaagggctatgtgaacaacaccacagtcgctgtgaaaaagctggctgcaatggtggatataacaacagaggaactgaagcagcaatttgaccaggagattaaggtgatggcaaagtgtcagcatgaaaatctggttgaacttctggggttctcctcggacggagacgatctctgtctggtgtatgtctacatgccaaacggatccctactagataggctcagttgcctggatggtacgccaccactctcttggcatatgcgctgtaagattgcacagggggcagcgaatgggattaactttctgcatgagaaccatcatatccaccgcgatattaaatctgctaacattcttctcgacgaagccttcacggctaagattagtgattttggactcgctcgcgcatccgaaaagttcgcccaaactgtaatgacatcccgcatcgtaggtaccaccgcttatatggcacccgaagcactgcgaggggagatcacaccaaagtcggacatatactcttttggcgttgtgttactggagatcatcacaggactgccagccgtcgatgaacatagggaaccacagctgctgttagatattaaggaggagatcgaagacgaagaaaaaaccatagaggactatatcgataagaagatgaacgacgctgattctacgagtgtggaggcaatgtatagtgtggctagccagtgtttacatgaaaaaaagaacaagaggccagatatcaagaaggtacaacagttgctccaggaaatgaccgccagctag

SEQ ID NO: 227282 - DNA, 1383 bp, synthetic construct
  misc_feature 1..1383: note = Description of Artificial Sequence: Synthetic coding sequence
  source 1..1383: mol_type = other DNA
atgaataaacctatcaccccctctacatacgtgcgttgccttaatgtcggcctgatcaggaagctttccgactttattgacccgcaggagggctggaagaagctggcggtagctattaaaaaaccatcaggtgatgaccggtataaccagtttcacatccggaggtttgaggctctcttgcagactggcaaatccccaaccagcgagctcctgttcgactgggggaccaccaattgcactgttggtgacctggttgacctactgattcaaaatgaattcttcgctcctgcctctctcctcttacccgacgcagtgccaaagactgctaacactctgccctccaaagaggctatcaccgtccaacaaaagcagatgccattctgcgataaagaccggacattgatgaccccagtgcaaaatctggagcagtcgtatatgcctcctgacagttcctctcccgaaaataagagcctcgaagtgtcagatacccgttttcattccttctccttctatgagttgaagaatgtaactaacaactttgatgaaaggcctatatcggtaggtgggaacaaaatgggggaagggggatttggagtggtctacaaaggctatgttaataatacgacagtcgcagtcaagaaattagccgcaatggtcgatatcacgactgaagaacttaagcagcagttcgatcaagaaataaaggtcatggctaagtgccagcacgagaatcttgtagagttgctcggcttttcaagtgatggtgacgatctatgccttgtgtatgtctacatgcccaacggatctctactggatcgcctgagctgcctggatggaacacccccactgagttggcacatgcggtgtaagattgcccagggagccgctaatggaattaattttctccacgagaatcaccacatccatcgtgacattaagagtgcgaacatccttctggacgaggcgtttacagcaaagatcagcgacttcggcttggcaagagcctccgagaagttcgcccagacagttatgacctcccgcattgtaggtacgactgcttatatggcacccgaggcactccgaggagaaattactccaaaatcggacatatacagcttcggtgttgtgctgctcgagattataaccggcctcccggctgtagatgaacacagggagccgcagctgcttctggatataaaagaggaaatcgaggacgaagagaaaaccatcgaagactacatcgataagaagatgaacgatgccgattctactagcgttgaagctatgtattccgtagccagccagtgtctgcatgaaaagaagaacaaaaggcccgacattaagaaggtccagcagctgttacaggagatgaccgcctcatag

SEQ ID NO: 227283 - DNA, 270 bp, synthetic construct
  misc_feature 1..270: note = Description of Artificial Sequence: Synthetic coding sequence
  source 1..270: mol_type = other DNA
atgaacaagcccatcacacctagcacttacgtgaggtgtctgaatgtcgggctgattcgcaaattatccgacttcatcgaccctcaggaaggttggaagaagctggccgtggccattaagaagccaagcggcgatgataggtacaatcaattccacatacggcgatttgaggctcttttgcagaccgggaagagtccaacgtccgagttgctgtttgactggggtacaaccaattgcaccgtaggtgatctggtggatctccttatttag

SEQ ID NO: 227284 - DNA, 1383 bp, synthetic construct
  misc_feature 1..1383: note = Description of Artificial Sequence: Synthetic coding sequence
  source 1..1383: mol_type = other DNA
atgaataagccaattaccccttctacttatgtgagatgtctgaacgtcgggctcatcaggaagctgtcagacttcattgatccgcaggagggctggaaaaagttggccgtggccatcaagaagccaagcggggacgaccgctacaatcagttccatatccggcgttttgaggcactcctgcagacaggtaagagtcctacttccgaactattattcgattggggcaccactaactgcacagtgggtgaccttgtggaccttctgattcaaaatgagttttttgcccctgctagcctcctgctacccgacgccgtgcctaagactgccaatacactgcccagcaaggaagcaatcactgttcagcagaagcagatgccattctgcgataaagacagaacgcttatgacacccgtacagaatctggagcagagctacatgccacctgacagttcctctcccgagaacaagagtctggaagtgtctgacactcgctttcactcattttccttctatgagctgaagaacgtcaccaacaattttgatgaaaggccgatcagcgtcgggggtaataagatgggtgaaggaggtttcggagttgtctacaaaggatacgtaaataatactaccgtggctgttaagaagctggcggcaatggtcgatattaccaccgaagaactgaagcaacagtttgaccaagaaattaaagtgatggctaagtgtcagcatgaaaacttggtggagctgctgggattctcttccgacggtgatgatttgtgtctggtgtatgtctatatgcctaatggttctcttcttgaccggttgtcttgtctagacggaacccctccgctctcctggcatatgagatgtaaaattgcacagggagccgcaaacggcatcaacttcctgcacgagaatcaccatatccatcgcgacatcaaatcagccaacatcctgctggatgaggcatttacagcgaaaatttccgacttcggacttgcgcgtgcctctgagaaattcgcccagaccgtgatgaccagcagaatcgtggggactacagcgtatatggcacctgaggcgctgcggggagaaatcacccctaaatccgatatttattcatttggagtggtactgctcgagatcatcactggactgccagccgttgacgagcatcgggaaccgcaactcctgctcgacattaaagaggaaattgaagacgaagagaagaccatcgaggactacatcgacaaaaagatgaatgacgccgactctacaagcgtggaggccatgtacagcgtcgcttcccagtgcctgcacgagaagaagaataaacgccctgacataaagaaggtccagcagctgctgcaagaaatgacagcgtcgtag

SEQ ID NO: 227285 - DNA, 2394 bp, synthetic construct
  misc_feature 1..2394: note = Description of Artificial Sequence: Synthetic coding sequence
  source 1..2394: mol_type = other DNA
atgtaccttgagacacgcagggctatcttcgttttctggattttccttcaagtgcaagggaccaaggacatctctataaatatatatcacagcgagacgaaggatatcgataacccgcctcgcaatgaaactactgagtcaacagagaaaatgtacaaaatgtccactatgaggaggatatttgacctggctaagcaccgcactaagcgcagtgcattctttcccaccggggtgaaggtttgcccgcaggaaagcatgaagcagatcctggattccctgcaagcatattacagacttcgggtgtgtcaggaggctgtatgggaagcttaccgcatcttcctggacaggattcccgatacgggcgaatatcaggactgggtaagcatctgccagcaggaaacattctgcctgttcgacatcgggaaaaactttagcaacagccaggagcacctcgacttgttgcagcaacggattaagcagcggtcctttccggacagaaaagatgagattagtgccgagaagaccctgggggaaccaggagaaacaatcgtaatctccacagatgtcgccaatgtgagtctggggccatttccgttgactcctgacgataccctgctgaatgagattctggataacaccttgaacgacactaagatgccaactaccgagcgtgaaaccgagtttgcggttctggaggagcagcgtgttgagctgtccgtatcgttagtgaaccagaagttcaaggccgaattggccgattctcagagcccatactatcaggaactggccggaaagtcccagctccagatgcagaagatctttaagaagttgcccggttttaaaaaaatccacgtgctgggcttccgcccaaagaaggagaaggatggttcctctagtaccgaaatgcaactgaccgccatatttaagagacacagcgccgaggccaaatcccccgcttctgacctgctcagtttcgactcaaataagatagagtcagaggaagtgtaccacggaactatggaggaggataagcagcccgagatatatttgacagccaccgacctgaaaaggcttatctccaaagctcttgaggaggagcagagcctggacgtcgggactatccaatttacggatgagatcgccggtagcttgcccgcttttggacctgacacccagtcagagctgcccacatccttcgccgtgatcacagaggacgctacattgtcccccgagctcccaccagtcgagccacagctggaaactgtcgatggtgctgagcacgggctacccgatacgagttggtcaccgccagccatggcctccacatctctgtcagaagccccaccctttttcatggctagctctatcttctctcttaccgaccagggaaccaccgacacgatggccaccgaccaaaccatgctggtacctggtctaactatcccaacttccgattatagcgctatctcacagcttgctctgggaatttcccacccaccagcttcaagcgacgactcccgcagttccgccggaggggaagacatggtgcggcacctcgacgagatggatctctctgacaccccagccccatccgaagtgcccgagctctctgaatatgtctccgtgccggaccattttctggaggacacgactcccgtgagtgctttgcagtacatcactacctctagcatgacaatcgctcccaagggtagagagctggtggtcttcttttctctcagggtagcaaacatggcattttctaatgatctgtttaacaagtcttcactggagtacagagcattagaacagcagttcacccagctgctggttccctacctcaggtccaacctcaccggctttaaacagctcgagatcttgaatttcagaaatggatccgtgatagtcaacagcaaaatgaagtttgccaagagcgttccgtacaatctgaccaaagccgtgcatggggtactggaggatttccgtagcgccgcagcccagcagttacacctggagatagattcatatagtctcaacatcgaacctgcggaccaggccgacccctgcaagttcctagcttgcggagagtttgcacagtgtgtgaaaaatgagagaaccgaggaggccgagtgcaggtgcaagcctgggtacgacagccagggctccctcgacggcctagagcctggtctgtgcggcccaggcacaaaagaatgtgaggttctccagggaaagggtgccccttgccggctgcccgaccattccgaaaatcaggcatataaaaccagtgtcaaaaagtttcagaaccagcagaacaacaaggtcattagtaaacgaaactccgagctattaacagttgagtacgaggagttcaatcatcaggactgggaggggaattag

SEQ ID NO: 227286 - DNA, 477 bp, synthetic construct
  misc_feature 1..477: note = Description of Artificial Sequence: Synthetic coding sequence
  source 1..477: mol_type = other DNA
gagcgccctaacggaacgtctgctcagccggcacaggtcaagcctgagttttaccggcaggccgagctgaagccatgtccgtggacaggaagcaaccagcggaggtgtatcactttctgtcccacccctgatcaggcagatccctgtaagttcttagcttgtggggagttcgcccagtgcgtcaagaacgaaaggacggaagaggcagaatgccggtgtaagccaggctatgattcccaggggtcactcgacgggctggagcctggcctctgcgggcctggtacaaaagaatgtgaagtactgcaaggaaagggcgctccttgcaggctgccagatcatagtgagaaccaggcttacaagacctctgttaagaaatttcagaaccaacagaataataaggtgataagcaagcggaactctgagctgcttaccgtggagtacgaagagtttaatcatcaagactgggaaggaaactag

SEQ ID NO: 227287 - DNA, 444 bp, synthetic construct
  misc_feature 1..444: note = Description of Artificial Sequence: Synthetic coding sequence
  source 1..444: mol_type = other DNA
atgtacttggaaacaagacgggctattttcgtgttttggatttttcttcaagtgcagggcaccaaagtctgccaggaggctgtctgggaagcatataggatctttctagaccggattccagatacaggagagtaccaggactgggtttcaatctgccagcaggaaactttttgtctgtttgatattggaaagaacttttccaatagccaggaacacctcgaccttctccagcaacggatcaagcaacgctctttccccgatcgaaaagatgaaattagcgctgagaaaaccctaggcgagcctggcgaaacaatcgtgatcagcacagagaagaacaagggcaagacgaaacccttcaatattctgcagttcggcaataaccaccatgaacacctgttaccaatcttctgtcttctgagttccatcatctatacttactactag

SEQ ID NO: 227288 - DNA, 3726 bp, synthetic construct
  misc_feature 1..3726: note = Description of Artificial Sequence: Synthetic coding sequence
  source 1..3726: mol_type = other DNA
atgatcatgtttcccctttttgggaaaattagcttgggcatcctgattttcgtgttaattgagggtgatttcccatccctcactgcacagacctacctttctatagaagagatacaggagccaaaatccgccgtgtcattcctcttgccagaggaatccacagacctgtccctcgcaaccaagaaaaagcagcctctcgaccgtcgggaaacagagaggcagtggctcataagaagaaggaggtccattcttttcccaaatggggtgaagatatgcccggacgagagcgtggcagaggcagtggcgaatcacgtaaagtacttcaaggtgcgggtgtgccaggaggcagtttgggaggcctttagaaccttttgggacaggctgcccggacgggaggagtatcattactggatgaacctctgcgaagacggcgttacaagtatcttcgaaatgggaactaatttctcagagagtgtggagcacaggtcgttaataatgaagaaattaacttacgcgaaagaaacagtgagtagttccgagctatcatcacccgtgccggtcggtgataccagcacactgggggatacgaccttgtcggtccctcaccctgaggtggacgcttatgagggggcttccgaatcctcactggaacgccctgaggagtctataagcaatgaaatcgaaaacgttattgaggaagccactaagcccgcaggggaacagatcgccgaattcagtatacacctcctgggtaaacagtacagggaggagctgcaagactctagctcattccatcatcaacatcttgaggaggaattcatcagcgaagttgagaatgccttcaccggtctgcccggttacaaggaaatcagggtcttagagtttcgcagcccaaaggaaaacgattctggtgttgatgtttactatgccgtgacgttcaatggggaggctatctccaatacgacttgggacctgattagccttcatagcaataaggtggagaatcacggcttggtggaactggacgacaagcccactgtggtttacacaataagcaattttagagactacattgcggagaccctccaacagaactttctgctgggtaacagcagccttaatccagatccagactctctgcagctgattaacgtgagaggtgtgctgaggcaccaaactgaagatttagtctggaatacccagagtagctctctgcaggccacaccttcatccatcctggacaatacattccaggccgcatggccttcagccgacgagtctattactagctctatccctccattggatttcagctccggtcctccaagtgctacaggaagagaactgtggtctgaatccccacttggcgatctggtttcaacacacaagctggcctttccttctaaaatgggcctgtcaagctctcccgaggtgttggaggtgtcgtcattgacccttcattctgttacccctgccgtgctgcagaccgggttacctgttgcctccgaggagcgaacctccgggtcccacctggtcgaggatgggcttgcaaatgtcgaggagtctgaggactttctgtccattgattcactgccctcctcctcttttacccaaccagtgcctaaagaaactatccccagtatggaagactccgacgtgtccctgactagctcaccttatctcacaagctccattcccttcggcctggactccctgacctctaaggtgaaagatcagctgaaggtgtcccctttcctgccggacgcgtctatggaaaaggagctgatattcgacggagggttgggctcaggctctggccagaaagtagatctcattacatggccctggtcagaaacctcctctgaaaaatctgccgaacctctctcaaagccgtggcttgaggacgatgatagcctactgccagcggagatagaggataagaaactcgtactggtggacaagatggactctaccgaccagatctcaaagcatagtaagtatgagcacgacgaccgttcaacccacttccccgaagaagaaccactgagcggacccgctgtgcctatcttcgcagacacagcagctgagtctgctagcctcactctgcccaagcatatttcagaggtgcccggtgtagatgactactccgtcacaaaagcccctctcattctgacttctgttgccatatctgctagcaccgacaaatcagatcaggcagatgcaatactgagagaagacatggaacagattacagagtcctccaactatgagtggtttgattctgaggtgtccatggtcaaaccagatatgcagacattgtggaccatcctcccagaaagtgagcgcgtgtggacccggacctcgtcactggagaagctgagccgggatatcttggcctccacaccacagtctgcagacaggctctggctaagcgtcacacaaagcacaaaactgccccctacaactatcagcacactcctggaggacgaggtgatcatgggggtccaggacatatctctggaactagataggataggaactgattattatcagcccgagcaggtccaggagcaaaatgggaaggtcgggtcgtacgtggagatgtcgacgtctgttcactctaccgaaatggtgagcgtagcatggcctacagagggcggagatgaccttagttacacccagacctcaggagctctagtggtcttcttctcgctgagggttaccaacatgatgttttcagaggatctgttcaacaaaaattccttagagtacaaagctctcgaacagcggtttttagaactattggtgccctatctgcagtccaacctgaccggttttcagaatctggagatcctaaactttcgtaacggatccatcgtcgtaaactcacgcatgaagttcgccaacagtgttcccccaaacgtgaataatgccgtgtacatgattctggaggatttttgcacaaccgcttacaatactatgaatctcgctatagacaagtactccctggacgtcgagagcggcgacgaggcaaacccatgtaaattccaggcctgcaatgaattcagtgaatgtttggtgaatccatggtcgggagaagcaaaatgcaggtgtttcccaggatacctgagcgttgaagagcgaccatgtcaatccttgtgtgatcttcagccggatttctgtttaaatgacggtaaatgcgacataatgcctggacacggagcgatctgccggtgcagagtgggggagaattggtggtaccggggaaaacattgcgaagaattcgtctccgaacccgtgatcattggaataacaatcgctagtgtcgtaggcctgctggtgatattcagtgctatcatctatttcttcatacggacgttgcaggctcatcacgatagatccgagcgagagagcccctttagcggaagttccagacagcccgactcactgtcgagcatcgagaacgccgttaaatacaaccctgtgtacgagagccacagggcaggatgcgaaaagtatgaaggcccatatccgcagcaccctttttactcttcggcctcaggggatgtgataggtgggcttagcagggaagagatccgacaaatgtatgaaagttccgagctgagccgtgaggaaatacaggaacgaatgcgcgttctggaattgtacgcaaatgacccggaattcgcagccttcgttagagaacaacaggtggaagaggtgtag

SEQ ID NO: 227289 - DNA, 201 bp, synthetic construct
  misc_feature 1..201: note = Description of Artificial Sequence: Synthetic coding sequence
  source 1..201: mol_type = other DNA
ggctatctgagcgtggaggagcggccttgccaatctctttgtgatctgcagcctgatttctgcctaaacgacggtaagtgtgacataatgcctggacacggcgcaatttgttctggctcctcccgccaacccgatagcctgagctcaatagagaatgctgtgaagtataatcccgtctacgagtcccacagggctggttag

SEQ ID NO: 227290 - DNA, 2745 bp, synthetic construct
  misc_feature 1..2745: note = Description of Artificial Sequence: Synthetic coding sequence
  source 1..2745: mol_type = other DNA
atggcgcagttccctactcctttcggagggtcactggacatctgggcaataacggtggaggagcgagctaagcatgatcagcagtttcactcgctgaagccgatttccggtttcattactggcgatcaggcgaggaactttttcttccagtctggcttgcctcagccagtcctggcacaaatctgggcactggccgatatgaacaatgatgggagaatggatcaagtggagtttagtatagccatgaagctgatcaaactcaagctgcaggggtaccagctaccctctgccctgccgcctgtcatgaaacagcagcctgtcgccatttcctccgcccctgcctttggaatgggcggaatcgcatctatgcccccactgaccgctgtagcgcctgttcccatggggagcatccctgtggtaggaatgtcccccactctggtcagcagtgtgcccacagcagctgtacctcctctggctaacggcgcacctccagtgattcagcctctaccagcctttgcccatcccgcagccaccctccccaagtcatccagctttagtaggagcggccctggctctcagctgaacacaaagctgcagaaagcacaatcctttgacgtagcctcagtgccacctgtggccgaatgggctgtgccacagtcctcaaggttgaaatatcgtcaactcttcaactcccacgataagacgatgtcaggacacctgactggtcctcaagcaagaactatcctgatgcaaagctctctgcctcaagcgcaactggccagcatttggaacctttctgatatcgaccaagacggaaaactcactgccgaggagtttatactcgcaatgcatcttattgatgtcgctatgtcaggccagcctctgccccctgtattgcctcctgaatatataccacctagctttcggcgagtccggagcgggtccggaatctctgttatcagttccacatcagtcgaccaaaggctgcctgaggagccggtgttggaggacgaacagcaacagctggagaagaagttacctgtgacctttgaagacaagaaacgggagaacttcgagcggggaaatttggaactggagaagagaagacaggccctactagagcagcagagaaaagagcaggagcgactcgctcagcttgaacgtgcagagcaggagagaaaggaaagagagagacaggaacaagagagaaagcggcaattggagctcgagaagcaacttgagaagcagagagagttggagcgtcagagggaagaggagcgccgaaaggaaattgaaagaagggaggccgcaaagagggaactggagcggcagcgacagctggaatgggagagaaacagaaggcaggagttactcaatcagcggaataaggagcaggaggatatcgtcgtattgaaagcgaagaaaaagacactggaattcgagttagaggctctcaacgacaaaaagcaccagctggaaggtaagctgcaggatattcgctgtcgcctgacaacacagaggcaggagattgagtctaccaacaagagtcgtgagttgcggatagcagaaatcacgcatctgcaacagcagctacaggagagccagcagatgttaggacgccttattcctgagaagcagattttgaacgatcagctgaagcaggtccaacagaattcactgcatcgagatagcctcgtgacactcaaaagagcactcgaagccaaggaactggctcgccagcacttgcgcgatcagttagatgaggtagagaaggaaactagatctaagttgcaggaaattgacatatttaacaaccaactgaaggagttgcgtgaaatccataacaaacagcagcttcagaaacaaaagtccatggaagccgagagactgaagcagaaagagcaggagaggaagattattgaactagaaaagcaaaaggaagaagcccagaggagggcccaggagcgggataaacagtggctcgagcatgtgcagcaggaagacgagcaccagcgtcctcggaagctacacgaagaagagaaactgaaaagggaagagagcgtcaagaagaaggacggagaggagaaaggcaaacaagaggcccaagacaaattagggagactcttccaccagcaccaggaacccgcaaagcctgcagtgcaggccccttggtctacggccgaaaagggaccactgaccatcagcgctcaggagaatgttaaggttgtttactacagagctctatacccctttgaatcccgctcccacgatgaaattactattcaacctggagacatcgtgatggtcgatgaatcccagactggcgaacccggatggctgggaggggaattgaagggcaaaacaggatggttcccagccaactacgcagaaaaaatccccgaaaacgaagtgccagcacccgtgaaaccagtgaccgattccacctcagccccagcccctaaacttgcactgcgagaaacccctgctccgttggctgtcacatcatccgaaccttccacgactccaaataattgggccgacttttcctccacctggccaacttccaccaatgaaaaaccagagactgacaattgggacgcatgggccgcacagcctagcctgactgtaccaagcgccggacagctgcggcagcgctctgcttttacacccgctactgcaacagggagttcgccttcccctgtattggggcagcacggcttctggttttttcgcgagtcctgttag

SEQ ID NO: 227291 - DNA, 954 bp, synthetic construct
  misc_feature 1..954: note = Description of Artificial Sequence: Synthetic coding sequence
  source 1..954: mol_type = other DNA
tgaccgttaatggaatcggaactgctcacagaaaaagaggtggcaatgattttcgtaaactggaaggaattaattatgtgtaacattaagctgttgaaggcattacgggtccgcaagaaaatgagcggtgagaagatgcctgtaaagatgatcggagacatactgagtgcacagctaccacatatgcagccttacatcagattctgttctcgacagctgaatggagccgcactcatccagcaaaagaccgatgaggccccagatttcaaagaatttgtcaagcgactcgcgatggatcccagatgtaagggtatgcctctctccagcttcattctcaaacccatgcagagagtgacaaggtatcccctgatcattaagaaccaattagtattcaactccgtcacaaattgtcttgggccacggaagtttctccattccggaaagctctacaaagcgaagtcgaataaggagctgtatggctttctgttcaatgatttcctcctgctgacccagatcacaaaacccctagggtcatcaggaacagacaaagtcttctcaccaaaatctaacctccaatataaaatgtacaaaactcccatttttttgaacgaagtgctagtcaagctccccaccgacccctccggcgacgaaccaatttttcatatctcccacatcgacagagtctacactctgcgggctgaatcaataaacgagagaactgcttgggtgcagaagattaaggcagctagcgaattgtacatcgagacggaaaagaaaaagcgggaaaaggcctacctggtccgtagccaaagggctactggtatcggacgcctgatggttaacgtggttgagggcatcgagctgaaaccatgtcgctcacatggaaagtccaatccttactgcgaggtgaccatgggctcacagtgccatatcacaaagaccatccaagactag

SEQ ID NO: 227292 - DNA, 5165 bp, synthetic construct
  misc_feature 1..5165: note = Description of Artificial Sequence: Synthetic coding sequence
  source 1..5165: mol_type = other DNA
atggcccaatttcccactcctttcggaggcagtctggacatttgggctattacagttgaggaaagagccaaacacgaccaacagttccatagcctgaagccaattagcggatttataacaggagatcaggccagaaactttttcttccagagcggccttccacagcccgttctcgctcagatttgggccctcgccgatatgaacaacgatggcagaatggaccaggtcgagttctcaatcgcaatgaagctgatcaagctgaaactgcagggctaccaactgccctcggccctccctccagtgatgaaacagcaaccggtcgcgatctccagcgcgccagccttcggtatgggtggcatagcgtcaatgcctcccctaactgctgttgccccagtacccatgggatcgattcctgtagtcggaatgtctccaacactggtcagctcagtacctaccgccgcagtcccccctctagcaaacggcgctccgcctgtgatacagccgttacctgcatttgcccaccctgccgcaaccctgcctaagtcctcctcctttagtcgatctggtcctgggtcccagctcaacactaaactccagaaggcacagagttttgacgtggcatccgttcccccagtggctgaatgggcagtgccacagtctagtcggctgaagtaccgccaactttttaacagtcacgacaaaactatgtccggccatctgaccggcccacaagcaagaacaattctaatgcagagcagcctcccacaagcccaactcgcctctatttggaacctatctgacatagaccaggacgggaagctgacagcagaggaatttattttggcaatgcacttaatagacgtcgctatgagtggacagcccctacctcctgtactgcctcctgagtacatcccaccttctttccgaagggtcaggagtggtagcggcatttcagtgatctcatcaaccagcgtcgatcaacgattgcccgaagagccagtcctggaagacgaacagcagcagttagagaagaagttgcctgtgacattcgaggataaaaagagagagaactttgagcgcggtaatctggagcttgagaagcggaggcaagccttgctggaacagcagcggaaagagcaggaaagactggcccagctcgagagagcagagcaggaaaggaaagaaagagagaggcaggaacaggagcggaagagacaactggagctcgaaaagcagctggagaagcaaagggagctggagcgccagcgagaggaggagcgcaggaaagaaattgagcggcgagaagctgccaagcgggagctagaaagacagcgccagctggaatgggaacggaatagaaggcaggaactgctgaatcagagaaacaaggaacaggaagatatcgttgtcctcaaggccaaaaaaaagaccctggaatttgaactagaagctttgaacgataaaaaacaccaactggaaggtaagttgcaggacattcggtgtcgcctaaccacacagcggcaggagattgagtccacaaataagtcccgggaactgaggattgctgaaattacgcatttgcagcagcagcttcaagaaagtcagcagatgctcggcagactgattcctgaaaaacagattttgaatgaccagctaaagcaagtccagcagaacagccttcatcgggattcgttagtgacactgaagagagccttggaagccaaggaattggcacgacaacacctgagggaccagctggatgaggtcgagaaggaaacccgtagcaaactccaggaaatagatattttcaataaccagctgaaggagctgcgggaaatacacaacaagcagcagttgcagaaacagaaatcaatggaggctgaacgactgaaacagaaagagcaggagcgcaagatcattgagctggagaaacagaaggaggaggcacagcggagggcccaagagcgagacaaacagtggctcgagcatgtacaacaggaagacgaacaccagcggcctaggaaactgcatgaggaggaaaaactgaaacgcgaagagtccgtgaagaaaaaggatggggaggaaaaaggcaagcaggaggcacaggataagctgggacgactcttccaccagcaccaggagcccgctaaacctgcagtccaagccccttggtcaactgctgaaaagggacctttgacgatctcagcgcaggaaaacgtgaaggtggtgtactacagagcactttacccctttgaaagccggagtcacgacgaaatcaccatccagcctggggacatcgtgatggtcatcggctgctgggtggatgagtcacaaaccggcgagccaggctggctagggggagagttgaaaggcaaaactggctggttccctgctaattacgctgagaagatacccgagaacgaagttccggcacccgtgaagcctgtcacagatagcacttccgcaccggcacctaaactcgccttaagggagacacccgctcctctagccgtaacaagctctgaaccctcaaccacacctaataactgggcagacttcagtagcacatggcccacaagtacaaacgaaaagcctgagaccgacaattgggatgcttgggccgctcagccctctttgactgtccctagtgccggacaactgcggcagcgcagcgcatttacaccagcaacagccaccggttctagcccctcacctgtgctgggacaaggtgagaaggtggagggcttgcaggctcaggcactctatccctggcgtgcgaagaaggataaccatctaaatttcaataaaaacgacgtcatcacagtgctggaacagcaggatatgtggtggttcggcgaggtgcagggccagaagggctggttcccaaagagctatgtgaagttgatcagcggtcctatccgcaagtccacaagtatggactctggcagttctgaatcccctgcgagcctgaagagggtcgctagtccagcagccaaacctgtggtcagtggagaggagttcatagcaatgtatacctacgagtccagcgagcagggagaccttactttccagcagggagacgtgatcctcgttaccaagaaggatggagactggtggacaggtacagttggcgacaaagctggggtttttccaagcaactatgtgcggctaaaggactctgagggctccggaaccgctggcaaaactggcagcctaggcaaaaagcctgagattgcccaggtcattgcctcttatacagccactggaccagaacagctgaccttggccccagggcagctgattcttattcggaagaagaaccctggaggttggtgggagggagaactgcaggcgcgaggcaaaaagaggcaaatcggttggttccctgcaaattatgtcaagctcctctctccaggaacgtccaagatcacccctacagaacccccaaagtcgacagctctcgcagccgtctgccaggtgatagggatgtacgattatactgcccagaacgatgacgagctcgcatttaacaagggccagattataaatgtattgaacaaagaagaccctgattggtggaaaggtgaggtgaacggacaggtgggtctgtttccttcaaactatgtcaagctcactaccgatatggatccctctcaacagtggtgtagtgacctacatttgctcgatatgctcacgcccactgagagaaaacgacagggatacattcatgagctgatcgtgacggaagagaattacgtgaatgatttgcagctggtgacggagattttccagaagcctctcatggagtctgagctgttaaccgagaaagaagtagcaatgatctttgtcaattggaaggaattaatcatgtgcaacatcaaactgcttaaagcactgcgggtccgcaagaagatgtccggagaaaagatgcctgtaaaaatgattggtgacatcctgtccgcccagctcccccatatgcagccgtatataaggttctgcagtcgccagttgaatggagccgctttgattcaacagaagacggatgaggctccagatttcaaagaattcgtgaaacgcctggcgatggacccacggtgcaagggcatgccactgtcctcgttcatcctcaagcccatgcagagagtgaccagataccccttaattataaaaaatatcctggaaaataccccagagaaccaccccgaccacagtcacctgaagcacgctctggagaaagccgaggaactatgctcccaggttaatgaaggggtaagagagaaagaaaatagtgacagactggagtggatccaggcacacgtccaatgcgaaggactcagtgagcagctggttttcaacagtgtcacaaactgcctgggaccccgaaagtttctgcatagtgggaagttatacaaggccaagtccaacaaggaactgtatgggttcttgttcaacgacttcctcctgctgacccagattacaaagccgctcggatctagcggcacagataaagttttttcccctaaaagcaatttgcagtacaaaatgtataaaacacccatctttttgaacgaggtgctggtgaagctgccaacggacccctccggagatgagccaatctttcacatcagccacattgatcgagtgtatactctgcgcgctgaaagcattaatgaacgcacagcctgggttcagaagattaaagcagcttcggaactctatatagagactgaaaaaaagaaacgagagaaggcttaccttgtgcgtagccaaagagccaccggaattggcagactcatggtgaatgtagtggagggaattgagctcaagccctgccgctctcatgggaagtctaatccttactgcgaagttacaatggggagccaatgtcatattactaagacaattcaggacacgctcaatcctaagtggaactcaaattgtcaattctttattagggatctggaacaggaagtattgtgtattaccgtcttcgagagagaccagttttcccccgacgattttctcggtagaaccgaaatcagagtcgccgacatcaagaaggatcagggtagcaagggcccagttaccaagtgcctgctgctgcatgaagttcctaccggcgaaatcgtcgtgcgcctggatttgcaactgtttgacgaaccata

SEQ ID NO: 227293 - DNA, 4953 bp, synthetic construct
  misc_feature 1..4953: note = Description of Artificial Sequence: Synthetic coding sequence
  source 1..4953: mol_type = other DNA
atggcccagttcccgactccattcggtggctccctggatatttgggccattacagtggaagagcgggcaaagcatgaccaacagttccacagtctcaaaccgatctccggcttcatcacaggggaccaggcacggaacttttttttccagtccggtctcccgcagcccgtgctggcacagatatgggctctggcagacatgaataatgatggtaggatggatcaggtcgagtttagcatcgccatgaagctcattaagctgaaactccagggataccagttgccttctgctcttcctccagtcatgaaacagcaacccgtggccatttcttcagcccctgcgtttggtatggggggaatcgctagcatgcctcctctgactgccgtcgccccagtgcccatggggagtatacctgttgtgggcatgagtcccacactggtgtcatccgtgccgacagctgccgttccacctcttgctaacggagcccctcctgttatccaacccttgccagcttttgcacaccccgctgccacactcccaaagtcctcctcattctcccgctccgggccaggatcgcagctgaacactaaacttcaaaaagctcagagctttgacgtcgcatcagtgcctcccgtggccgaatgggcagtcccccaaagctctcggctgaaatatagacagctgttcaacagccatgataagaccatgtcaggtcacctgacaggtccccaggctcgcacgattttaatgcagagtagcctcccccaggcccagctcgcgtcaatatggaatctatctgacatcgatcaagatggaaaattgacagccgaggaattcatattggccatgcatctgattgacgtcgccatgtctggtcagcctctgccccctgttttgccgccagagtatatccccccatcattcaggagggttcgctctggctccggcattagtgttatatcgtctacttccgttgatcagaggcttcctgaggagcccgtcttggaagacgagcaacaacagcttgaaaagaaactgcctgtgacgtttgaggacaagaagagggagaacttcgagcgcggtaacctggaactagaaaagaggaggcaagctttgctggaacagcagcgcaaggaacaagagagactagctcagctagaacgcgcagaacaggagaggaaggaaagagagcgccaggaacaggaaagaaagaggcaactggagctcgaaaaacagttggagaagcagcgggaactcgagcggcagagggaggaggaacgcaggaaggaaatcgaaagaagggaagcagcgaagcgggagctcgagcggcagcgccagcttgagtgggagcgtaatcgacggcaagaactgcttaaccagcgcaacaaggagcaagaagacatagtcgtgctgaaggccaaaaagaaaaccctagagtttgaactggaggcattaaatgataaaaagcaccagctcgagggcaagttgcaggatataaggtgtcgactaacaacccagcggcaggagattgagtccactaacaagtctcgagagttgcgaattgcagaaatcacgcacctacagcaacaactgcaggagagccagcagatgcttgggagacttattccagaaaagcagatcctcaacgaccagctaaagcaggtacagcagaactctctccacagagattcactagtgaccttgaagcgggctctggaggcaaaggagctggcacgtcagcacctacgggatcagctggacgaagtcgagaaggagacgcgtagcaaacttcaggagatagatattttcaacaaccagcttaaggagctgcgagaaatccacaacaaacagcaattgcaaaaacaaaagtccatggaagcagagaggctgaaacagaaagagcaggagagaaaaattattgaactggagaagcagaaagaggaggcccagaggcgggcacaagagcgggacaagcagtggctcgaacacgtacagcaggaggacgagcaccagcggcctcggaaacttcacgaggaggagaagctcaagcgcgaagaaagcgttaagaaaaaagatggcgaggagaaggggaaacaagaggctcaagataaactggggcgactgttccatcagcatcaggaacctgcgaagcctgctgttcaggccccttggtccacagcggagaaaggtcctctgacaatctccgcccaggaaaatgtgaaggttgtctactacagggcattgtacccctttgagagtaggagtcacgatgagatcacaattcagccaggggacattgtcatggtcatcggatgctgggtggatgagtcacaaactggggagccagggtggctggggggagagctcaaaggcaaaaccggttggttccccgctaattacgccgagaagatccccgaaaatgaagtccctgctcctgtaaagcctgtcaccgacagcacgtctgcacccgctccaaaattggctttacgggagacgcccgcacctctggcggtgacaagctccgagcctagcacaacacccaacaactgggccgacttcagctcgacttggccaacatccacaaatgaaaagccagagacggacaactgggacgcttgggcagcacagccctctctgacagtgccctccgcaggccagcttcggcagcgcagtgcatttacacccgctaccgcgacaggctcctctccatcgccggtactgggccaaggggaaaaggtggaaggtctgcaggcccaagctttgtatccttggcgcgctaagaaagacaatcatcttaacttcaataagaatgacgtcatcacggttttggagcaacaagacatgtggtggttcggagaggtgcagggtcagaagggatggttccccaaaagctacgttaagcttatctccggtcctatcagaaaatcaacatctatggattcaggctcaagtgagtcacctgcttctttgaagagggttgcctcccccgctgccaaaccagtggtctctggagaggagatcgctcaagtgatcgcttcctacacagccactggccctgaacaattgaccctagcccctggccagctgattctgataagaaaaaaaaaccccggtgggtggtgggagggcgaactgcaggccagaggaaagaaaagacagatcgggtggttccctgccaactatgtgaagttactgtcgccagggacgtccaagatcacccccactgagccaccaaagtcaaccgctctcgctgccgtgtgccaggtgatcggcatgtatgactatactgctcagaatgatgacgaattagctttcaacaagggccaaatcattaatgttcttaataaagaggacccggactggtggaaaggcgaggtcaatggccaggtcggactgttcccaagtaactacgttaaactgacaacagacatggacccatcccagcagtggtgttctgacctgcaccttttagatatgctgacgcctactgaacggaaaaggcaggggtatattcacgagctgattgttactgaggaaaattacgtgaatgatctccaactcgtcaccgagatctttcaaaagcctctgatggaatccgagctgctgacggagaaagaagtcgcaatgatttttgtgaactggaaggaactgataatgtgcaatattaagctattgaaggcattgcgagtgcggaagaagatgtctggagagaagatgccagtgaagatgataggggatattctcagcgcccagttgccgcatatgcaaccgtatatccgtttttgctctagacaactgaacggtgctgcactgattcagcaaaagaccgatgaggccccagacttcaaagaattcgtcaagagactggccatggatccaagatgtaagggaatgcccctctcttcgtttatcttaaaacctatgcagcgggtcacccgctatccactgattattaagaacatcctggagaacactccagagaaccatccagatcactctcacctgaaacacgcactggaaaaggcggaagaactgtgcagtcaagtgaatgaaggcgtgagggaaaaagaaaattcagatcggttagagtggatccaagcccatgtgcaatgcgaggggctgagcgagcagttagtctttaactcagttactaattgtcttggccctcggaagtttctgcacagcggaaagctgtataaagcgaaatcaaacaaggagttgtacggcttcttgttcaatgatttcctgttattaactcagattaccaagccccttggctcaagtgggaccgataaggtgttctcccccaagtcaaatctgcaatataagatgtacaaaacccccatatttctcaatgaagtgttagtgaaactgcccacagatcccagtggggacgaacctattttccacatttcacacatagatcgcgtttacactctgagagctgagagcatcaacgaaaggacggcatgggtgcagaaaattaaagccgcaagtgagttgtatatcgagaccgagaagaagaagagagagaaggcctacctggtcaggtctcagcgggctactgggattggacgactgatggtcaacgttgtagaaggtattgagttaaagccctgtcgctcccacggtaaatccaacccctactgcgaggtgacaatggggagccagtgccatattactaagactatccaagatacacttaaccctaagtggaactccaattgtcagttttttatcagggacctggagcaggaagttctgtgcataactgtgtttgaaagagatcagttttcccctgatgactttctcggtaggacagagattcgagtggccgacatcaagaaggaccaaggcagcaagggtccggtgacaaagtgcctcctccttcatgaggttccaactggagaaatagttgtgcggcttgatctgcagctgttcgacgaaccttat

SEQ ID NO: 227294 - DNA, 3237 bp, synthetic construct
  misc_feature 1..3237: note = Description of Artificial Sequence: Synthetic coding sequence
  source 1..3237: mol_type = other DNA
atggctcagttcccgacaccatttggcggatcactggatatctgggcaattacagtggaggaacgcgcaaagcacgatcagcaattccatagtctgaaaccgatctcagggtttataactggcgaccaggctagaaatttcttctttcagagcgggctcccacaacctgtgttggctcagatctgggccttggccgacatgaataatgatggccgaatggaccaagttgagttttcgatcgcaatgaagctgatcaagttgaaactgcagggctaccagcttcctagcgccctgccaccggtgatgaaacagcagcccgttgctatttcaagtgcccctgccttcggtatggggggtattgctagtatgcctccgttaacagcggtcgccccagtcccaatggggtctattccagtggtgggaatgtctcctacgcttgtgagtagcgtcccaacagccgcagtgccaccactggccaacggtgcaccccctgtgattcagccactcccggctttcgcccacccagctgcgactttgcccaagagcagttccttctctcgttcaggtcccggttcacagctgaacacgaaactgcagaaggcccagagctttgacgtggcctctgttccccctgttgcggagtgggctgtcccccagagtagtcggctgaagtaccgccagctctttaactctcacgataagaccatgtctgggcatctgaccggccctcaggctcgtaccattctgatgcagtcaagcctgccccaggcgcaactggccagtatttggaacctgtcggacattgatcaagacggcaagctgacagcagaggagtttatcctcgccatgcacctgatcgatgtagctatgtctgggcaaccgttacccccagtgctgcctcctgaatatattccgccatcattccgtcgtgtccgtagtgggagcggcatctccgtgataagctcgaccagtgttgaccaacggcttccggaggaacctgtgctggaggacgaacagcagcagctggaaaagaagctccctgtgacatttgaggataagaaacgcgagaacttcgagcgagggaatttggagctcgagaagcgacgacaggcactccttgagcagcagcggaaggagcaggaaagattagcacagcttgagcgagcagagcaggagagaaaggagcgggagaggcaagagcaggaaagaaagcgccagctggagttggaaaagcagctggaaaaacagcgggaacttgagaggcaacgggaagaggagcggagaaaagaaattgagagaagagaagccgcaaagcgcgagttggagagacaacggcaattggagtgggagaggaataggcgacaggagcttttgaaccagaggaacaaagagcaggaggatatcgtcgtgctgaaggcaaagaagaagaccctggagtttgaactggaggctctcaacgacaaaaaacaccaactcgagggcaagttgcaggacatcagatgcagattaaccacgcaaaggcaggagatcgagtcaaccaataaatcacgagaactgcgtatcgccgagatcacccatcttcagcaacagttacaggagagtcagcagatgttgggcagattgattcctgaaaagcagatccttaatgaccaactgaagcaggtccagcagaattcactgcaccgcgattcactcgtgaccctaaagcgggcactcgaagcaaaggagctggccaggcagcacctcagagaccaactagatgaagtggagaaggagacccgatccaaactgcaggaaattgacatttttaataaccagctgaaggagcttcgggagattcacaataagcagcagctccaaaaacagaagtccatggaagcagagcgtctcaaacaaaaggagcaagagaggaagatcattgaactggaaaagcagaaagaagaggctcaacgtcgggcacaggagagagacaagcaatggttggagcacgtccagcaagaggatgagcaccagcggcctaggaaactgcacgaagaagaaaagctgaaacgcgaagaaagcgttaagaagaaggacggggaagagaagggtaagcaggaggctcaagataagcttggtcggttgtttcaccagcaccaggagcctgcgaaacccgcagtgcaggccccatggtccactgctgagaaaggcccactcactatctctgcacaggaaaatgtcaaagttgtgtactatcgggcactgtatccctttgagtcacggagccacgatgaaatcaccatccagcccggagacatcgtgatggtggatgaatctcaaacaggagaacccggatggcttggcggagagctgaaaggtaaaacaggatggttccctgctaactacgcggagaagattccagagaatgaagtccccgctccagtcaaacctgtcaccgactctacatctgccccagcacccaagctcgcacttagggaaaccccagcgccattagcggtgacatcatctgagccctccacaaccccaaacaactgggctgatttttcctcaacatggcccacgtctaccaacgagaaacctgaaaccgataactgggacgcatgggctgcacaaccttcactgacagtgccctctgccggtcagcttagacagcgctcagcttttacccctgccacggctactgggtcttctccctctcccgtactgggccagggggaaaaagtggagggactacaagctcaggccctgtacccctggcgcgctaagaaagataatcatcttaacttcaataaaaatgacgtgattacggttctggaacagcaagacatgtggtggttcggtgaagtacaggggcaaaaggggtggttcccaaaatcttatgtgaaactgattagtggccctatcaggaaaagtacctccatggactctggaagttccgagagccccgcttcgctcaaaagggttgcttctccagccgctaagccagtggtaagcggggaggagttcatagcaatgtatacctatgagtccagtgagcagggagacctgacttttcagcagggtgacgtgatactggtcacgaagaaagatggagactggtggacggggacggtgggcgacaaagccggagtcttcccctctaactacgttaggcttaaagattctgaaggcagcgggaccgccggtaagactgggtctttgggtaaaaaacccggtcctagttgtaatgtgaagtag

SEQ ID NO: 227295 - DNA, 3663 bp, synthetic construct
  misc_feature 1..3663: note = Description of Artificial Sequence: Synthetic coding sequence
  source 1..3663: mol_type = other DNA
atggcacagtttccaactccctttggaggcagcctcgacatatgggcaattaccgtggaagaaagggccaaacacgatcagcagtttcacagcctgaaaccaatctccggcttcatcacaggcgaccaggctcgaaattttttttttcagtcggggctcccccagccagtgctggcgcaaatctgggccctggcggatatgaacaacgacgggagaatggaccaggtggagttctccatcgctatgaaactcattaagttgaaactgcagggataccagctcccctccgctcttccccctgttatgaaacagcagccagtcgcaatttctagcgcacccgcttttggcatgggtgggattgcttccatgccccctctgacagcagtcgcccctgtgcctatgggctcaattccagtagtgggaatgtcacccacactggtctctagcgtaccaacagccgctgttcctccactggctaacggggctcccccagtgatacagccccttcccgcatttgcacaccctgccgctacactgcccaaatctagcagcttctcgcgatccggtcccggtagccagctgaataccaaattgcagaaagctcaatcttttgatgtggcctcagttccccctgtggcagagtgggctgtgccccagtcatcgcggctgaagtatcgacaattattcaactcccatgataaaacaatgtctgggcatctgaccgggccacaagctcgcacaatactgatgcagtcctctttaccccaagctcagctggcctccatttggaatttatcggacatagaccaagatggtaaactgactgcagaggagttcattctggctatgcatttgatcgatgtggcaatgagcgggcagccactcccacccgttctccctccagaatatataccgccttcgtttagacgcgtaagaagcggttccgggatctccgtaataagcagcaccagtgtggaccagcgactcccggaggaacctgtcctggaggatgagcagcagcaattggagaagaagctgcctgtaaccttcgaggacaagaagcgtgaaaattttgagcgcggtaacctcgaactggaaaaacggaggcaggccttgctggagcagcagcgtaaggagcaggagcgattggcccaactggagcgcgctgagcaggagcgcaaagagagggaacggcaagagcaggaaagaaagcgacagttggagcttgaaaagcagcttgaaaagcagcgggagctggagaggcaacgggaagaagagcggcgaaaggaaatcgagagaagagaggccgcaaagcgggagttagaacggcagcgccagcttgaatgggaacgcaaccgtcggcaggagttgcttaatcagcgaaataaggagcaggaggatattgtggtcctaaaagccaaaaagaaaactttagaattcgaactggaggcccttaatgacaagaaacaccagttggagggcaaattgcaggatattcggtgccggctcaccacacagaggcaggaaatcgagagcacgaataaaagccgtgaacttaggattgccgagataacacatcttcagcaacaattgcaagaatcccagcagatgctgggacggctgatcccagagaaacagattttaaacgatcagctgaagcaggttcagcagaattcacttcaccgcgatagtttggtgaccttaaagcgggctttagaggcaaaggaacttgcacgccagcacttacgcgatcagttggacgaagtggagaaggaaacaaggagcaaactgcaggagatcgatattttcaacaatcagttgaaagagttacgcgagatccataacaaacagcagctccagaagcaaaagtcaatggaggccgagaggctgaaacagaaggaacaggagaggaagattattgaactggagaagcagaaggaagaggcacagcggagggcccaagaaagggataaacagtggctggagcacgttcagcaggaagacgaacaccagaggccgaggaaactccatgaggaagagaaattaaagcgggaggaatctgtgaaaaaaaaagatggcgaggaaaaaggaaaacaggaggcccaggacaagctcgggagactgttccatcagcaccaagaaccagctaagccggcagtgcaggccccatggtcaaccgccgagaaagggcctctcactatctcagcccaggaaaatgtgaaggtggtctactatcgagctctctatccattcgaaagccgctcacatgatgagattacaatacaaccaggcgacatcgtcatggtgaagggtgagtgggtggacgaaagtcagacaggcgagccgggatggttgggaggagagctgaaaggcaagacgggttggttccctgcgaattacgcggagaaaattcctgaaaatgaggtgccggcacccgtcaaacctgtgactgactcaacctccgcgccagctccaaaactcgccttgcgcgagacccctgcccctcttgccgtcacctccagcgagcctagcactacaccgaacaactgggccgattttagtagcacttggccaacaagtaccaacgaaaaaccagaaaccgacaattgggatgcctgggccgcacagccttctctcacagtgccttcggctggtcaactgagacaaaggtccgctttcaccccagcaaccgccaccggatccagccctagccccgttttgggacagggtgaaaaggtggaaggtcttcaggctcaagctctgtatccctggcgggctaaaaaggacaaccacttaaattttaacaagaatgatgtgattaccgtcctggaacagcaggacatgtggtggttcggcgaggtccaaggacaaaagggctggttccctaagtcgtacgtcaagctaatctctggccctattcgtaaatcaacatcaatggactcagggtcatcggagagccctgcctccctcaagcgggtggcctctccagcggctaaacccgtagtgtccggcgaagagttcatcgctatgtatacatacgaatcctccgagcaaggagacctcacgttccagcaaggagatgtaatccttgtcaccaagaaagacggagactggtggacgggcacggttggcgacaaggccggtgtgtttccctctaactacgtgaggcttaaggattccgaaggctcaggtaccgctggtaaaaccgggtccctgggaaaaaaacccgagatcgcccaggtcatcgctagctacaccgcgacaggccctgagcagctgaccctagcgcctggacagctcatcttgatccggaaaaaaaaccctggtggctggtgggaaggtgaactccaggctcgtggaaagaaaaggcagataggttggtttccagctaactacgtgaagttgctgagccccggtacctccaaaatcacacccaccgagccccctaaaagtacggccctcgctgcagtatgccaggtgatcggcatgtatgattacaccgctcagaatgacgacgagttagctttcaataagggccagatcatcaatgtgctgaataaggaagatcccgactggtggaaaggtgaagtgaacgggcaggtcgggctcttccctagcaactacgttaaacttacaactgatatggacccatcccagcaatag

SEQ ID NO: 227296 - DNA, 5165 bp, synthetic construct
  misc_feature 1..5165: note = Description of Artificial Sequence: Synthetic coding sequence
  source 1..5165: mol_type = other DNA
atggcccaatttcctacaccttttggcggaagccttgacatctgggccatcacagtggaggagcgtgcaaagcatgaccagcaattccatagcctcaagccaattagtggatttatcactggagatcaagctcgaaactttttctttcagtctggcctgcctcagcctgtcctggcccaaatttgggccttggccgacatgaacaatgatggacgtatggaccaggtggagttttccatcgccatgaaattaataaagctcaagctgcaggggtaccaactgccatccgccctcccccctgtgatgaagcagcagccagtagccataagcagtgctccagcgttcggcatgggagggatcgcgtccatgccaccccttaccgcagtagcacctgtgccaatgggctcaatccccgtggtagggatgtctcctacactcgtgagttccgttccgactgcagctgttccaccattggcaaacggcgcaccacccgtaatccagcctttgcctgcttttgcacacccagcggctaccctcccaaagagctctagcttctccagaagtggcccaggttcgcagctaaacaccaaattacaaaaggcacaaagctttgacgttgccagcgtacccccagtcgcagagtgggccgtgccccagtcatccaggcttaaatacagacagctcttcaatagccacgacaaaacaatgtcagggcatctgacagggccacaggccagaaccattctaatgcagagtagcttgccacaggctcagctggcctccatctggaacctcagcgatattgaccaggatggaaaactcaccgcagaagagttcattttggcaatgcacttgattgacgttgccatgtcagggcagccacttccccctgtgctcccccctgaatacataccaccatcgttccgaagggtgaggtccggaagtggaattagcgtcattagctccaccagtgtagaccagcggctgcccgaggagccggttttagaggatgagcagcaacagctagagaaaaaactgccagtgacttttgaggataaaaagagagagaactttgaacgcggaaatcttgagttagagaagcgccgtcaagccctgcttgagcagcaaagaaaggagcaagagagattggctcagctggagcgcgctgagcaggagagaaaggagcgagagcgtcaggaacaggaacgtaagcgtcagctggaactcgagaagcaactggagaaacaaagagagttagaacgccagcgggaagaggagcggcgaaaagaaatcgaaagacgagaagccgcaaaacgagagcttgaacggcagaggcagctggagtgggagcgcaaccgcaggcaagaactattaaaccagcgaaacaaggaacaagaagatatagtcgtgctgaaagccaagaagaaaaccctggaattcgagctggaagctttgaacgataaaaagcaccagctggaaggcaagttacaagatatccggtgcagactcaccacacagagacaggagatagagtccacaaataaaagtagggagttacggatcgccgaaattactcatttgcagcagcagctgcaggaatcacagcagatgctcggtcgactgatccccgaaaagcagatactgaacgatcagctgaagcaagtgcagcagaactctctgcacagagatagcctcgtgaccctcaagcgtgcgctcgaagctaaggaactagctagacagcacttgagagaccagctggatgaggtggagaaggagacacggtcgaagctccaggagattgacatattcaataatcaacttaaagaactgagagagatccacaacaaacagcaattgcagaagcaaaagagtatggaagccgaaaggctgaagcaaaaagagcaggaacgcaagattattgagctggagaagcagaaggaggaggcgcaaagaagggcccaggaaagagataagcagtggctcgagcacgtacagcaggaggacgagcaccagcgccctcgaaagctgcacgaagaagaaaaactgaagagagaagagagcgttaagaaaaaggacggagaagaaaagggaaagcaggaggcacaggataagctgggccgtctttttcatcagcatcaggagcctgcaaagcccgctgtgcaagccccatggtccactgccgaaaaggggccactgactatcagcgcccaggagaacgtcaaggtagtttattatagagcgctctacccattcgagtcccggtcacatgacgaaatcacaatccagcccggagatattgtcatggttaagggcgagtgggtggacgagtcccaaacaggtgagccaggttggctggggggtgagttgaagggaaagaccggctggtttccagcaaattacgcagagaagatccctgaaaacgaggtgcctgccccagtgaaacccgtgaccgacagcacaagcgctcccgcacctaagctggctctgagggaaacgcccgcaccacttgccgtgacatcatcagaacctagcacaactccaaataattgggctgacttctcctccacttggccaaccagcacgaacgagaagcctgaaacggacaattgggacgcctgggcggcacagccatccttaactgtccctagcgcgggacagcttcgacagcgtagcgcttttacgcctgcaaccgcaactggttcctcccctagtcctgtgctgggacaaggggaaaaggtggaaggtctgcaggcccaggcactgtacccctggcgagccaagaaggataatcatcttaacttcaacaagaatgacgtgatcaccgttctggagcaacaggatatgtggtggtttggagaggtccaagggcaaaaagggtggtttcccaaatcatatgtgaagcttatcagcggccctatccggaagagcacgagcatggattccggcagttccgaatcacctgctagcctgaagcgggtggcctctcccgctgcgaagcccgttgtgtccggtgaggagttcattgccatgtatacatacgaatcatcagagcagggcgacctgacattccagcaaggcgacgtgatcctcgttaccaaaaaggatggggattggtggaccgggacagtgggcgacaaagcaggggtctttccaagcaactacgtccgcctgaaagacagcgagggtagcggcacagccggaaagaccgggtcattaggtaaaaaacctgagattgcccaggtgattgccagctataccgccaccgggccagagcaactcaccctcgctccaggccagctgattcttatacgcaagaagaaccctggcggatggtgggagggcgagcttcaggcacgaggcaagaaaaggcaaattggttggttccccgcaaactacgtcaagttgctgtcgcccggtacctcaaagatcactcccacagaaccaccaaaatccactgcccttgcggctgtgtgccaggtgatcggaatgtacgactacacagcccagaatgacgacgagctcgcttttaacaaagggcagattataaacgtgctgaataaggaagaccccgattggtggaagggtgaggttaacggccaggtgggtctcttcccgagtaactatgtgaagctgactaccgatatggacccaagtcagcagtggtgcagtgatctacacctactggacatgctaactccaaccgagcggaaacgtcaaggctatatacatgaacttattgttaccgaagagaactacgtcaatgatcttcaactcgttaccgaaatttttcagaagccactgatggagtccgaactactcacagagaaggaggtggctatgatcttcgtgaactggaaggagttaattatgtgcaatatcaaactcctcaaagcattgcgggtgcgcaaaaaaatgagcggggaaaaaatgcccgtaaagatgattggcgatatcctaagtgctcagctcccacacatgcagccttatattcgattctgttctcggcagctgaatggagccgctctgatacaacagaaaactgatgaggccccagatttcaaggaattcgtcaagagactcgccatggatcctcggtgcaaaggtatgcctctctcgtcgtttattctgaaacccatgcaaagagtgactcgctaccccctcataataaagaacatcctcgaaaacacccccgagaaccatccagatcactcacacttaaagcatgcccttgaaaaagctgaggaactttgttctcaggtaaacgagggagtccgagaaaaggagaactccgatagactggagtggattcaggcgcatgtgcagtgcgaagggctctccgagcagctggtgtttaattccgtgactaactgtctgggtcccagaaaatttcttcactccggtaaattgtacaaggcaaaaagtaataaggaactttatgggttcctgttcaacgattttctgctgttgacccagattacaaagcctttaggctccagcggaactgacaaggttttcagtcctaagtccaatttgcaatataaaatgtacaaaactccgattttcctgaatgaagtcctcgtaaagctgcctacagatccctcaggagacgaacctatcttccacatctcccacatcgatcgcgtgtacacccttcgtgccgagtccatcaacgagagaaccgcatgggtgcaaaagataaaggctgcgagcgaactgtacatagaaacggagaaaaagaaacgtgaaaaggcttacttagtccgctcacaaagagccaccgggatcggacgtctgatggtgaacgtggttgaagggatcgaactgaagccctgcaggagccatggcaaatctaacccttattgcgaggttaccatggggagtcagtgtcacattaccaagactatacaggatacactgaatcccaaatggaattcaaattgtcagttctttatacgagacctcgaacaggaggtcctgtgcattacggtgtttgagcgcgaccaatttagtccagacgacttcctgggtcggacggaaatcagggttgctgacattaaaaaagatcagggctcgaaagggccagtgaccaaatgcctcctccttcatgaggtccctactggagagatagtggtcagattggatctgcaactgttcgatgagccata

SEQ ID NO: 227297 - DNA, 3048 bp, synthetic construct
  misc_feature 1..3048: note = Description of Artificial Sequence: Synthetic coding sequence
  source 1..3048: mol_type = other DNA
atggcgcaattcccaactccgttcgggggatctctcgacatatgggcaatcactgtggaagagcgcgcaaagcacgaccagcagttccactcactgaaacccatctcaggatttatcacgggggatcaggcccgaaactttttctttcagtctggtctgccgcaaccagtgctcgcgcagatatgggctctcgcagatatgaataatgacggcaggatggatcaggtggagttctcaattgcgatgaaactgattaaacttaagctgcagggctaccagctcccctctgctttgcctcctgtgatgaaacagcagcccgtcgcaatctcctcagccccagctttcggtatggggggaatcgcatcaatgccaccactgaccgctgttgccccagttcccatgggaagcattccggtcgtgggcatgtcccccactctggtttcttccgtacctaccgccgcagtcccgcctctcgctaacggggctccacccgttattcagccccttcctgccttcgctcatcccgctgcaacgctgccaaagtccagctcattctcgagatcaggacccggaagccaactcaacactaaacttcagaaagcccagtccttcgatgttgctagcgtacccccagtggcggagtgggctgtcccccagagcagtagactcaagtatagacagctgtttaattcacatgacaagactatgtctggacatttgacagggcctcaggcccgaacaatcctgatgcagagcagccttccccaggcccagcttgcatcaatatggaacctcagtgacattgaccaggatggtaagctgactgccgaggaatttatattggccatgcatctgatcgatgttgccatgagtggccagccgcttccgccagtactcccgccagagtacattcccccatcttttagaagggtgaggtctgggagcggaattagcgtgatcagttccacatctgtcgatcaacgattgcccgaggagcctgtcctagaagatgagcaacagcagctggaaaagaagctcccagttaccttcgaggataagaaacgggaaaactttgaacgaggcaacctggagctggagaaacgcagacaggcgctacttgagcagcagcgcaaagagcaggaaagactggcgcagctggagcgggctgaacaggagagaaaagagagggagagacaggaacaggaaagaaagagacagctagaattagagaagcagttggaaaaacagagggagctcgagcgacagcgcgaggaggagaggaggaaggagatcgaacgacgagaggcagcaaaaagggaacttgagcggcaaagacagctggagtgggagagaaaccgtaggcaggagttacttaaccagagaaacaaagagcaggaggacatagtcgtgttgaaagcaaagaaaaagacgctggaattcgaactggaagctctgaatgataagaaacaccaattagaaggtaaacttcaagatattcgctgcagactgacgacacaacggcaagagatagagagtactaataaatcacgtgagctgcgcattgccgagatcacccacttgcagcagcaactccaggagagccagcagatgctggggcgacttatccccgagaagcagattcttaatgaccaactgaagcaggtccagcagaattcacttcacagggatagtctggtcacattaaaacgtgccctggaggcaaaggaacttgccagacaacacttaagagatcaactggatgaagtcgagaaagaaaccaggtccaagctgcaggagattgacatttttaacaaccagctgaaggaactccgggaaatccataataaacaacagctccagaagcagaagtcaatggaggccgaacggctgaagcagaaggagcaagagcgcaagattatcgaactcgagaagcagaaggaggaagctcagcgacgggcacaggagagagacaagcagtggctggagcatgtgcagcaggaggatgagcaccagaggccacgcaaactccatgaagaagagaagcttaagagagaggagtctgtgaaaaaaaaagacggagaagagaagggcaaacaggaagcacaggataaattaggaagactgttccaccaacatcaagaaccggctaaaccagctgtacaggcaccctggtcaaccgccgagaagggcccactaaccatcagcgcacaggaaaacgtcaaggtcgtttattaccgagccctctatccattcgaatccaggagccacgatgaaattactatacagcctggtgacattgtgatggtggacgaaagccagaccggtgagcctggatggctgggcggagaattaaaaggaaaaaccggctggttccccgctaattacgcagagaaaatcccggagaacgaagtgcctgccccagtgaaacctgtgacggatagtacctctgccccagcacccaaacttgccttaagggagacccccgcaccacttgccgtcacatctagcgagccttctacgacaccgaataactgggcagatttcagtagcacatggccgacttctaccaatgagaaaccggagaccgataactgggacgcttgggctgctcagccttcactgacagtcccctccgccggtcaactcagacagaggagtgccttcaccccggctactgctacaggctcttcaccctcgcccgttctgggccagggtgagaaagtcgaaggcctacaggcccaggccttatatccctggagagcaaaaaaggataaccacctcaacttcaacaagaatgacgtgattacagttcttgagcagcaagatatgtggtggtttggcgaggtccagggtcaaaagggctggtttccgaagagttatgtcaagctcataagtggacctattcggaagtcaaccagcatggactccggctcttctgagtcccccgcttctctaaagcgggtcgcatcccctgccgctaagcccgtcgtgagcggggaaggtctctggaattgctgggaaaaccgagaatttaggaaaaagacatag

SEQ ID NO: 227298 - DNA, 3063 bp, synthetic construct
  misc_feature 1..3063: note = Description of Artificial Sequence: Synthetic coding sequence
  source 1..3063: mol_type = other DNA
atggcccagttcccgaccccatttgggggttccttggacatctgggctatcaccgtggaggaacgggcaaaacacgatcagcagtttcactcactaaaaccaatttccggtttcatcaccggagaccaagctcggaactttttttttcaatcaggcctgccacagcccgtccttgcacagatctgggccttggccgatatgaacaatgatggccgaatggatcaggtggaattctcgattgccatgaagctgatcaaactgaaattacagggctatcagctacccagcgccctgccacctgtaatgaaacagcaaccagtggctatctcatccgcccctgccttcgggatgggcggtatcgccagtatgccgccactaaccgcggtggctccagttcctatgggcagtatcccagtggtcggaatgagcccgacactcgtgtcctccgtcccaactgccgctgtgccacccttagccaatggcgcacccccagtgatccagcctctgcccgcttttgcgcaccctgccgctacactgcctaaaagctctagcttttctcgctctggacctggatcacagctgaacaccaaacttcagaaggcccaatctttcgacgtcgcgtctgttccccctgttgcggagtgggcagtgcctcaatcttcccgcctgaagtatagacagttatttaattcacacgacaagaccatgagtggacacctcaccggaccccaggcaagaacaatacttatgcagtcatcgctcccacaagcacagctggcttctatttggaatctgagcgatattgaccaagacggaaaacttaccgcagaggagtttattctcgctatgcatctcatcgacgtggcaatgtctggtcaacctctcccccctgtgcttcctccggaatatatacctcccagcttcagaagggtgagaagtggcagtggaatttcagtgatctcatctacttccgttgaccagcgcttacccgaggagcccgtactagaggacgagcagcaacagttggagaaaaaattacctgtgactttcgaggacaaaaagcgcgagaatttcgaaaggggaaacctcgagctggaaaaacgtcgtcaggcattattggaacagcagcgaaaggagcaggaacgcctggcacagctcgagcgcgctgaacaggagaggaaagagagggaaagacaggagcaggagcggaagcggcaactagaactggagaaacagttagaaaaacagagggagcttgagcgccagcgcgaagaggagaggcggaaggagattgagagacgcgaggcagcaaagagggagctagagagacagaggcaacttgaatgggagaggaataggaggcaggagttgttgaatcagcgaaacaaagagcaggaggacattgtggtgttgaaggctaagaagaagactcttgaattcgaattggaagcactgaatgataagaaacatcagcttgaagggaagttgcaggatatacgctgtagactgactacacagcgccaagagattgaatccacaaataagtccagggaattgaggattgcagaaatcacccacctgcaacaacagctccaagaatcccaacaaatgctggggaggctgattcctgaaaaacagatccttaatgaccagctgaagcaggtacagcaaaatagtctacatagggatagcctcgtgactctgaagcgagcactggaggctaaggagctggcacgccagcacttacgtgatcaattggacgaggtggagaaggaaacgcgaagcaaactacaggagatcgatatatttaacaaccaattgaaggagctgcgcgaaattcacaacaaacagcagctgcagaagcagaagagtatggaggccgaacgcctaaagcagaaagaacaggagagaaagataatcgagcttgaaaagcaaaaggaggaggctcagcggagagctcaggagagagacaaacaatggctggagcacgttcagcaagaggatgagcatcagcggccacggaagctgcacgaagaggagaagctcaaacgcgaagaaagtgtgaaaaaaaaagatggcgaggaaaagggcaagcaggaggctcaggacaagcttggccgtcttttccaccagcatcaggagccagcaaaacccgcagtacaggctccctggtccacagcggagaaagggccactgaccatctctgcccaggagaacgtcaaagttgtatactaccgtgccttgtatccatttgagagtcgctcccacgacgagatcaccattcagccgggtgacattgtaatggttgatgaatcccagacaggcgaaccaggctggctaggcggtgaattgaaagggaaaaccgggtggtttcctgctaattacgcagaaaagattcctgagaatgaagttcccgctcccgtaaagccggtgactgactccactagcgcgcctgccccaaaactggctcttagagagaccccagcccctctggccgtgactagtagtgagcctagcaccactccaaacaattgggccgattttagttcgacttggcctacctccacaaatgaaaaacccgaaaccgataactgggacgcctgggctgcccagcccagtttgacggtgccgtccgcagggcagcttagacagcgcagcgctttcacacccgcaaccgccacgggcagctccccatcgcccgtgctcgggcagcctgatttcctgctgcacccctccatgagactcggacacatgcagcccaggatcgtgctgctgtttccagatcccctgcaatgctcaacgtctcgcttgctacctatgctgcgtcctcgtcctggggttccatttcttaggtctccctcctgccagtcaccaagccacccatctcgaccaatttccgatgccgctcctagcgtcaagttcacccttatgcccccagggagaatacacccatgctttctctttattcctgccgttaacagtcgtaactcctttttggtctacttcatcctccctggtggtaccctaggctgtttctacctctgtttgccccattatttgtag

SEQ ID NO: 227299 - DNA, 3435 bp, synthetic construct
  misc_feature 1..3435: note = Description of Artificial Sequence: Synthetic coding sequence
  source 1..3435: mol_type = other DNA
atggcccaatttcccaccccctttgggggaagcttggatatctgggccataacagtcgaggaacgggctaagcacgatcaacagtttcacagtctaaaaccaatcagcggctttattacaggcgatcaggcgcgaaattttttctttcagtctgggctgccgcagcccgtgctcgcacagatttgggcgctcgccgatatgaataacgacggccgaatggaccaggtggagttttccatcgcgatgaagctgatcaaacttaaactgcaggggtatcaactcccgtccgccttgccccctgtgatgaagcagcagccagtggcaatcagttccgcacccgcttttggtatgggcggtattgcatcaatgccacccctaactgccgttgcccctgtgcccatgggaagcatccccgtcgtgggcatgtctcccacgctggtgtcgagcgtgcctaccgcggctgtgccaccacttgctaatggtgccccaccagtgatccagcccttgccggcattcgcacaccccgctgcaacgttgccgaagagctccagtttctcaagaagtggcccaggtagccagctcaacacaaaactgcagaaggcacagagttttgacgttgcatcagtgccccctgtcgccgaatgggcggttcctcaatcttcccgactgaagtaccgtcagctgttcaattcccacgacaaaaccatgtccggtcatcttactggaccccaggccagaacaatcttaatgcagtcatcccttccgcaggcccagctcgctagtatttggaatctctctgacattgatcaagacgggaagctgaccgctgaggagttcatactcgctatgcacttgattgacgtggcgatgtccgggcagcctctccccccagtgcttccaccagagtacattccaccttcctttaggcgggtaaggtccgggagtggcatttcggtgatctcctcgacgtccgtcgatcagcggttacctgaagaacccgtgctcgaagacgaacaacagcaacttgaaaagaaattgccggttacctttgaggacaaaaagcgggaaaactttgagaggggcaacctcgaactggagaagaggcgtcaggcactcctcgagcagcagcgcaaggagcaagagagactggcccagctcgagcgagccgagcaggagagaaaagagcgcgaacgtcaggagcaggaaagaaaacgccaactggaactcgaaaagcagcttgagaaacagcgggaactcgagcgacagagagaggaggaacgtcgcaaagaaattgaacggcgagaagccgctaagagagagctggagagacaacggcagctcgagtgggagcgaaaccgaaggcaagaactgctcaaccagaggaataaggagcaggaggacatcgtggtcttgaaagctaaaaaaaagacgctggaatttgagttggaagccctcaatgataagaagcaccagctcgaagggaagctgcaagacatcaggtgccggctgacaacccaacggcaggaaattgaatctactaacaagtcgagggaactccgcattgcagagattacacaccttcaacagcagctgcaggagtctcagcagatgcttggcaggctcatcccagaaaagcaaattcttaatgatcagctaaagcaagttcaacagaacagtttgcacagagactcactggtcaccctcaagcgggcacttgaggccaaagaactggcgagacagcacctgcgggaccaactggacgaggtggaaaaggagacccgcagcaagttacaggaaattgatattttcaataatcaacttaaggagttaagggagatccacaataaacagcagctgcagaagcagaaatcaatggaagctgaacggctgaagcagaaagagcaagaacgcaagatcatcgaactcgaaaagcagaaagaggaggcccagcgacgagctcaagaacgagacaaacagtggttggagcacgtacagcaggaagacgagcatcaacggcctaggaaactccacgaggaggagaagctgaagagagaggaaagtgttaagaaaaaagatggcgaggagaaaggtaagcaagaggcacaggataaattaggtcgattgttccaccaacaccaagaaccagccaaaccggcagtccaagcaccttggagtactgcagaaaaaggccctctgaccatcagcgcccaagaaaacgttaaagtggtttattatagggccctgtaccccttcgagtcacgctcccatgacgaaatcaccatccagccgggagacatcgttatggtcgacgagtcacagaccggagaaccagggtggctgggcggtgagctgaagggaaagaccggatggttccctgctaactacgcagagaagatccccgagaatgaggttccagctcctgtcaaaccggtgacagactctaccagcgccccagcacccaagctggccctgagggagacacctgctcctcttgcagtgactagttcagagccttcgactacaccgaacaattgggccgacttttcttctacgtggcctacctccacaaatgaaaagcctgagacggacaactgggatgcgtgggcagctcaaccttctctcaccgtaccttccgctggtcagctgcgccagaggtctgcgtttaccccagcaactgccaccggatctagcccgagcccggtgcttggtcagggcgaaaaagtagagggcctccaggcccaggcgctctacccgtggagggcaaagaaggataatcacctgaattttaataagaacgacgtgattacagttcttgaacagcaggatatgtggtggtttggcgaagtgcaggggcagaaagggtggtttcctaagtcatatgtcaagctgatttctggacctattcgaaagtccacctctatggactccgggtcaagtgagagccccgcttctttgaagcgagtcgccagccccgctgccaagccagtagtgagtggagaggaaatagcccaggtcatcgccagttacactgctaccgggcctgaacagttaacacttgcacccggacagcttatactcattcgaaagaaaaatccgggtggttggtgggagggggagctgcaagcacgtggaaagaagcgtcagattgggtggtttcccgctaattacgtgaaacttttgtcccctggaacatctaagatcacccccacagaaccacctaagtccacagcgctcgcggcagtctgccaggttatcggcatgtatgactataccgctcagaacgacgacgagctcgccttcaacaaggggcagataatcaacgtcctcaacaaagaggaccctgattggtggaagggagaggttaacggacaggttgggcttttcccatccaactatgtaaaactgaccaccgatatggacccctctcaacagtag

SEQ ID NO: 227300 - DNA, 3648 bp, synthetic construct
  misc_feature 1..3648: note = Description of Artificial Sequence: Synthetic coding sequence
  source 1..3648: mol_type = other DNA
atggctcaatttccaactccatttggaggttctttagacatctgggccattactgtcgaagaacgtgccaaacacgaccagcagttccattcccttaaacccatatctggatttattactggagatcaggccagaaacttcttcttccagtccggattgccacagcccgtgctggcccaaatctgggctcttgcagacatgaataacgatggacggatggaccaggttgaattttccatcgctatgaagctgatcaagttgaagttgcaaggttatcagctcccttcggcccttccgcctgtcatgaaacagcaacctgtggctataagcagcgcgccagcttttgggatgggagggatcgcttctatgcccccactgactgctgtagcgcctgtccctatgggatccatccccgtggtaggtatgtccccaacactggtgtcctccgttcctaccgctgctgtgccccctcttgccaacggcgctcccccagtgatccagcccctccccgctttcgcacaccctgcagcgactcttcccaagtctagctccttcagtcgctcaggccctggatctcagcttaacacaaagctccagaaagcccagtcattcgatgtggcatctgtgcccccagtggcagagtgggccgtcccacagtctagcagactgaaatacagacaactgttcaactcccacgataaaaccatgtctggacaccttacgggcccacaggctcgcacaattctgatgcagtccagcctgccccaggcccaattggctagtatttggaatctttctgatattgatcaagacggaaaacttacagcggaggagtttattctcgctatgcatctgattgatgtagccatgagtggccagcccctaccccctgtccttcccccagaatatattcctccaagctttagacgcgtgaggagtggcagtggtatctctgtcattagcagtacgagtgtggaccagagactgccagaagagccagttctcgaagatgagcagcagcagcttgaaaaaaaattgcccgttacgtttgaagataaaaagagggaaaactttgagagggggaatcttgagctggagaaacgaagacaggcccttctagagcagcagcgcaaggaacaggaaaggctcgctcagctcgaacgagctgaacaggagagaaaggaaagagaacgacaggagcaggagaggaaacgccagctcgagctggagaaacagctggagaagcaacgggagctggagcgccaacgagaggaggagagacgaaaggagattgaaagacgcgaggccgctaagcgtgagctcgagagacagcggcagctggagtgggagagaaatcgaaggcaggagctccttaaccaaaggaacaaggagcaggaagatatcgttgtgctcaaggctaagaagaaaactctggagtttgaattagaagcactgaacgacaaaaagcaccagctggagggtaagctgcaggatattaggtgccggctcactactcagagacaggaaatcgaaagtacaaataagtctcgggagctgagaattgctgagatcacacatctgcagcaacagctacaagaaagccaacagatgctgggcagactgatccccgagaaacagattctcaatgaccaactaaagcaggtgcaacagaactccctacaccgagacagtctagtgaccctaaaaagggcccttgaggctaaagaactcgccaggcaacacctccgggatcaactcgatgaagtcgagaaagagactcgctccaaattgcaggaaattgacattttcaacaaccagcttaaggagttaagagaaattcacaacaaacagcagttgcagaagcagaagtcaatggaggcagaacggcttaagcaaaaggagcaggagagaaagattattgagttggagaaacagaaggaggaagcacagagacgagcacaggagcgggataagcaatggctggaacacgtacagcaagaggacgaacaccagcggcctcggaagctccacgaggaagaaaaactgaaaagggaagagtccgtcaaaaagaaagatggcgaggagaagggcaagcaggaagcgcaggacaaactcggaaggttgtttcaccagcatcaggaaccagctaaacctgccgtccaggccccatggagcacggccgaaaagggccctttaaccattagtgctcaggagaatgtgaaggtcgtctattaccgagcactgtatcctttcgagtctaggtcacatgatgaaatcacgattcagccaggagatattgttatggtggatgagtctcagacaggagaaccaggttggctgggaggcgagctcaaaggcaaaaccggctggttcccagctaattatgccgaaaagatcccggaaaacgaagtccctgcccctgtcaagccggtcaccgatagcacctctgctccagcgccaaagcttgcactgagggagaccccagccccactggccgtgaccagttctgaaccatcgaccacgccaaacaattgggctgacttctcctccacttggccaaccagcactaatgagaaacctgagacggataactgggacgcatgggccgcacagcctagccttaccgttcccagcgcgggacagctccggcagcgaagtgccttcaccccggctacagccacaggctcctcccctagtccagtgctaggccagggtgagaaggtcgaaggacttcaggcgcaggccctttatccgtggagagccaagaaggacaatcatcttaattttaataagaacgacgtgatcacagtgctggagcaacaggacatgtggtggttcggtgaagtgcaggggcagaaaggatggttccccaaatcgtatgtcaagcttatatccggacccattcgtaagtccaccagtatggatagtggttcctcagagtctccagcgagtctgaaacgagtggccagtccggctgccaagcctgtcgtatcgggagaggagttcatcgccatgtatacatacgagagtagtgagcagggcgatctcaccttccagcagggtgacgttattttagtaaccaaaaaagatggtgactggtggactggcaccgtgggcgataaggctggcgtgttcccatcaaactacgtgcgattaaaggacagtgaaggaagcggcactgcaggaaaaaccggctctctgggcaaaaaacctgaaattgcccaggttatagcatcttacacagccactggacctgaacagctcaccctcgctcctgggcagttgatcttgatcagaaaaaagaacccaggcggatggtgggaaggagaactgcaggctcgcggaaagaagcggcagattgggtggttccccgctaattacgtgaaactgctgagccctggaacatcgaaaattacccctactgaacctcctaagtcgaccgcactggcagcagtgtgtcaggtgattggcatgtatgattacactgcacagaacgacgacgaattggcttttaataagggtcagatcattaacgtcctgaacaaagaagatcccgactggtggaagggcgaagttaatggccaggtaggtctcttcccatccaattacgtcaaattgaccacagacatggacccatcccagcagtag

SEQ ID NO: 227301 - DNA, 3537 bp, synthetic construct
  misc_feature 1..3537: note = Description of Artificial Sequence: Synthetic coding sequence
  source 1..3537: mol_type = other DNA
atggcgcagtttccaacgccttttggcggttccttggatatctgggctatcacagtggaggaaagagccaagcatgatcagcaatttcattccctgaagccgatcagcgggtttattaccggcgatcaggccagaaatttctttttccagagcggactcccccaaccagtgctggcacagatttgggccctcgccgacatgaataacgacggcaggatggatcaagtggagttctccatcgccatgaagctcatcaaattgaaactgcaagggtaccagctgccctctgcccttcctcccgtgatgaaacagcaaccggttgccatatccagcgccccagcatttgctgctgtcccacccctggctaacggcgctcctcctgtgatccagccgctgcccgcatttgcgcaccctgctgccactctgcccaagagttcctctttctcacgcagtggccctggtagccagctgaatactaagctccagaaggctcagagtttcgatgtggcgtccgtcccgcctgtcgcagaatgggccgttccacagagtagtcggcttaaataccggcaactgttcaatagtcacgataaaaccatgagcgggcaccttaccggccctcaggccaggactattctcatgcaaagcagcttgccacaggcccagctggcctccatctggaacttgagcgacattgatcaggacggcaaattaactgctgaagagttcatccttgcaatgcacttaatagatgtcgcgatgagtggccagccccttcccccagtgctgccaccggaatatatacctcccagttttcggagagtgcgaagtggaagcggaatctccgtaataagctccacttctgttgaccagcggctccccgaggaaccagtactcgaggacgagcagcaacaactggagaagaaattgccagtcaccttcgaggataagaagagagaaaattttgaacggggaaacctggagctcgagaaacgcagacaggccttgctggagcagcagcggaaggagcaggagaggctggctcaattagagcgagctgaacaggaacggaaggaacgggaacgccaggagcaggagcggaaacggcagttggagctggaaaagcagctggaaaaacagcgcgaactcgagagacagcgtgaggaggaacggagaaaggagatagagcgcagagaggccgcaaaaagagaactggaacgccagcgccaattggagtgggagcgcaataggcgccaggaactgctcaatcagcggaacaaggaacaagaggacatagtggtactcaaggcaaagaaaaagaccttagaattcgagctggaagctctgaacgacaaaaagcaccagctagagggcaagcttcaggatattaggtgccggctgaccacacaaagacaggagattgaatcaacaaacaaatcacgagagcttagaatcgccgaaattactcacctccagcaacaattgcaagagtctcagcaaatgctgggtagactgataccagaaaaacaaattctgaacgaccagcttaagcaggtgcaacagaacagcctacaccgggactctttggttacgttgaagcgagcgcttgaggccaaagagctcgcccgacagcacctgcgtgatcagctggacgaggtggagaaagagacccgatctaagctgcaggagatcgacatcttcaacaatcagctgaaggagttgcgagagatacataacaagcagcagctccagaagcagaaatccatggaagctgagcgcctaaaacagaaggaacaagagcgaaagattatagaactggagaagcagaaagaggaggctcaacgaagagcccaggagcgcgacaagcagtggctcgagcacgttcagcaggaggacgagcaccagcggccacgcaagctgcacgaagaagaaaaacttaaacgggaggagtccgtgaagaaaaaagacggtgaggaaaaaggtaagcaggaggcccaggacaaactgggtcgtttatttcatcaacaccaggagcctgccaagccggcagtgcaagcaccgtggtccactgctgagaaaggtccactgacaatatccgcacaggagaatgtgaaagttgtgtactatcgggcactgtaccccttcgaaagccgctcgcatgacgagatcactattcagcctggggatattgtgatggttgatgagagccagaccggtgaaccaggctggctgggaggcgagctgaaaggcaaaactggttggttcccggcaaattacgccgagaagatccctgaaaatgaggttcccgctccagtgaaacctgttactgatagtacatcggcacctgctcctaagctcgctctgagggaaacacccgcacccctcgctgtaacatcttctgaaccctcaaccacccccaacaactgggcagacttctccagcacatggccaacatcaacgaatgaaaaaccagagaccgacaactgggacgcttgggctgcccagccttccctgactgtgccttctgctggacaactccgacaaagatcagcttttactccagccacagcgaccggcagttctccatcgcccgtgttaggtcagggtgagaaagtggagggactccaggctcaggcactgtatccatggcgggctaagaaggacaaccacctcaatttcaataaaaacgatgttatcaccgtgctggaacaacaagacatgtggtggtttggagaggtgcaaggtcagaaggggtggtttcctaaatcatacgtgaagttaatctcggggcctatccgcaaaagtacctctatggactctgggagctccgaaagtccggctagtctaaaacgggtagcgagccctgctgcaaaaccagttgtgagcggcgaggagttcattgccatgtatacttacgaatcaagcgaacagggtgatctgacgtttcagcagggcgacgtgatactagtgaccaaaaaggacggggattggtggactggaaccgtcggtgataaggctggcgtgttccccagcaattacgtgaggctcaaagactccgagggatccgggactgcaggcaaaactggcagtctcggaaaaaagccagagatcgctcaggtcatcgccagctacacagccacggggcctgagcaactcactttagctccaggacagttgatccttattcggaagaagaatcccggaggctggtgggaaggagagctgcaggcccgtgggaagaagcgtcagattgggtggtttcccgctaactacgtgaagctgttgtccccaggcactagtaagatcaccccaaccgaacctccgaaatctacggccctagcagcggtgtgtcaggtcattgggatgtacgattacaccgctcaaaacgatgacgaactggccttcaataagggccagatcattaatgttctgaacaaggaggatcctgactggtggaagggcgaggtgaacggacaggttggtctgtttccatccaattacgttaaactgacaacagacatggatccaagccaacagtag

SEQ ID NO: 227302 - DNA, 3450 bp, synthetic construct
  misc_feature 1..3450: note = Description of Artificial Sequence: Synthetic coding sequence
  source 1..3450: mol_type = other DNA
atggcccaatttcccaccccgtttggtggaagcctggacatatgggccattactgtggaagaaagggccaaacatgatcagcaatttcactctctgaagccaatttctggctttatcaccggcgaccaggcccgaaattttttctttcagagcggcttaccgcaacctgtccttgcccaaatatgggcactggccgacatgaataatgacggaaggatggaccaggttgagtttagcatcgcaatgaaactgatcaagttaaaactccagggatatcagttgccttcagccctcccacccgtgatgaaacaacagcctgtcgccattagctcagctcctgcttttggaatggggggaatcgcttcgatgccacccctcaccgcagtggccccagtcccaatggggtcaattcccgtagttggcatgtccccaacgttagtcagcagtgtcccaaccgcagccgtccccccattagccaatggagcacctcccgtaattcaaccacttcctgcctttgcccaccccgcagcaaccctccctaaatccagttcattctcccggtcaggtccaggctcccagttgaataccaagctgcaaaaggcacaatccttcgacgtggcctctgtgccacctgtagcggagtgggccgtcccccagagtagtaggttgaagtatcggcagctttttaattcccacgataagactatgtctggacacctcacagggccacaggctcggacaatcttgatgcagtctagtctgccccaggcccagctcgcttctatttggaatttatccgacattgaccaggatggcaaacttacagctgaggagttcatactggcgatgcatctcattgatgtagcaatgagtggacaacccttgcccccagtgttgccaccagaatacataccaccttcctttcggagggtgagaagcggcagcggaatctccgttatctcaagtacgtccgttgaccagcgtctcccagaggagcccgttctggaggacgagcagcagcagttggaaaaaaagttgcccgtgactttcgaggacaagaaacgggagaactttgaaaggggaaatctggagctcgagaaaaggcgccaagctttgctcgaacagcagcgcaaagagcaagagaggcttgcccagttagaacgcgcagagcaggagaggaaggagagagaacgccaagagcaagagcggaagcgccagctggaattagagaaacagctcgaaaaacagagagagctggagcggcaacgcgaggaggaacgacgcaaagaaattgagcgacgcgaagccgctaagagggagctggagcgacagagacagctggagtgggagcggaatagaagacaggagctcctcaaccaacgcaataaagagcaagaagacattgtggtccttaaagccaaaaagaagaccttggaatttgagttggaggctcttaacgataaaaagcaccaactggagggaaaactccaggatatccgatgtagacttacgacacagaggcaggagattgagagtacaaacaagagtcgtgagctcagaatcgcagaaatcacacacctgcagcagcaactccaggaatcccaacagatgctgggacggcttattcccgaaaagcaaatccttaacgaccagctaaagcaggtacagcagaattcactccacagggattcactggtgactcttaagcgggctctcgaagccaaggagttggcacgtcagcacctgcgggaccagttggacgaggttgagaaagaaacgagatctaaactgcaggaaatcgatattttcaataaccagcttaaggagctccgcgagattcacaacaagcaacaactacagaaacagaaatcaatggaagcagagcgactcaagcaaaaagaacaggagaggaagattatcgaacttgagaagcaaaaagaggaagcacagcgacgcgcacaggagagggacaagcagtggctagaacacgttcaacaggaggacgaacatcagcgtcctaggaaacttcatgaagaagagaagctcaagagagaggaaagtgtcaagaaaaaagacggcgaagagaaaggaaaacaagaggcgcaggacaagctgggacggctgtttcaccaacaccaggaacccgcaaaaccagcggtccaggcgccttggagcacagccgaaaagggccctctgactatatcagcgcaggaaaacgttaaggttgtgtattaccgggcactctacccctttgagagcagatcacatgatgaaattaccattcagccaggggatatcgtgatggtcaaaggcgagtgggtggacgaatcccagactggcgaacccggttggctgggaggggagctgaaaggaaaaaccggctggtttccggcaaattacgccgagaaaatccccgagaatgaagttcctgctccagtgaagcctgtaaccgattctacctcagctccagcaccaaagttagccttaagagaaactcccgctcctctggccgtgacatcctcagagccgtctacaactccaaacaattgggccgacttttcaagcacatggcctacgtccacaaatgagaaaccggaaacagataactgggatgcctgggctgcccagccttcattaaccgtaccatccgccggacaattgcgtcaacggagcgccttcacccctgccacagccacaggcagctcccctagccccgtattgggacagggggagaaggtggaggggctgcaggcccaagcgctttatccctggcgagccaaaaaagacaaccacctcaatttcaataagaatgacgttataacggttctcgagcagcaggatatgtggtggttcggggaagtgcagggtcaaaagggttggtttcctaagagctacgtaaagctgatttcaggccctatccgcaagagtacaagtatggattccggaagctccgagtcacccgcatccctgaaaagagttgcttctccggctgcaaaacccgtggtcagtggggaagaaattgcccaggtcatagcgtcatacacagctaccggccctgagcagctcacattagctcctggacagctaatcctaatacggaagaaaaaccccggaggttggtgggaaggcgagctgcaagcgagaggcaagaagcgtcagatcgggtggtttcccgcaaattacgtaaaactgctgagccccggaacaagcaaaattacccctacagagcctccaaaaagtaccgcccttgcggctgtgtgccaggtgattggcatgtacgactatacagcccagaacgatgacgagctggcctttaacaagggtcagattataaacgttctgaacaaagaggatccagattggtggaaaggggaggtcaacggacaggttggtctattcccatcaaattacgttaagctgacaaccgacatggacccctcccagcagtag

SEQ ID NO: 227303 - DNA, 5150 bp, synthetic construct
  misc_feature 1..5150: note = Description of Artificial Sequence: Synthetic coding sequence
  source 1..5150: mol_type = other DNA
atggcgcagttcccaaccccgttcggtgggagtctggacatatgggcgataaccgttgaggagcgggctaagcacgaccagcagttccactccctcaaacccatctctgggttcataactggtgaccaggcccgaaactttttcttccagtcaggactaccacagcccgtcctggctcagatctgggcccttgccgacatgaataacgatggcagaatggaccaggttgaatttagtattgcaatgaaactgattaaactgaaacttcagggttatcaactccccagcgccttacccccagtcatgaaacagcaacctgttgctatcagcagcgcacccgcttttgggatgggcggaattgccagtatgccaccattgactgctgtcgctcccgtgcccatgggatccatcccggtcgtgggaatgtcgcctaccttggtttccagtgtccccactgctgcagtcccgccactagctaatggggctccccctgtgattcagcccctgcctgcatttgcccaccccgcagccaccctgcccaaatcatcttctttcagtcgctctggccctggcagccaacttaacaccaaattgcaaaaagctcagtccttcgacgtcgcctccgtcccacctgtcgcggaatgggccgtgccacagtcgagccgactgaaatatagacagcttttcaatagccacgataaaaccatgagtggccacctcaccgggcctcaagcacggaccatcctcatgcaaagcagtctaccgcaggcgcagctggcatccatctggaatctgagtgacattgatcaggacggaaaactcactgcggaggaattcattctggcgatgcacctcatcgacgtggcgatgagtggccagcccctgcccccagtgctgcccccagaatacatccccccaagctttcgcagagtccggagtgggtccgggatttccgtcataagctcaacaagcgtggatcagagacttcccgaggagcccgtactggaagacgagcaacagcagctagaaaaaaagctccccgtgaccttcgaagacaaaaaaagggaaaacttcgagagaggtaatctcgagctggagaaacgcagacaagccctgttagaacagcagagaaaagagcaggaacgtctggcccagttggagcgtgctgaacaggaacggaaagagagagagaggcaggagcaggagcggaagagacagctggagcttgagaaacagctcgagaagcagagagagcttgagcgccaacgagaggaggagagacgtaaggaaatcgaacgtcgggaggcagcaaaacgtgaattggagcgacagcggcagctggagtgggagcgtaatcgccgtcaagagctgctgaaccagcgcaataaagaacaagaagacattgtggtgctgaaagccaagaagaaaacgctcgaatttgagctcgaggctctgaatgataaaaagcatcagttggagggaaaactgcaggacataaggtgccgactaacgacgcagcgacaggagatcgagagtactaataaatctcgagaattgagaatcgctgaaattactcaccttcagcagcagctgcaggaatcccagcagatgcttggcaggctgataccagagaaacagatcctgaacgaccagctgaagcaagtgcaacaaaactccctgcacagagacagccttgtcaccctgaagcgcgcactggaggcgaaagagctcgctagacagcatctccgcgaccagctcgatgaggtcgagaaggaaacccgctccaagctgcaggaaatagacatttttaacaaccagctgaaggaactccgggagattcacaacaagcagcagttgcagaagcagaagtcaatggaggccgaaaggctgaagcagaaggagcaagaaaggaagatcatcgagctggaaaagcagaaggaggaggcacagcgcagggcacaggagagagacaaacaatggctggagcacgtgcaacaggaagacgaacaccaacgtccacgcaagctgcatgaggaggagaagctcaaacgggaggagtcagttaagaaaaaggatggggaggaaaaggggaaacaagaggctcaggataaacttgggcgtctgttccaccagcaccaggagcccgcaaagcccgctgttcaggctccgtggagcacggccgagaagggccctttgacaatctccgcccaggagaacgttaaagtggtatactatcgggcactgtatcccttcgagtcaaggtcacatgatgagattacgattcaacctggcgacatagtaatggtggatgaaagccagacaggcgagccaggatggctggggggtgagctgaaggggaaaaccggatggtttccagctaactatgcagaaaagattcctgaaaatgaagtcccagcccctgtcaagccagtgaccgactccacaagcgcccctgcgccaaaacttgccttgagggagactcccgcacctctggccgtcacttcaagcgagcctagcaccacccccaataattgggccgacttttcatccacatggcccacatccacaaacgaaaaacccgagaccgataattgggatgcgtgggccgctcaaccttcgctcactgtgcctagtgcgggacagcttcggcagaggtccgcctttacccccgcaaccgctaccggctccagccccagtcctgttctgggccaaggcgagaaggttgaggggttgcaggcccaagctctgtacccatggcgcgctaagaaagataatcatctaaacttcaacaaaaacgatgtcatcacggtgcttgaacagcaggatatgtggtggtttggcgaggttcagggccagaaagggtggttccctaagtcctatgtcaaactgattagcggacctattaggaaaagcacttccatggactccggatcttcagaatcccccgcttcactgaagagggttgcctcgccagctgcaaaacccgttgtgtcgggggaagaattcatcgccatgtacacatacgagagcagtgagcagggagacttgacattccagcagggcgatgtgattctggtgacgaaaaaagacggtgactggtggaccggaactgtcggggacaaagcaggtgtgtttccatcaaattatgttagactgaaagatagcgagggctccggcactgctggaaaaaccggctcgctgggcaaaaagccagagatcgcccaggttattgcatcatacacagcaacaggccctgagcagctcacattagcacccggtcaactcattctgattaggaaaaagaacccagggggatggtgggagggggaattacaggcacgtggtaagaaacggcagatcgggtggtttcctgccaattacgtcaaactactatctccgggtacgagcaaaatcactcccactgaacctccgaagagcactgctctggcagcagtgtgtcaagtgatcggcatgtatgattacaccgcacagaatgatgatgagctggccttcaacaaggggcagatcattaacgttttgaacaaagaggacccagactggtggaaaggcgaagtaaatggacaggtaggtctatttccatccaattacgttaagctgactacagatatggacccatcgcagcagtggtgctctgacttacacttactcgatatgttaacccccacagagcgtaagcggcagggatacattcacgagttgatcgtgacagaggagaattacgttaacgacctacagttggtaaccgaaatattccagaagcccctcatggagagcgaactcctgacagagaaagaggtcgcaatgatcttcgtaaattggaaagagctgataatgtgcaatataaagctgctaaaagctctgcgcgtgaggaaaaagatgagtggagagaaaatgccagtgaaaatgatcggcgacatactgtcagcccagctgccccatatgcagccctacataaggttttgctctagacagttaaacggggcagcacttatccagcaaaaaacggacgaagcaccagactttaaagagttcgttaagcggctcgcgatggaccctagatgcaagggcatgccgctgagtagtttcatcctaaaacctatgcagcgagtcacgcgttacccactgatcatcaagaacatcctggagaacacgcccgagaatcatcccgatcactctcatcttaagcacgcgctagaaaaagctgaggaactgtgttcgcaagtcaacgaaggagtgcgcgaaaaggagaattcagatcgccttgagtggatccaggctcacgtccaatgcgaagggctctctgagcaacttgtgtttaatagtgttaccaattgcctaggtcctcggaagtttttgcattcgggcaagttgtataaagccaagtccaacaaagagctgtatggtttcctgtttaatgattttctcctgctgactcaaatcaccaagcccctcggctctagtggaacagacaaagttttctcacctaagtctaacctccagtacaagatgtacaaaacaccgatatttctcaacgaggtattggtcaagctaccgaccgatcctagtggcgacgagcctatttttcacattagtcacatcgatcgggtctacacacttcgagctgagtcaatcaacgagaggaccgcctgggtgcagaagataaaagccgctagtgagttatatattgaaaccgagaaaaaaaagcgggagaaggcgtatcttgtcagatcacagcgtgcgacagggatcggacgcctgatggtgaacgtagttgagggcatagagttgaaaccctgcagatctcatggaaaatcaaacccctattgcgaggtcaccatgggtagtcagtgccacatcacgaagactatccaagatacgctcaatcccaagtggaactctaattgtcagttcttcatccgggacttagaacaggaggtgttgtgtattaccgtgttcgagcgagatcaattttcccctgatgacttccttggaaggaccgagatacgagtggcagatatcaaaaaggatcaggggagtaaagggcctgtgacaaaatgcctgctcctccatgaggtcccgaccggagaaattgtcgtgaggctggatctccagctgttcgatgaaccata

SEQ ID NO: 227304 - DNA, 4983 bp, synthetic construct
  misc_feature 1..4983: note = Description of Artificial Sequence: Synthetic coding sequence
  source 1..4983: mol_type = other DNA
atggcccagttcccaaccccgtttgggggtagcctggacatctgggcaattacagtggaggaacgagcgaagcacgatcagcaattccatagcctaaaacccataagcggctttattaccggcgatcaggcacgtaattttttctttcaatccggcctgccccagcccgttctcgcccaaatctgggccttggccgatatgaacaacgatgggaggatggaccaggtagaatttagtattgcaatgaagctaatcaaactgaaactccaggggtaccagttgccaagcgccctgccccctgtcatgaagcaacagcccgtggcaattagctctgcgcctgctttcggtatgggaggtatagctagcatgcctcccctgacggcagttgcacctgtccccatggggtccatccctgttgtgggtatgtcacccactctggtgtcaagcgttccgacggcagcagtgcctccattagcaaatggggcaccaccagtgattcaaccactacccgctttcgcccaccctgccgctacattacctaaatcgagcagtttctctcgcagcgggcctgggtctcagctcaacaccaaacttcagaaggctcaaagttttgatgtggcctcggtacccccagttgccgagtgggccgtgccacaatctagtcggcttaagtacaggcaactatttaatagccacgataaaaccatgtcggggcacttgaccggtccacaggcacggacgatcctaatgcagagctccttgcctcaggcccagctggcttccatctggaatctctccgatattgatcaggacggaaagctcactgctgaagaatttattttagccatgcatttgattgacgtagccatgtcagggcaacctttgccccctgtccttcctccagaatatattcctccatccttccggcgtgtgcgctcggggagcggcatttccgttatttccagcaccagcgtggaccaacgcttaccagaagaaccggtcctcgaggatgaacagcagcagctcgaaaagaagttacccgtaacattcgaggataagaaaagagagaatttcgaacggggaaacctggagctggaaaagcggaggcaggcacttttagagcagcaacggaaggaacaagagcgcttagctcagctggagcgggctgaacaggagcgcaaggaacgtgagcggcaagagcaggagcgaaagcggcagctcgaactagaaaaacagcttgaaaagcagcgggagcttgagagacaacgggaagaggagcggaggaaagagatcgaacggagagaggccgctaaaagagagctggaacggcagagacagttggaatgggagcggaaccggaggcaagagctgctgaaccagaggaataaggagcaggaggatattgtggtgcttaaggcgaagaagaagacactggagtttgagctagaggctctaaacgataaaaaacatcagctcgaaggtaagctccaggatattcgatgcaggttgacaactcagaggcaggaaatagaatcaacaaataaaagcagagagctgcggattgcggagatcacacacctgcagcagcaacttcaggaatctcagcagatgctaggccgtttaatccccgaaaagcagattcttaacgaccagctgaaacaagtgcagcaaaattcactccatcgggactctctggtgactctgaaacgggcattggaggcaaaagagctcgctaggcagcacctgagagaccaactggatgaggtcgagaaagagacgcggtcaaagttacaagagatcgatatctttaacaaccaactcaaagagttgagggagatacacaataagcaacagctccagaagcagaagtctatggaagcggagaggctgaagcagaaggaacaagagagaaaaatcatcgaactggaaaaacagaaagaggaagcacagagacgagcccaggaacgagacaaacagtggttggaacatgtgcagcaggaggacgaacaccagcggcctcgaaaattgcacgaggaggaaaaactgaaaagggaagagtctgtgaaaaagaaggacggggaggagaaagggaagcaagaggctcaggacaagctgggccgactcttccaccagcaccaggaacccgcaaaacctgctgtacaagcaccttggtcgacagcagagaaagggcctctcacgatatccgcgcaagagaatgtgaaagtcgtctattaccgcgcactgtatccgtttgagtccaggtcacacgacgagatcacaattcagccaggagatattgtcatggtcgacgagtctcagactggagaacctggatggttaggcggtgaactcaagggaaaaacgggttggttccctgctaattacgcggagaagataccagagaatgaggtgccagcccctgtgaaacccgtgactgactctacctccgcacctgcgccaaagttggccctgagagagacaccagcaccattggcagtgacctccagcgagcctagcactactcccaataattgggccgacttttcatccacttggccaacatcgaccaatgagaaacccgagactgataattgggatgcctgggcggctcaaccttcactgacggtgcctagcgccggacaacttcggcagcggtccgccttcactccagccacggctacgggctcctcaccatctcctgttctcggccagggggagaaagttgaggggctacaggcccaggccctttacccatggcgggctaaaaaggataatcacctgaatttcaataaaaacgacgtgatcaccgtgttagagcagcaggatatgtggtggttcggagaagtccaagggcaaaagggatggtttcccaagagttacgtgaagcttatttccgggcctattcgtaagtccactagcatggacagcggcagttctgagtctcctgcgtcactcaagagagtcgcttcccctgctgctaagccagtggtgtctggagaagaatttatcgccatgtacacatatgagtcttcagagcagggcgatcttacattccagcaaggtgacgtcatattggttaccaaaaaagacggggattggtggacagggacagtgggagataaggctggcgtgtttccttcgaattacgttagactgaaggattcagaagggtcaggaaccgcgggaaagacgggtagcctcggaaagaagcctgagatcgctcaggtcatcgcgtcttatactgcgacaggccctgagcagctgacattagctccgggacagctcatcctgatccggaagaagaatccgggtggctggtgggagggtgagctgcaggcaagaggtaagaagcgacagattggctggttccccgctaactatgtgaaactcctgagtccaggaactagcaagatcactcccaccgaacctccgaaatcgacagcactggctgctgtgtgccaggtcatcgggatgtatgactacaccgctcagaatgacgatgaactggcctttaacaaaggccagatcataaacgtgctgaacaaggaggatccagactggtggaaaggggaggtgaatgggcaggtgggcctgtttccgagcaactatgtcaagctcaccaccgacatggatccgtctcagcagtggtgctcagatctccacctgcttgacatgctgacaccgacagagaggaaaaggcagggatacatacacgaactgattgtaactgaagaaaattatgtcaatgatctgcagctggtgaccgaaatttttcaaaaacctcttatggagtctgaactgctgactgagaaggaggttgccatgattttcgtcaattggaaggagcttatcatgtgcaatataaaacttctgaaagctctaagagtgagaaagaagatgtctggagagaagatgcccgtcaagatgatcggtgacatcttgagcgcacagcttcctcacatgcagccttatattagattttgtagtaggcagctaaacggcgctgcgctcatccaacaaaagaccgacgaagctccagacttcaaagaattcgtgaaaagactggcaatggatcctcgttgtaagggcatgcccctctcttcattcatcctcaagccaatgcagagggtgacgaggtatcccctgatcattaagaatcagctcgtattcaacagcgtgacgaattgtctgggccctaggaagtttcttcacagcggcaagctctacaaggccaagagcaacaaagaactctacggctttctatttaacgacttcctgctcctgactcaaattacaaaaccactggggtcctcaggcacagataaggtgtttagtcccaaatccaatctccaatataaaatgtacaaaacacccatttttttaaatgaagtattagtaaagctcccaaccgatcccagcggggacgagcctatcttccatatttctcacattgatagggtatataccctccgagctgaatcaatcaacgaaagaaccgcctgggttcagaaaattaaggcggcttccgaactgtatattgagaccgagaagaagaaaagggaaaaggcctacctggtgagatcccagagggccaccggcattggccgattgatggtaaatgttgtcgagggcattgaactaaaaccctgtagaagtcacgggaagtctaatccatactgtgaggtgaccatgggttctcagtgccatataacgaaaacaatccaggatacactgaatccaaaatggaacagcaactgtcagttctttatccgggatctggaacaggaggttctttgcatcactgtgtttgagagagaccagttttcaccagacgatttcctcggacggacagaaattcgggttgccgatataaaaaaagaccagggatccaaaggaccagtcaccaagtgcttgctgttgcacgaagtacccaccggcgagatagtcgtgcgcctggatctgcagctctttgacgagccttag

SEQ ID NO: 227305 - DNA, 348 bp, synthetic construct
  misc_feature 1..348: note = Description of Artificial Sequence: Synthetic coding sequence
  source 1..348: mol_type = other DNA
atggcccagttccctacacctttcggtggaagtctagatatctgggcaataaccgttgaagaacgggctaagcatgaccagcagttccacagccttaaacctatctcagggttcataaccggggatcaagcgcgaaacttcttttttcagtccggattgccacagcccgtgttagcacagatctgggcactagccgacatgaataatgacggccgaatggatcaggttgagttttctatcgcgatgaagctgattaagctcaagttgcaaggttatcagttaccttctgcgctgcctccagtcatgaaacagcagccggtcgcaatctcatcggctccagccttctag

SEQ ID NO: 227306 - DNA, 237 bp, synthetic construct
  misc_feature 1..237: note = Description of Artificial Sequence: Synthetic coding sequence
  source 1..237: mol_type = other DNA
atggcccagtttccaacgcccttcggagggagccttgatatatgggcaatcacagtggaggagcgcgcaaaacatgatcagcagtttcacagtctgaagccgataagcggattcatcacaggagatcaagcaaggaacttcttcttccagtccgggctcccacaaccagtactagcccagatttgggcactggccgatatgaacaatgatggcaggatggatcaggtagagttttag

SEQ ID NO: 227307 - DNA, 5093 bp, synthetic construct
  misc_feature 1..5093: note = Description of Artificial Sequence: Synthetic coding sequence
  source 1..5093: mol_type = other DNA
atgatggcccaatttccaactgccatgaacggcggacccaacatgtgggctattacctcggaggagcgcaccaagcatgatagacagttcgacaatttaaagcctagcggagggtatatcacaggggaccaggctagaaactttttcctccagtcgggcctgccagcccctgtcctggcagagatttgggctctgagtgatctcaataaggatggaaaaatggatcaacaggagtttagtatcgccatgaagctgataaagctgaaacttcaaggtcagcagctgccagtcgtccttccacccatcatgaaacaacctcccatgttcagcccgcttattagcgctcgttttggcatgggctccatgcccaacttaagcattccacagcctctccccccagctgccccaattacttctctatccagcgccacctctggtacaaatctgccaccccttatgatgcctacgccactggtaccttccgtaagcacatcatcactgcccaatggcaccgcctccttgatccagccacttcccatcccgtacagcagctctacgttgccccacgggtcatcctactcactgatgatgggcggattcgggggtgcttccatacagaaagcacagtcactgatcgaccttggctcttcctcttcaacttctagtactgcctcacttagcggtaatagtcccaaaaccgggacatctgagtgggcagtgcctcagcctacccgactgaaatatagacaaaagtttaacaccctggataagtccatgtctggttacttatcaggtttccaggcccgtaatgctctcctgcagtctaatctcagccagacacagctcgcaaccatatggactctggcggacgtggacggggacggccagctgaaggccgaggagtttattctggcaatgcatctcacagacatggctaaagctggacagcccctgcctttaaccctgcctccagagctagtgccaccttcgttcagaggaggaaagcagatagactctattaatgggaccctgccctcttatcagaaaatgcaggaggaggaaccccaaaagaagctgcccgtgacatttgaagacaagcgcaaagccaattatgagcgcggtaatatggaactcgagaaacggagacaggcactgatggaacagcagcagcgggaggccgagaggaaggctcagaaggagaaagaggaatgggaaagaaaacaacgtgagctgcaagagcaggagtggaaaaaacagcttgagttagagaagcggctggagaagcagagggaactggaacgtcaaagagaggaagaacggcgtaaggatattgaacggagggaggcagccaagcaagagttggaaagacagcgcaggctggagtgggaacggattcggagacaggagcttctcaaccagaaaaaccgggagcaggaagagatcgttaggctgaactcgaagaagaagaacctgcacttggagttagaggccctgaacggcaaacaccagcagatctctggacggcttcaggacgtgcgcctcaaaaagcaaacccaaaaaaccgaactggaggttcttgacaagcagtgcgatttagagataatggagatcaagcagcttcaacaagaactacaggagtatcaaaacaagctgatttaccttgtccctgagaaacaattactaaatgagaggattaagaatatgcaattctcaaacactcccgatagcggagtgtccctgttgcacaaaaaaagcttggagaaagaagagctgtgtcaaaggcttaaggaacagctggacgccctcgaaaaggagactgccagcaagctttcagagatggattcctttaacaaccagctcaaatgcggtaacatggatgattctgtgcttcagtgcctgttgtcattactttcttgtctaaacaacctgttcttgctcctcaaggaactcagggaaacatacaacactcaacagctggccttggagcagctgtataaaattaagcgggacaagctgaaggaaatcgagcgaaaaagactcgaactgatgcaaaaaaaaaaattagaagatgaggccgctagaaaggctaagcagggcaaggaaaacttgtggaaggaaaacctccggaaagaggaggaagaaaaacagaaacgcctgcaggaggagaaaacacaggaaaagatccaggaagaggaacgtaaagctgaggagaaacagcgaaaggataaggatactcttaaagctgaagaaaaaaagcgagagacggcatccgtgctcgtaaattacagagccctgtatccctttgaggccagaaaccatgatgagatgagctttaactcaggtgacattatccaggtggacgagaagaccgtcggggaaccagggtggctctacggctccttccaggggaatttcggctggttcccttgtaactatgtagaaaaaatgccttccagtgaaaatgagaaggccgtgagtcccaagaaggccctgctgcccccaactgtgtctctaagcgctactagcacgtctagcgagcctctgtccagcaatcagccggcttctgttactgactaccagaacgtgtcattttccaacctcaccgtcaatacctcctggcagaaaaagtccgccttcacaaggacagtttcacccggaagcgtgagccctattcacggacagggccaggttgttgagaatctcaaggctcaagccctgtgcagttggactgccaaaaaagataaccatctcaattttagcaagcatgacatcatcacagtcctcgaacagcaggagaattggtggtttggcgaagtgcatggtggcagaggttggttcccaaaatcatatgtcaagatcatcccgggatcagaggtcaagcgcgaagaacctgaggcactgtatgctgcggtgaacaaaaagccaacctctgccgcttatagcgtaggtgaggaatacatcgccctgtacccatacagtagtgtagagcccggagacctgaccttcacagaaggcgaggagattttggtgacccagaaagacggagaatggtggacgggcagtattggtgataggtccggtatttttccaagcaattacgtgaagcccaaagaccaagagagctttggaagcgcaagtaaaagtggggcatcaaataagaaaccggagatagcacaagttacctccgcctatgtggcttctggcagtgaacagctgtctctggcgccaggtcagttaatcttgatcttgaaaaagaacacatcgggctggtggcaaggcgagctacaagccaggggcaaaaagcggcagaagggctggttccctgcctctcacgtgaagcttctgggtccctctagcgaaagagccacaccagcgtttcaccccgtgtgtcaagtaatcgcaatgtacgactacgccgcaaataatgaggacgagctgtccttttcaaaaggacagctgattaatgtcatgaacaaggatgaccccgattggtggcagggagagatcaacggcgtcaccgggcttttcccgagcaattacgtgaaaatgacaactgatagcgatcctagccagcagtggtgtgctgacctacagacactggacacgatgcaacctattgaaaggaaaagacagggatacatccatgagctgattcaaacggaggaacggtacatggccgacctgcagttggtcgtggaagtgtttcaaaagaggatggctgagagcggtttcttaaccgagggggaaatggctctaatctttgtcaactggaaagagttgatcatgagcaacaccaagctgctgaaggccttgagggtgcggaaaaaaacgggcggagagaagatgcccgtccaaatgatcggggacatcctggctgcagagctgtcccatatgcaggcttatataaggttctgctcatgtcaactgaatggcgcagcgctattgcagcaaaaaaccgacgaagacactgacttcaaggaatttttaaaaaagttggctagtgatccaagatgtaaaggtatgccactatccagcttcctgctcaaacccatgcaaaggataacacggtatccgttgcttatcaggtctattctggaaaacaccccagaatcccacgcagatcactccagtcttaagctcgctctggaacgtgccgaagaactttgttcacaggtaaacgagggcgtcagagagaaggaaaattccgatagactcgaatggattcaggctcacgtgcagtgtgaaggtttggccgagcagctgatcttcaacagtttaaccaattgtctagggcctcgaaaactgttacatagtggaaagctctacaaaacaaagagcaataaagagctgcacggcttcctattcaacgacttcctgctgctaacttatatggtgaagcagttcgccgtgagttcagggagtgagaagctattttcaagtaagtcgaacgcccagttcaaaatgtataagacccccatattcctcaacgaagtgctcgtgaaactcccaaccgaccccagttccgacgaacctgtatttcacatctcgcacatagatcgggtgtacacccttcggacagacaacattaacgaacgtactgcttgggtgcagaagattaaggccgcttccgaacagtatatagatacagagaagaaaaaaagggaaaaggcataccaggcacggtctcaaaaaacgagtggaatcgggcgtctgatggtacacgtaatcgaagcaacggaactgaaggcctgtaagcccaatggaaaaagtaatccatattgtgagatctccatgggcagccaaagctatactacccggaccatacaagacacgttgaatccgaagtggaattttaattgccagtttttcattaaagatctctaccaggacgtgctgtgtctcaccctcttcgatcgagatcagttttcacccgacgactttctgggcagaaccgaaatcccagtagccaagattaggaccgagcaggagtcaaagggccctatgacccgacgccttctcttgcacgaggtgcctacaggtgaagtatgggtgagatttgacctgcaattatttgagcagaaaaccctgttata

SEQ ID NO: 227308 - DNA, 5013 bp, synthetic construct
  misc_feature 1..5013: note = Description of Artificial Sequence: Synthetic coding sequence
  source 1..5013: mol_type = other DNA
atgatggcccaattccccacagctatgaatggtgggcctaatatgtgggctatcacaagcgaagaacgcacaaaacacgatcggcagtttgacaatttaaagccctctggaggttacatcaccggggaccaggccaggaacttctttctacagtcagggttgcctgccccagttttggcagaaatttgggccctgtctgacctcaacaaagacgggaaaatggatcaacaggaattctccatcgccatgaaactgatcaagctgaaactgcagggacagcagctcccggttgtgctgccccctatcatgaagcagccacccatgttttcccccttgatttccgcccgtttcggaatggggtccatgccaaacctgagtatccctcagcccctccctcccgcagccccaattactagcttgagttcggccacatcgggtacgaacttgccacccctgatgatgccgacacccctggttccatcggtgtccacctccagtctgcccaacggcactgccagtctgattcaacctctgccgatcccgtactcatcttcgactctgccccatgggagctcctatagtttgatgatgggcggatttggcggtgccagtattcagaaagctcagagcttgattgacctcgggtctagctcttcgacttcatcaaccgcaagcctgtctggaaattccccgaaaacaggcacatccgaatgggctgtcccacagcccacaaggctcaagtacaggcagaaattcaacactttggacaagtctatgtctggatacctgtcaggattccaggccaggaacgccctgctgcagtcaaatctgagtcagacccaactggctaccatttggacactggccgatgtggacggggacggacagctgaaggcggaagagtttatcctcgccatgcacctgactgatatggctaaagcgggacagccgcttcccctcactcttcctcccgagcttgtcccaccctctttccggggtggaaagcagatcgactccataaatgggaccttgccatcttaccagaaaatgcaggaggaggagcctcagaagaagttaccagtgacatttgaggataagcgcaaggctaactatgagaggggtaatatggaactggaaaagagacggcaggctctcatggaacaacagcagagggaagccgagagaaaggcacaaaaagaaaaggaggaatgggaacgtaagcagcgcgaactacaggaacaggagtggaagaaacagctcgagttggaaaagagattagaaaagcagcgcgagttggaaagacagcgtgaagaggaacgcaggaaggatattgagagacgagaagcggctaaacaggaactggagcgacagagacgcctcgagtgggagcggataaggcggcaggaattgttaaaccagaagaatagggaacaggaagagattgtgcggctaaatagcaagaagaagaatctgcacctagagctcgaagccctcaacgggaagcaccagcagatctcaggcaggctccaggacgtacgcctcaagaaacagacacaaaaaaccgagctagaagtgttggataaacagtgcgacctcgagataatggaaatcaaacagttgcagcaggagctacaggagtatcagaataagctgatctatttagtgccggaaaagcagctcctaaatgagcgtattaagaacatgcagttttcgaatacgccagactccggagtctccctgctgcacaaaaaatctctggagaaagaggagctctgtcaacggctgaaggagcagttggacgctctggagaaagaaaccgcgtctaaactatctgaaatggacagctttaataaccagttgaaggagcttagagagacctataacacccagcagttggccctggaacagctgtataaaataaaacgggataaattaaaggaaattgaacgtaaaaggctagagttaatgcagaaaaagaagctggaagatgaggccgctcgaaaggccaaacagggcaaagagaacctttggaaagagaaccttcgaaaggaagaggaggagaaacaaaaacggttgcaggaggagaagacacaggagaagattcaggaagaagagcgaaaggccgaggagaagcaaagaaaagacaaagacaccctgaaggcagaggaaaagaaacgcgagacagcctctgtgttggtcaactatagagcgctctatccctttgaggccaggaatcatgacgagatgagttttaacagcggggacattatccaggtggacgaaaaaacagttggagaacccggttggctctatggttctttccagggcaatttcggatggttcccctgcaattatgtagaaaaaatgccgtcttcggagaacgagaaagccgtttctcccaaaaaggctctgctgcctcccaccgtgagtttaagtgcaacgtcaacaagcagtgagcccctgagttcaaaccaacctgctagcgtaacagactaccaaaatgtctctttctccaatctgaccgtgaatacaagttggcagaagaagtctgccttcactcggactgtgtctcccggatccgtttcccccattcacggtcagggccaggtggtcgagaatctgaaagcccaggcgctatgctcgtggacagccaagaaggacaatcaccttaactttagtaaacatgatatcatcacggtgctcgaacagcaggagaactggtggttcggtgaggtgcacgggggacgaggatggttcccgaagtcctacgttaaaattattcctgggagcgaggtcaagagagaggagcctgaagccctgtatgctgcggttaacaagaagccgaccagcgcggcttacagcgttggggaggagtatattgctctgtacccctactcttctgtggagccgggagaccttacctttactgagggagaggaaatcttggtgacgcaaaaggacggagagtggtggacaggaagcatcggtgatcggtctgggattttcccaagcaactacgtcaagcctaaagatcaggagagtttcggttccgcctccaagtcaggcgcatccaataagaaacccgaaattgcgcaggtgacatctgcatatgtggcttctggctcagaacagttgtcactagctccaggccagctgattctgatcctgaaaaagaatacctctggctggtggcaaggcgagctacaggccagaggtaagaagcggcagaaaggctggttcccagctagtcatgtgaagctgctcggccctagcagcgagcgagcaactcccgctttccacccagtgtgtcaggtgatcgccatgtatgattatgcagcaaacaatgaagacgaactctcgttcagtaaaggacagttaatcaacgttatgaacaaggatgacccagattggtggcagggggaaatcaatggtgtcaccggcctgtttccaagtaactatgtgaagatgactacagattctgatccatcgcagcagtggtgcgcggacctgcagaccctggatacaatgcaaccaatcgagagaaagcggcagggttacattcatgagctgattcagacggaagagaggtatatggctgatctgcagcttgtggtggaggtgtttcaaaagcggatggctgagtccggcttcctcacagagggagagatggctcttatcttcgtcaattggaaagagctgatcatgtccaatacaaagctcctcaaggcgctgagggtgaggaaaaagactgggggtgagaaaatgcctgtgcagatgataggggatatccttgctgctgagctaagtcacatgcaagcctatatacggttttgtagttgtcaactgaatggagcagctttgctgcagcagaagacggacgaagacacggactttaaggaattcctgaaaaaacttgcatctgaccccaggtgtaagggcatgccgctcagctcttttctgctaaagcccatgcaaagaattaccagatatccactcctgatccggtccattttggaaaacactccagagagccacgcagatcatagctcccttaagctcgccctggagcgggcagaagaactgtgcagtcaggttaatgagggggttcgtgagaaggaaaattccgataggctcgagtggatacaggcccacgtgcagtgtgaaggacttgccgagcagctaatttttaactccctgactaattgtctggggccacgtaagctgcttcactccggtaaactgtacaaaactaaatccaataaagagctgcatgggtttctgtttaacgatttcctcctcctgacgtacatggttaaacagttcgctgtttccagtggctctgaaaagcttttctccagcaagtcgaacgctcaatttaaaatgtataagacccccattttcctgaacgaggtgctggtgaaactccctactgacccctcctccgacgagcctgtatttcatatctcccacattgacagggtgtacaccctgaggaccgataatatcaatgaacgaactgcatgggtccaaaagattaaggcagcatcagagcagtatatcgacaccgagaaaaaaaagcgcgagaaggcctaccaggccaggagtcagaaaactagcggaattggccgactcatggttcatgtcatcgaggctacggaactcaaagcttgtaagcctaacggtaagtcgaacccctactgcgaaatctcaatgggcagtcaatcgtataccacccgcaccatacaagacactctcaatccgaaatggaatttcaactgccagttttttattaaagacctctatcaagacgtactttgtctgacactgtttgacagagaccagtttagccccgacgactttttgggaaggaccgagatccctgtcgccaagattcgtaccgagcaggagagtaagggaccaatgactcgacgcctgctcctgcatgaagtccctacaggagaagtgtgggtgcggtttgatcttcagttattcgagcaaaaaacattgctgtag

SEQ ID NO: 227309 - DNA, 5012 bp, synthetic construct
  misc_feature 1..5012: note = Description of Artificial Sequence: Synthetic coding sequence
  source 1..5012: mol_type = other DNA
atgatggctcagtttcctacggcaatgaacggcggacctaatatgtgggctatcacctcagaggagaggacaaagcatgatagacagttcgacaacctcaaaccgtccgggggttatataacaggagaccaggcccgaaatttcttcttgcagagcggattaccagccccagtgcttgccgagatatgggcgctctcagacctgaacaaagacgggaaaatggaccagcaggagttctcaattgcgatgaagctgattaagctgaaactgcagggccaacaattgccggttgtactcccccctattatgaaacagcccccaatgttctcacccttgatctccgcacgatttggtatgggtagcatgcccaacctgagtatcccacagcctctaccccctgccgcacccatcacatccctgagcagcgccacaagcggcaccaacctcccccctttgatgatgcccaccccactggtgcccagtgtgtcaacctcctctctgcccaacggcacggcgagtctgattcagccactgcccatcccatatagctccagcacactgcctcacggatcttcctacagcctgatgatgggaggctttggaggggcatctattcagaaagcgcaatcacttatcgacctcggcagctcgagctccacctccagcaccgcgagtcttagcggtaacagccctaagacaggcacctcagaatgggccgtgccgcagcctacccggctgaaatatcggcaaaaattcaatactctggacaagagcatgtctggatatctgtctgggttccaggcacgtaatgccctgttgcagtctaacctgagccaaacccagctagccactatctggacactggcggatgtagacggtgatggtcagctgaaggctgaagagttcatactggcaatgcacctcaccgacatggccaaagcagggcaaccattacccctgacactgcccccagagctggtgcctcctagtttccggggaggcaagcagatcgattcaataaatggaacactgccgtcctatcagaagatgcaagaggaggaaccgcaaaagaagctgcccgtgaccttcgaagacaagagaaaggccaattatgagcgcggaaatatggagctcgagaagagacggcaggcgctcatggaacaacagcaacgggaggctgagaggaaagcccagaaagaaaaagaggagtgggagcggaagcagcgcgagctgcaggagcaggaatggaagaagcagctggaactggagaaacggttagagaaacaaagagaactggagagacaaagagaggaggaacgtaggaaagacatcgaaaggcgggaggccgctaaacaggaactggagaggcagcgaagattggaatgggagagaatccggagacaagaactcctgaaccaaaagaaccgggaacaggaggagatcgttagactaaattccaagaagaagaacctgcacctggagctggaggccctgaatggaaagcaccagcagatttccggacgccttcaagatgtacggctgaaaaaacagacccagaagacggagcttgaggtcctcgataagcaatgtgatctggagattatggagataaagcagcttcaacaagaacttcaggaatatcagaataagctgatttatcttgtccctgaaaagcagcttcttaacgaacggattaaaaacatgcagtttagtaacacaccggatagcggcgtgtcactgcttcataagaaatctcttgagaaggaggagctttgccaaagactcaaagagcaactggacgcactggagaaggaaactgcaagcaagttgtccgagatggacagttttaataatcagctcaaagagctcagagagacttacaacacccaacagctggctctcgaacagctttacaagatcaagcgagataaactcaaagagattgagcggaaaaggctcgaactcatgcaaaagaaaaagctcgaggatgaggcggcacgcaaagccaagcaggggaaagagaacttgtggaaagaaaacctcagaaaagaggaagaggaaaaacagaaaaggttgcaggaggagaagacccaggagaagatccaggaggaggagcgaaaagcggaggagaagcagagaaaagacaaggatactctcaaggccgaagaaaagaagagagaaactgcttctgtgctcgtgaactacagagccttgtacccttttgaggcacgcaatcacgatgaaatgtctttcaatagcggtgatatcatacaggtagatgaaaagaccgtgggagaaccaggctggctttatggcagctttcagggaaactttggttggtttccatgtaattacgtggaaaagatgccgtcttccgagaatgaaaaagctgtaagtcccaagaaggctttgctgcctcccacagtctcactctccgcaaccagtacatcaagtgaaccgctcagtagcaaccagcccgctagcgtaaccgactaccagaacgttagctttagcaatctgaccgtcaatacgagttggcagaaaaaaagcgcctttacgcgaaccgtgtcccctggcagcgtcagccccattcatgggcaaggtcaggttgttgagaatctgaaggcccaggccctgtgttcatggacagccaagaaagataaccatctgaacttctccaagcacgacatcataactgtactggagcagcaggagaactggtggttcggtgaggtacacggcggtcggggatggttccctaaatcctacgtgaagattattcccggttcggaggttaaacgggaagaacctgaagcactctacgctgctgttaacaaaaagcctaccagcgcagcttactctgtaggcgaagagtatatagctctgtatccctattcctccgtcgaaccaggggatctaactttcaccgagggcgaagaaatccttgtgactcagaaggatggagagtggtggactggctctatcggcgatcggtcaggcatcttccctagtaactacgtgaagccaaaggatcaggagtcctttgggtccgcatccaagagtggtgcttcaaacaagaaaccggagattgctcaggtgacctcggcctacgtggcctcgggttccgaacagctgtcgctggcacccggacagctgatattgatcttgaaaaagaatacctcaggttggtggcagggagaactgcaggccagaggcaagaaacgtcagaagggatggttccctgcttcacatgtgaagctgctgggcccaagttcagagcgggctacaccagccttccatcccgtgtgtcaagtaatcgcgatgtacgattacgctgcaaacaacgaagatgagctcagtttctcaaagggccagctgatcaacgtgatgaacaaggatgatccagattggtggcagggtgagatcaacggcgtgactggactcttcccttctaactacgtcaagatgacgaccgactccgacccatctcaacaatggtgtgctgacttacagaccctcgacaccatgcagccgattgaaagaaaacgccaaggctatatccatgagcttattcagaccgaggaaagatacatggcggaccttcagctcgttgtggaggtcttccaaaaacgaatggccgaatcaggctttttgacggagggcgagatggccctcatttttgtgaattggaaagagctcattatgagcaacaccaaactgcttaaagctctgagggttcggaaaaagactggcggtgagaagatgcctgttcagatgattggcgatattctggccgcagaactcagtcacatgcaggcatacatccgcttttgcagctgtcagctgaacggcgcagcactcctacagcagaagaccgatgaagatacggacttcaaggaatttttgaaaaagctggcttcagatcctcgctgtaagggtatgcccctgtcctcatttctactaaagcccatgcagagaatcacaagatacccactccttatcagaagtatcctggagaacacacccgaatcgcatgcggaccactcgagcctgaagttggcacttgaacgggcagaagaactgtgctcacaggtaaacgagggcgtgagggagaaagagaactcggataggctggaatggatccaagcgcacgtgcaatgcgagggtctcgctgagcagctgatctttaatagcttgacaaactgcttgggcccaagaaaactgctgcactccggaaaactttacaagactaagtccaataaggagttgcatgggttcctgttcaatgatttcctgctgctgacgtatatggtgaaacaattcgccgtttcatctggctccgagaaacttttcagttccaagagtaatgcccagtttaagatgtacaagactccaatcttccttaatgaggttctcgtcaaattacctaccgaccccagcagcgacgagccagtgttccacatttcccatattgatagggtgtacactctccggactgacaacattaacgaacggactgcgtgggtgcaaaaaatcaaagcggctagcgaacaatatatcgacacagagaagaaaaagcgagaaaaggcctatcaggcccgtagccagaagacgtccggtattggcaggctgatggtccacgtcatcgaagccactgagctgaaagcttgtaaaccgaacggtaagagtaacccatactgtgagatctctatgggatcccagagttataccacacggacaatccaagacaccttaaaccctaagtggaactttaactgtcagttctttatcaaagatctgtaccaggacgtgttgtgcctgacgctttttgaccgagaccagttctcccctgatgattttctgggcaggaccgagatcccagtggcaaaaattagaaccgagcaggagtcgaaagggccaatgactaggcggcttctgctgcacgaggttcctacaggtgaggtttgggttagattcgacttgcagctgtttgaacagaaaacactcctgta

SEQ ID NO: 227310 - DNA, 1836 bp, synthetic construct
  misc_feature 1..1836: note = Description of Artificial Sequence: Synthetic coding sequence
  source 1..1836: mol_type = other DNA
atggctcagtttcctacggctatgaacggcggtcccaatatgtgggcgatcacatctgaggagcgcacaaaacacgatcgccagtttgataacttaaaaccaagcggcggatacatcacgggagatcaggccaggaacttcttccttcagagcggcctgcctgctccagttctcgccgagatttgggccctcagtgatctaaacaaagacgggaagatggaccagcaagagttcagcattgcgatgaagctgataaaattgaaattacaaggacaacagctccccgtcgtgttgccaccaataatgaaacagccgccaatgtttagccctctcataagtgctcgtttcggcatgggttctatgcccaatctgtcgattcctcagcccctgccacccgctgcgcctattaccagcttatcaagtgcgaccagcggtaccaatctaccccctctcatgatgcctactcctttggtcccaagtgtttctacatcctcccttccaaacggcaccgctagcctcattcagcccctccccatcccttacagctcatccaccctaccccacggctcatcgtatagccttatgatggggggttttggaggggctagtatccaaaaggcgcagtcacttatcgacctgggatcttctcggtcctggtcttcgggttcatctgctcacagccctgctacccaccgcgctcctttgtccagccctgtccccaactcatccacttccagcacagcgtcattgtctggcaatagtcccaaaaccggcaccagcgagtgggccgtgccacaacctacaagactcaagtatcgccagaaatttaacacactcgacaaatcgatgtctggatacctttctggatttcaggcacgaaacgctctgttgcagagcaatttatcccagactcaacttgcaacgatatggactctggctgatgtggacggtgacgggcaactcaaggccgaggaatttatccttgctatgcacttaactgacatggcaaaagccggacagcctttacccctgacactgccaccagagcttgtgccaccatcattcagaggcggtaaacagatagactcaattaacggaacccttcctagctaccagaagatgcaagaagaagagcctcaaaagaaactccccgtgactttcgaggataagcgtaaggccaactacgagaggggcaatatggagctcgaaaagagacggcaggctttgatggaacaacagcaacgggaggccgaaaggaaagctcagaaggaaaaggaagagtgggaaagaaaacagcgcgagcttcaggagcaggaatggaaaaagcagctagaactagagaaacggctggaaaagcagagagagctcgaacggcagcgggaggaggaaaggagaaaggacattgaaaggcgtgaagcggcaaaacaagagcttgaaagacagcgcagattggaatgggagcgcataaggagacaggagctactgaatcaaaagaaccgggagcaggaagaaatcgtacggcttaattccaaaaagaaaaacctgcatttagaacttgaagcattgaatgggaaacatcaacagatctcgggacgcctccaagacgtacgactgaagaagcaaacacagaagactgaactcgaggtgctcgacaagcagtgtgatcttgaaattatggaaattaagcagttgcaacaagagctccaggaatatcagaataagctgatatatctggtaccagagaagcagttacttaatgagaggatcaagaacatgcagttctcaaacacacccgacagtggggtgtccctcttgcataaaaagtcgctcgaatag

SEQ ID NO: 227311 - DNA, 3750 bp, synthetic construct
  misc_feature 1..3750: note = Description of Artificial Sequence: Synthetic coding sequence
  source 1..3750: mol_type = other DNA
atgatggcccagttcccaaccgccatgaatgggggaccgaatatgtgggccataacatcagaggagcgaacaaagcacgaccggcagttcgataatctcaaacccagcggaggatatataactggtgatcaggctcggaatttttttctgcagtccgggctcccagctccagtactggccgagatttgggctttaagtgacctgaacaaggacgggaagatggaccagcaagagttttccatcgcaatgaaactgatcaaattaaagcttcagggccagcagcttcccgtggttctgccacccataatgaagcagccacctatgttctctccgttgatcagcgccaggttcggtatgggctccatgcccaatttgtccattcctcagcctcttcctccggctgcccctattacatccctgtcaagtgctacaagtggaactaatctgccccctctgatgatgcccaccccactggtgccatccgtttctacgtcatcactgccaaacggcacagccagcttaatccaacctttacccataccctactccagtagtaccttacctcacggatcctcatactccctgatgatgggtggattcgggggagcctccatacaaaaggcccagtccctcatcgatctcggatccagttccagtacttccagcacagcgagcctcagcggaaattcaccaaaaacaggaacatctgagtgggcggtgccacaacccaccagactgaaatacaggcaaaaattcaatacactcgacaagagcatgagtggatatttgtcaggcttccaagcaagaaacgcgctgctgcagagcaacctgtctcagactcagcttgcgacgatttggacactggccgacgtcgatggtgacggccagctcaaggcggaagaattcatcctcgccatgcacctcaccgacatggcaaaggcgggacagccactcccattaacgcttccccctgaactcgtgccgccaagcttcaggggaggcaaacagatcgattctatcaacggcactcttccctcttatcagaagatgcaggaggaggaaccccagaaaaaactgcccgtgacctttgaggacaagcggaaagcaaactacgagagaggcaatatggagctggagaagaggcggcaggcactcatggaacagcagcaacgagaggccgagcgcaaggctcagaaggagaaggaggagtgggagcggaaacagcgcgaattacaggagcaggagtggaagaaacagttggagctggagaaacggcttgagaaacagcgagaattggagcggcagcgtgaagaggagcgaagaaaagacattgagagaagagaggctgcaaaacaagagctggaacggcagcggaggctggagtgggagcggatccgcagacaggagctgctgaatcagaagaaccgtgagcaagaggagattgttcgactcaacagtaagaaaaagaacctccatctcgagctggaggcgttgaatggtaagcaccaacagatatccggacggcttcaggacgtacgcctcaaaaaacaaacccagaagactgaactggaggtactcgacaaacaatgtgatcttgaaatcatggaaattaagcaattacagcaagagctccaggaataccagaataaactcatctaccttgtccctgagaaacagctgctgaatgagagaattaaaaatatgcagttctcaaacaccccagattccggtgtatctctcctccacaagaagagcctggaaaaagaggagctgtgccagaggctgaaggagcagctggacgcacttgagaaggagactgccagtaaattgtccgaaatggactcatttaataatcagctcaagtgtggcaacatggatgactctgttctccagtgcctacttagtcttctgagctgcttgaacaacctgttcctgctgttgaaagaactacgcgagacctacaacacacagcagctcgctctagaacaactttataaaattaagagggacaaactaaaagagatagagcgaaagcgcctggagcttatgcaaaaaaagaagcttgaggatgaggccgcacggaaagccaagcaaggcaaggaaaacctgtggaaggaaaatctgagaaaggaagaggaagagaagcagaagcgcctgcaggaagagaagacacaggagaagattcaagaggaagagagaaaggctgaggagaagcagaggaaggataaggatactttaaaagccgaagaaaagaaacgggaaactgcgagtgtgctggtcaactatcgagccctctatcccttcgaggctagaaatcatgacgaaatgagttttaatagcggtgatatcatccaggtggatgaaaaaacggtgggagaaccaggatggctgtacggcagctttcaagggaactttggctggttcccctgcaactatgtggagaagatgccatcttcagagaacgaaaaggccgtttcccctaaaaaggccctgctgccccctactgtgtctttatccgctacttccacgtcatccgagccactctcttcaaaccagcccgcatcagttacagattatcagaacgtctccttttctaatctgactgtcaatacctcgtggcagaagaagtcagcctttacccgaactgtgagccctggctccgtctcgcctattcacgggcagggccaggtggttgagaacctcaaagcgcaagcactttgtagctggactgctaagaaagacaaccatctgaatttttccaagcacgatataatcactgtgctggaacaacaggaaaattggtggtttggcgaggtccacgggggacggggttggtttccaaagagctatgtgaaaatcataccaggtagcgaagtcaaaagagaggagcccgaagcattgtatgcggctgtgaacaagaaacccacgagtgcagcctattctgtgggtgaggaatacatcgcactttacccctactcaagcgtggaacctggggatctgacatttactgagggcgaggaaatcctggtgacccagaaagacggtgaatggtggacaggctcgataggggaccgtagcggcatttttccatccaactatgtaaagccaaaagatcaagagtcattcgggtctgcgtcaaagagcggggcttccaacaagaagccggagatcgcacaagtgacatctgcatacgtggcatctggcagcgagcagctctcattagccccaggccaactgattctgattctgaagaagaacactagtggctggtggcaaggagagttacaggcacgaggaaaaaaacggcagaaggggtggttccctgcgtcccatgttaaactgctcggtccgagctctgagagagccactccagccttccacccggtgtgccaagtgattgcaatgtacgactatgccgctaacaacgaggatgagctatctttctccaagggccagctcatcaatgttatgaataaagatgaccctgattggtggcagggcgaaatcaatggcgttacaggtctgtttccttcaaactacgtgaaaatgaccaccgactctgatccatcccaacaatggtgcgctgacttgcagaccttggacacaatgcaacccatcgagaggaagcgtcagggatatattcacgaactgatccaaactgaggaacggtatatggctgatctgcagcttgtggtggaggttagacgacttcttttggccagctcccgcggtatctgctgtttgagctag

SEQ ID NO: 227312 - DNA, 1899 bp, synthetic construct
  misc_feature 1..1899: note = Description of Artificial Sequence: Synthetic coding sequence
  source 1..1899: mol_type = other DNA
atgaatcgatacactactataaggcaactcggcgacggaacctatggatcagtccttttggggagatctatcgagagcggtgagcttatcgctattaaaaagatgaagcgtaagttctatagttgggaagagtgcatgaacctacgcgaagtcaagagcctgaagaaactcaatcacgccaatgtggtgaagctgaaagaagtaattcgtgaaaatgaccacctctactttatattcgagtatatgaaggaaaatctttaccagctgattaaagaaaggaacaagttgtttcccgagtccgctattcggaatattatgtatcaaatcctccaggggttggcattcatccacaagcacggcttttttcaccgtgatctcaagcccgaaaatttactctgcatgggaccagaactcgtaaagattgctgacttcggtctggcacgtgagatcagaagtaagccaccctacactgactacgtttcaacacgatggtaccgtgctcctgaagtgctgctcaggtcaactaactacagctccccaatcgatgtgtgggcagtgggatgtatcatggcggaagtatacaccctgcgtcccctgttccctggcgcatccgagatcgacaccatctttaaaatttgtcaggtgctgggtacgccgaagaagacagactggcccgagggataccagctttcatctgccatgaatttccgctggccccagtgcgtgcctaataatctaaaaacactgattcccaacgcatcttccgaggctgtgcagttgttgcgtgacatgcttcagtgggaccccaagaaaaggccaactgcttcacaggccttgcgctatccgtacttccaggtgggccatcctcttgggtccacaacccagaacctccaggactccgaaaaaccacaaaaaggcatcctcgaaaaagctggtcctccgccttatattaagccggtgccccctgctcagccgccagcaaagccccacactcgcatcagctctcgtcagcatcaagcgtcccagcccccactgcatcttacctatccttataaggcggaagttagccgcacggatcatccatcccacctgcaggaggataaaccaagtccactgctgttcccctctctacataataagcatcctcagtccaagataacagccggactggaacataagaatggcgaaattaagccaaaaagcaggcggaggtgggggctcatcagtcgcagcaccaaggactccgacgactgggccgaccttgacgatcttgacttttctccctccctatctaggatcgacctgaagaacaagaagcgccagtctgacgacaccctgtgccgtttcgaatctgtgctggatctgaagccctctgaaccagtggggaccggaaattcagctcccacacagaccagctaccagcgtcgggatacccctacattgagatctgcagcgaaacaacactatctgaaacacagtcgttacttgcctggaatcagtattaggaatggcattctgagcaaccctggaaaagaattcattccgccaaacccttggtccagttccgggttgtctggcaaatccagcggaactatgagtgtgatctccaaagtgaattctgtcgggagtagttctacctccagttcgggcttaaccggcaactatgtccccagcttcctgaagaaagagattgggtcggccatgcaaagggtccatttagccccaatcccagacccctctcctggttactcatccttgaaggcaatgcgccctcacccaggccgtcctttttttcacacacagcccaggtcaaccccagggctgatcccaagaccgccagcagcccaacccgtgcacggaagaaccgactgggccagtaagtatgcatcacgtaggtag

SEQ ID NO: 227313 - DNA, 1899 bp, synthetic construct
  misc_feature 1..1899: note = Description of Artificial Sequence: Synthetic coding sequence
  source 1..1899: mol_type = other DNA
atgaatagatacacaactatccggcagctgggagatgggacatacgggagcgtgctgctcggccgttccattgagtcaggtgaattaattgccataaagaagatgaagcggaagttttacagctgggaagagtgtatgaaccttcgtgaagtgaagtcactgaagaagctgaaccacgcaaatgtggttaagctgaaagaggtaatcagagaaaacgaccatctgtacttcatcttcgaatacatgaaggagaatctgtaccagttgataaaggagcgcaacaagctgtttcctgagtcagctatcagaaacattatgtaccagattttgcagggattagctttcattcacaagcatggattcttccacagggatctgaaacccgagaatctcttatgcatgggcccagaattggtgaagatcgccgacttcggcctggctcgcgagatccggtctaagcccccttacactgattatgtttctactaggtggtatagggccccagaagtgctcctgagaagtacgaactacagcagtcctatcgatgtgtgggcagtggggtgcatcatggcggaggtttatacattgaggcctttattccctggggcatccgagattgataccattttcaaaatttgccaggtgctgggtacacctaagaaaaccgactggccggaaggttatcagctcagttcagcaatgaactttcggtggccacagtgtgtgcccaataacctgaaaacgctgatccccaacgcctccagcgaggctgtacagcttctgagagatatgctccagtgggatccaaagaaaagacctaccgcctcccaggctctaagatacccatacttccaagtgggacacccgctgggatctacgacacaaaatctgcaggactctgaaaagccgcagaagggaatcttggagaaggcaggtccacctccttacattaaaccggtcccaccagctcaacctcctgccaagccccatacgaggatctcatctcggcagcatcaggccagtcagcccccactgcacttaacttacccctataaggccgaagtcagccggaccgatcacccctcgcacctacaggaggacaagcctagccccctgctgttccctagcctgcataataaacatcctcagtccaagattacggctggccttgaacataaaaacggagaaataaaacctaagagcaggcggaggtggggcctcatctcccgcagcacgaaagactccgacgattgggcggatctggatgacctggactttagtccctcattgtccagaatcgacctgaagaacaaaaaacgtcagagcgacgacaccttgtgtcggttcgaaagcgtgttagatttaaagccgagtgaaccagttggtacaggcaacagtgcgcctacccagacttcctaccagcgcagagatacacctaccctcaggagcgcagccaaacagcattatctcaagcacagcagatatcttccgggaatctctatccgaaacggcatcctgtcgaaccctggcaaggagttcatccccccaaatccatggtcaagtagtggtctgtctggtaagtctagcggtacaatgtctgtgattagcaaagtaaacagcgtgggttctagttctacgtcctcatcggggctaactggcaattatgtccctagcttcctgaagaaagagatcggctcggccatgcagcgcgtacatctagcgccaatccccgacccgtccccaggctactcaagcctcaaggctatgcgtccgcacccaggacgaccattttttcatactcagccacgctccacaccagggctgattcctcgaccccctgccgctcagcccgtgcacggtcggacggactgggcaagcaagtacgcgagtagaagatag

SEQ ID NO: 227314 - DNA, 738 bp, synthetic construct
  misc_feature 1..738: note = Description of Artificial Sequence: Synthetic coding sequence
  source 1..738: mol_type = other DNA
atgtgtgcagaggtaggccctgcactgtgccgcggtatggagcgaaattctcttggctgttgcgaagcgccaaagaagttgagcctatccttttctattgaagctatcttaaagagaccagccagacggagtgacatggacagacccgaaggtcccggtgaagagggacctggggaggccgcagccagcggttccggcctcgagaagccaccgaaggatcagccgcaggagggccgtaagagcaaacgacgagtaagaacaacatttactacggaacagcttcatgagctggagaaaattttccatttcacacattaccccgacgtgcacatcaggagtcagctcgccgcacgcatcaacctgccagaggcacgagttcaaatttggtttcagaaccagagagccaagtggaggaagcaagagaaaattggaaaccttggagctccccagcagctttccgaggcctctgtggccctacccacaaatcttgacgtggcaggaccgacctggacttctaccgctctgcgccgactcgcgccaccaacctcatgttgcccaagcgctcaggatcagcttgcgtccgcctggtttcctgcatggatcaccctgcttccagctcacccttgggaaacccaaccagttccaggacttcctatccaccaaacttgtatccccgtcctttgtatcttgccgcctccacacccgaaatgggggagcatctgcgctacctcaacctag

SEQ ID NO: 227315 - DNA, 738 bp, synthetic construct
  misc_feature 1..738: note = Description of Artificial Sequence: Synthetic coding sequence
  source 1..738: mol_type = other DNA
atgtgtgctgaagtagggccagcgctctgcaggggtatggaacgaaatagtctgggttgctgtgaggctcccaagaagttatccctcagcttctcaatcgaggctatactcaaacgcccagcaagaagatccgacatggatcgccctgaagggccaggggaggaagggccaggagaggcagctgcgtccgggagtgggttggaaaagcctcccaaggaccaaccgcaggagggcaggaagtctaagagacgagtgcggactactttcaccactgaacagcttcacgaactggaaaagatattccactttacccactacccagacgtccatatccggagtcagcttgcagccaggattaaccttcctgaagccagggtgcagatctggtttcagaaccaaagagccaagtggcggaagcaggagaagattgggaacctcggagcaccccagcagctttccgaggcatctgtggcccttcctacaaacttagatgtggctggccctacttggaccagtaccgccctacggcgtctggcacccccaacctcatgttgtccatctgcacaggaccagttggcaagtgcctggttccctgcatggataacactcctgccggctcacccctgggaaacccagccagttcccggactgcctattcaccagacctgtattccagtgctgtgtattctgccccctccgcaccccaaatggggatccatttgtgctacttctacctag

SEQ ID NO: 227316 - DNA, 1749 bp, synthetic construct
  misc_feature 1..1749: note = Description of Artificial Sequence: Synthetic coding sequence
  source 1..1749: mol_type = other DNA
atggccaacgaagattgcccaaaagcagcagacagtcctttcagctcagataagcacgcccagctgatactggcacagattaataagatgaggaatggccaacacttctgtgacgttcagctacaagtcggtcaggagtcattcaaagcacatagactcgtgctggcagccagctctccttactttgcggctctttttacaggcggtatgaaagaatcatctaaagacgtagtccccattctcggaatcgaagccggtatctttcaaatcctgctggacttcatttacacagggatcgtgaacattggagtgaacaatgtgcaggagctaataatagctgctgatatgttgcagctaactgaagtggtacacttgtgttgtgaattcttgaaggggcagatcgaccccttaaactgcatcggcatattccaattctctgaacagatagcctgtcatgatctgctagagtttagtgagaattacatccacgttcatttcctggaggttcactccggggaggaatttttagcactgaccaaggaccagttgataaaaattttgaggagcgaggaattatctattgaggatgaatatcaagtctttctggcggctatgcagtggattcttaaagacttgggcaagagacgaaagcatgtggtcgaggtacttgatcctatcagattccccttgttgccaccgcagaggctgttgaagtacatcgaaggggttagcgacttcaatctccgcgtggctctgcagacattgctgaaggagtactgcgaggtgtgcaagagtcctaaagaaaataaattttgcagttttctgcagacctcaaaagtgaggcccagaaaaaaggccagaaagtatctgtatgcagtaggaggctatactagactgcagggaggcaggtggtctgactctcgggctctcagctgtgttgagcgcttcgacaccttttcacaatattggaccacggtgagctcacttcaccaggcacggtcagggctcggggttactgttttaggaggaatggtctacgctatcggcggtgagaaggattccatgatcttcgattgtactgaatgttatgaccccgtgacgaaacaatggactacggtcgcatccatgaaccacccaaggtgcggcctgggagtctgtgtgtgctacggggcaatttatgctctgggaggatgggtcggcgctgagataggaaacactattgaaagatttgaccccgatgagaacaagtgggaggtcgtggggaacatggccgtttccaggtattattttggttgttgcgaaatgcagggactaatttacgttatcggaggtatatcaaacgaaggaattgagttacgctcttttgaagtatacgatcccctttccaagaggtggtctccactgcccccaatggggacacgacgagcctacctaggggtggcagcattaaacgattgcatatatagcgtcggaggatggaacgagactcaggacgcgctccataccgttgagaaatactctttcgaggaagagaagtgggttgaggtggcttctatgaaggtgccgagagcaggcatgtgtgtggtggctgtgaacggattactgtatgttagtggaggcagatcttcatctcacgacttcctcgcacctgatacccatagatatgaggtgttcaggttgaagtgggaaaatatgtgtattctgttcaatgaccacaaaactttaactaagggtatatttaacctgtag

SEQ ID NO: 227317 - DNA, 1755 bp, synthetic construct
  misc_feature 1..1755: note = Description of Artificial Sequence: Synthetic coding sequence
  source 1..1755: mol_type = other DNA
atggccaatgaagactgtcccaaggcagcggatagcccgtttagtagtgacaagcacgcccagttgatcctcgcgcagatcaacaagatgcgaaatggccaacacttttgcgacgtgcagcttcaggtcggccaggagagctttaaggctcacaggctagtactggcggcttccagcccatacttcgccgcactgttcacaggcggaatgaaagaatcttcaaaagacgtggtcccaatattgggtattgaggccggaatcttccagatcctcctcgacttcatatacaccggtatagtaaacattggagttaacaacgtgcaggagctgattatcgccgcagatatgctgcagctcaccgaagtggttcacctatgttgcgagttcctcaaaggccaaattgaccctctgaactgtatcggcatatttcagttctcagaacagattgcctgtcacgatcttctggaattctcagagaattacatccatgtgcactttctagaagtgcatagcggagaagagtttctggccctgactaaggaccagctgataaaaattctgaggagcgaagagctgtccatcgaagacgaatatcaagtgtttcttgccgctatgcagtggattctgaaggatttagggaaacgtagaaagcatgtggtggaagtactagatccaataagattccccctgctgccacctcagcgtctacttaagtatatcgaaggtgtaagcgacttcaatctgcgggtggccttacaaaccttgttaaaagagtattgcgaggtttgtaagagtcccaaggaaaacaaattttgttctttcttgcagacttcaaaggtcagaccacggaaaaaggcccgtaagtatctttatgctgtcggcggttacaccaggttgcagggaggcagatggagtgatagccgcgctctaagctgtgtggaaaggttcgacaccttctctcagtattggacgaccgtaagctcacttcatcaggcaaggagcggccttggggtgaccgtactcgggggtatggtgtatgccattggcggagaaaaagatagcatgatcttcgactgcactgagtgttatgatccagttactaaacagtggaccactgtcgcaagtatgaatcaccccaggtgtggtcttggagtgtgcgtctgctatggtgcaatatacgcgctcgggggttgggtcggagcagaaatcggaaacaccatcgagcggtttgatcccgatgagaacaaatgggaggtcgtcgggaatatggcagtgtccaggtattacttcggatgctgtgaaatgcagggactgatttacgtgattggcggaatttccaatgagggcatagagctgaggagttttgaagtctacgatccactgagtaagagatggagtcctctccctcctatgggcacacggagggcctacctgggcgtcgcggctcttaacgactgtatctactctgtgggcggatggaacgagactcaggatgcgctgcatacggtggaaaagtattctttcgaggaggagaaatgggtggaagtcgctagtatgaaagttccacgcgctggaatgtgtgtcgtggcggtgaatggactcctgtatgtgagcggcggacggtcaagctcccacgattttcttgccccaggtacattagactcggtggaggtttataatccacacagtgacacctggactgagattgggaatatgatcaccagccggtgcgagggcggtgtcgccgtgttgtag

SEQ ID NO: 227318 - DNA, 3879 bp, synthetic construct
  misc_feature 1..3879: note = Description of Artificial Sequence: Synthetic coding sequence
  source 1..3879: mol_type = other DNA
atgcgggctgtgttgacatggcgggacaaagccgagcactgcatcaacgatatcgctttcaaaccagatggtacgcagttaattttggctgctgggagtcggctactagtgtatgacaccagcgatggaactctgttacaacctctcaaaggccacaaggacacggtctattgtgtggcctacgcgaaggatggaaagcggttcgcatccgggagcgccgataagagcgtcataatttggacatcaaagctggagggcattctaaagtataccagctggtcagttatgtccagcctacacctacacctgcctttcctggggctacacaagaccgtcagggtgaccgccacagataaagcccctaaaggacagggcggacgcattgattgtttgcgacctagtgtgcagaatcaaccaggccagaaacacaatgacgcaatccagtgcgtctcatataaccccattacacaccagctagcctcttgcagtagcagcgatttcggtctatggtcacctgaacagaaaagcgtgtctaaacataagtcctcttctaagataatatgctgtagttggactaatgacggacagtacctggcactgggaatgttcaatggcataattagtattcggaataagaacggggaggaaaaggtaaaaatagagcgtcccggaggatccctatcgccaatttggtccatctgttggaatcctagctccagatgggagagtttttggatgaacagggagaacgaggatgcggaggatgtgattgtgaatagatatatccaagaaatcccgtccaccctcaagtccgccgtgtactcatcccagggcagtgaggcggaagaagaggagcccgaagaagaagacgattcaccacgggatgacaacctagaggagcgtaacgatattcttgccgttgcagattggggacagaaagtgagtttctaccagcttagtggaaagcaaatcggtaaggaccgggctctcaacttcgacccatgttgcattagctattttacaaaaggagagtatattctcctgggcggaagtgataaacaggttagcctgttcacgaaagatggagtacgactggggacagtcggtgaacaaaattcctgggtgtggacctgtcaggcaaaacccgactctaattatgttgtcgtgggttgtcaggacggcaccatctccttctaccagttaatattttctacagtccacgggctgtacaaggacaggtacgcctatcgggacagtatgaccgacgtgatcgtccaacacttaatcactgaacagaaagtccggataaaatgtaaagagttggttaaaaaaatagccatttaccggaatcgcctggcaatccaactgcctgaaaaaatcctgatctacgaattgtactcagaagacttaagtgacatgcactaccgagttaaagagaagatcataaagaaattcgagtgcaaccttttggtagtctgtgccaatcatattattctgtgtcaagaaaagcgcctacagtgtctgagtttttccggcgtgaaggaacgcgagtggcaaatggagtccctgatacgatatattaaggttattggaggtccgccagggagggagggactgcttgtcggcttgaaaaatggccagatcttaaaaatattcgtagacaaccttttcgctatcgtgttgctcaaacaggctactgcagtgagatgcctggacatgagtgcctctcggaagaaattagccgtcgtggacgaaaacgatacatgcttggtttacgatattgatacaaaggagctgctgtttcaagagcccaacgccaactcagtggcatggaacactcaatgcgaagacatgctgtgttttagtgggggaggatacttgaacatcaaggcaagtactttccccgtccacaggcagaaattgcaggggttcgtagtgggctacaacggaagcaaaattttttgcctgcacgttttttcaataagcgccgtggaagtgccacagtcggccccaatgtatcagtacttggaccggaagttgtttaaagaagcctaccagattgcctgccttggggtgacagacactgactggcgcgagctcgccatggaggctctagaaggtctggacttcgagacagccaaaaaagccttcattcgagtccaggacttaagatacctggagctgatatcatctatagaggaacgtaaaaaaaggggcgaaaccaacaatgacctgttcctggctgacgtgttttcatatcaaggaaaattccacgaggccgctaagctgtataagaggtcagggcacgagaacctagcattagagatgtacacagacctgtgcatgtttgagtacgccaaagacttcctcggctctggtgacccaaaggagactaaaatgctgattactaaacaggctgactgggctagaaacataaaagagcctaaggccgctgtggagatgtatatctccgcaggtgagcatgttaaggccatcgagatatgcggggatcatggttgggttgacatgcttatagacattgctaggaagcttgacaaagcagagcgagaaccactcctcctttgtgcaacctacctgaagaaactcgattcccctggctacgcggctgagacctacttgaaaatgggcgacctcaagtcattagtgcagttgcacgtagaaacacagcggtgggacgaagcgttcgccttgggggaaaaacatccagagtttaaagacgacatttacatgccttacgcgcaatggctggcggagaacgataggtttgaggaggctcagaaagctttccataaggccggtcgacagcgggaagccgttcaggtgctcgaacagctgactaataatgccgtcgccgagtcacgttttaacgacgccgcttattattattggatgctgtccatgcagtgcttagacattgcccaggaccctgcgcaaaaggatacgatgcttggaaagttttatcattttcagcgactggctgagctgtaccacgggtaccacgcaattcacaggcacacggaggatccattctctgtccatcggccagagaccctgttcaacatctctagatttctcctgcacagtctccctaaggacactccgagcggcataagcaaagttaaaatcttatttaccctcgctaagcaaagcaaagccctcggcgcttacaggctggcgcgacatgcttatgataaacttagaggactgtacataccagcccgattccagaagagcattgagctcgggacactgaccattagagccaaaccattccatgactccgaggaactggtccctctgtgctacaggtgctcgacaaacaatcctctgctgaacaatctgggcaacgtgtgtatcaactgtcggcagccatttatcttcagcgccagctcatacgacgttttacatctggtagagttctacctcgaggaagggatcaccgatgaggaggccatctctctgattgatctggaggttctgcggccaaagcgggatgatcgccagctggagatcgcaaataattcgtctcagattctgcggctcgtcgagaccaaggactctatcggagacgaagacccctttacagccaaactttccttcgagcagggaggctcagagtttgtccccgtggtggttagtagactggtcctgaggtcaatgtctaggagggatgtgctgattaaaaggtggccacctccacttcgctggcagtacttccgcagcctccttcctgacgccagcataaccatgtgcccttcctgcttccagatgtttcactctgaagattatgagctactggtcctccagcatggatgctgtccctactgccggcgatgcaaagatgatcctggcccatag

SEQ ID NO: 227319 - DNA, 3549 bp, synthetic construct
  misc_feature 1..3549: note = Description of Artificial Sequence: Synthetic coding sequence
  source 1..3549: mol_type = other DNA
atgcgggctgtcttgacgtggagggataaagccgaacattgcattaatgatattgccttcaaacccgatgggacacagcttatactggccgctggatcgcgcctcttagtatacgatacctctgacggaactctcctgcagcccttgaagggccataaagacacagtctactgcgtggcttatgccaaagacggcaaaagatttgcttcaggctctgccgataagtccgtgatcatctggacctccaagctggagggaatcttgaagtacacccacaacgatgccattcagtgcgtgtcctataacccaatcacccaccaactagcaagttgtagttcctcagactttggcttgtggtcccccgagcagaaatcagtttctaagcataagtcttctagcaagatcatctgttgcagttggactaacgatggacagtacctggcattgggaatgtttaacggtattatctctatccgcaataagaatggggaagagaaggtcaagattgagcgcccaggagggtccctctctcccatctggtcaatctgctggaatcctagccgcgaagagcggaacgatattctggccgtcgccgactggggccagaaggtgagtttctatcagctctctggaaagcagatcgggaaagatcgcgcactcaatttcgacccttgttgcatctcctattttaccaagggcgagtacatacttttaggaggttcggataagcaggtgagtctgtttactaaagatggagttcgccttggaacagtgggagaacagaactcttgggtgtggacctgtcaggccaaaccagatagtaactacgtggtggtcggatgccaggacggaacaatatccttttaccagctgattttctctactgttcatggcctatacaaggataggtatgcataccgtgactccatgactgatgtgatcgtacagcacctaatcactgaacagaaggtgcgcatcaagtgcaaagaactggttaagaagatcgccatttaccgtaacaggctcgccatacagttgccagaaaagatcctgatctatgaattgtattcagaagatctatcagatatgcactatcgggttaaggagaagatcatcaagaagttcgagtgtaatctcctagtggtctgtgcgaaccacataatcctttgccaagaaaaaagactgcagtgtctttcctttagcggagttaaggagcgcgaatggcagatggaatctctcattcggtacattaaggtgattggaggacctcccggaagggaggggctactggttggcttgaaaaatggacaaatcttgaaaatattcgttgataatctattcgcaatcgtcctgctcaaacaggccactgctgttagatgcttagatatgtcagcctcaagaaagaagctggccgtagtggatgagaacgacacatgcctggtgtacgatatcgacactaaggaactgttgtttcaagagccaaatgcaaactctgttgcgtggaacacacagtgtgaagatatgctgtgcttctccggaggaggttatctcaatattaaagccagcacttttcctgtgcaccgccaaaagctgcagggattcgtcgtgggttacaacgggagcaaaatcttttgcctccatgtgttcagcataagcgccgtggaagtcccacaatctgccccaatgtaccagtacctcgaccgcaagctctttaaagaagcctatcaaatcgcatgcctgggagttaccgacacagactggagagagttggcaatggaagcactagaaggcctcgatttcgaaactgccaaaaaagccttcatcagggtccaggatctccgttacctggagctgatctcatcaatcgaagaacggaagaagcggggtgagactaacaacgacctgtttctcgccgacgtgttttcatatcagggcaaatttcacgaagcggcaaaactgtacaaacgctccgggcacgaaaacctcgctctggagatgtatacggatctgtgcatgtttgaatatgctaaagattttttggggtccggagatcctaaggaaactaaaatgctgatcacaaagcaggctgactgggcgagaaacatcaaagagcctaaagcagctgtggaaatgtatatctccgccggagaacatgtgaaagcaatcgagatctgcggtgatcatgggtgggtggatatgctgatcgacattgcccgaaagcttgataaagccgagcgggagccactcctgctgtgcgccacttatctcaaaaagttggattctcccggatacgccgcagagacatatttgaagatgggagacttgaagagcctcgtccaattacacgtcgagacgcagagatgggacgaagctttcgcattgggggaaaagcacccggaattcaaagacgatatttacatgccatacgcacagtggctggccgaaaacgacagattcgaggaagctcaaaaagcttttcataaggcgggaagacagagagaagccgtccaggtgctagagcagctcaccaataacgctgtcgctgagagtcggttcaatgacgcagcctattactactggatgctaagtatgcaatgcctggacatcgcccaagaccctgcccagaaggatacaatgttgggtaagttttaccatttccagaggctggccgaactgtaccacggctatcatgcaatccatcgacacaccgaggacccattctcagtacatcggccagagactctgttcaacatatctagatttttactacactccctacctaaggacacaccctccggcattagcaaggtaaagatcctctttactctggcgaaacagtcaaaagcactgggggcttataggctggcaagacacgcttacgataagctgagagggctatacatccctgctcggtttcagaagtcgattgaactcgggacgcttaccatcagggctaagcccttccatgatagcgaagagcttgtcccgctgtgctatcgctgtagcactaataacccacttctcaacaacttaggcaatgtgtgcatcaactgcagacaaccgttcatcttttctgctagcagttacgacgtgcttcacctagtagaattttacctggaggagggtatcacagatgaggaagccatatcattgatagacctagaagtgctccgacctaaaagggacgacaggcagctggagatcgcgaacaattccagtcagatcttgaggctagtagagactaaggactccattggggacgaggatccattcactgccaaactctctttcgagcaggggggttccgagttcgttccggtggttgtgtccagactggttctgcggtcaatgtcccggagggacgttcttatcaaaaggtggcctccacccctccggtggcagtacttcagatctctgcttccagatgcctcaatcactatgtgtcccagctgtttccagatgttccactcagaagactatgagctgctggtgttacagcacggatgttgtccatactgccgtcggtgcaaggacgaccccggaccttag

SEQ ID NO: 227320 - DNA, 3726 bp, synthetic construct
  misc_feature 1..3726: note = Description of Artificial Sequence: Synthetic coding sequence
  source 1..3726: mol_type = other DNA
atgcgcgctgtactgacttggcgggataaagccgaacactgcatcaacgacatcgcctttaaacccgacggaacccagctcatcctcgctgctgggtccagacttctggtttatgacacctcggacggaacactccttcagcccttaaagggccataaagacaccgtctattgtgtagcatatgcaaaagatggaaagcgcttcgcatccggtagcgcggataagtcggtgattatctggacaagcaaactcgaaggaattctgaaatatacacacaacgatgcaatacagtgtgttagttacaaccccattacacaccagctcgcatcctgttcatcaagtgactttgggctctggtcacccgagcagaagtccgtgtccaagcacaaatcttcaagcaagattatctgctgttcctggacaaatgatggtcagtacctggcgttaggcatgtttaacggtataatatctattcgcaacaagaacggcgaggagaaagttaagattgagagaccgggtgggtctttgtcccctatttggagcatctgttggaacccctcatctcggtgggagtctttttggatgaatcgcgagaacgaggacgccgaagatgtgatagttaacagatatattcaggagattccttctacactcaaatctgccgtttattcctctcagggctctgaagccgaagaggaggagcctgaagaggaagatgactctccacgggacgataatctcgaggaaagaaatgatatcttggccgttgccgactggggccaaaaggtaagcttctatcagctttccggcaagcagattggaaaagaccgagcattgaatttcgacccctgctgcatctcgtatttcactaagggtgagtacatcctcctcgggggatcagacaagcaggtcagcttgtttactaaggacggtgttcgactgggcacggtgggcgaacaaaattcttgggtgtggacctgtcaggctaagcccgacagcaactatgtggtcgtcggttgtcaagacggaactatttctttttatcagctcattttttctacagtccatggactttacaaggatcgctacgcgtaccgcgattccatgactgacgtgattgtgcagcacctgatcacagaacagaaggtccgcatcaaatgtaaggagttggtcaagaagatagctatttatcggaaccgcctggcaattcagctgcctgagaaaattctcatctatgagctgtatagcgaggacctttccgatatgcattaccgagttaaagaaaaaataatcaaaaaatttgagtgtaatcttttagtcgtttgcgcaaatcacatcatcctgtgtcaggagaaaagattgcagtgtctcagcttctctggcgtaaaagaaagggaatggcagatggaatcactgattcgatacatcaaggttatagggggacctcctggacgcgaggggcttctagtgggcctgaagaatgggcagatcctcaagatttttgtggacaacctatttgccatcgtgttgctcaaacaagctaccgccgtgagatgtctggacatgagtgcaagtaggaaaaaacttgccgtagtagatgagaatgacacctgcctcgtgtacgacatcgataccaaggagctgttgttccaggagcccaatgcaaatagcgtcgcatggaacacacagtgtgaagacatgctgtgtttctctggtggcggttatctcaacatcaaagcatccaccttccctgtgcaccgccagaaactgcaagggttcgtcgtcggctacaatggtagtaagatcttttgtttgcacgtgttttctattagtgcagtcgaggtgcctcagagcgcgccaatgtaccagtatctcgaccggaaactgtttaaggaagcataccaaatcgcctgcttaggcgtcacagatacagattggagggagctggccatggaagctctagaggggctggactttgagaccgcgaaaaaggcctttattcgtgttcaagatctaagatacctggaactgatatcttccatcgaggagaggaaaaagcggggagaaaccaataacgacctgttcctagccgatgttttttcctaccagggcaagtttcacgaggctgctaaactgtacaaacgttcaggtcacgagaacctcgctttggagatgtatacagacctgtgtatgtttgaatatgccaaggactttctcggcagcggggatcctaaggagacaaagatgcttatcaccaagcaggcagattgggcgagaaatatcaaggagcccaaggccgctgtcgagatgtacatcagtgctggggagcatgtcaaagcgatcgagatatgtggcgaccacggttgggtggatatgctgattgacatcgctaggaaactcgacaaggccgagagggagcccctgctgctttgtgcaacttacctgaagaaactcgattccccgggatacgcagctgagacttacctcaaaatgggggatctgaaaagtctggtgcagttacacgtcgaaactcagagatgggatgaggcctttgcattaggagagaagcatccagagttcaaggatgacatctacatgccctatgcccagtggctggcggaaaatgacagatttgaggaggcccaaaaggctttccacaaagccggtcggcagagggaggccgtccaagtgctggaacagctgaccaacaatgcggtcgctgaaagccgctttaatgacgccgcttactactactggatgcttagtatgcaatgcctggacatcgcacaggatcccgcacaaaaggacactatgctcggcaagttctaccacttccaacgcctggctgagctgtatcacggctaccatgctatccaccgacacaccgaggaccctttcagtgtacaccgccctgagaccctcttcaacatctcccggtttctgttacactccctgcctaaagacactcctagcggcatcagcaaagtgaaaatcttgtttacccttgctaaacaatcgaaggccctgggcgcatacagactagcccgacatgcttacgacaagttgaggggactttatatccccgcacgcttccagaagagcatcgagctgggtacccttacgataagggcaaaacctttccatgatagtgaagagctggtgccactgtgttaccgatgtagcactaacaacccacttctgaataacttgggcaatgtgtgcatcaactgtagacaaccatttatatttagtgcctcaagctatgacgtcctccacctggtggaattctaccttgaggaaggcataaccgatgaagaggctataagtcttatcgatctagaggtcctccggcctaagcgggatgacaggcaacttgagatcgcaaacaattcaagtcagattttgaggctggttgagacaaaggattctatcggagacgaggatccctttacagcgaagctctcctttgaacagggaggcagtgagttcgtgccagtcgtggtctccagactggtgctcaggagtatgagcagaagggatgtgcttatcaaaaggtggcctcctccgcttcggtggcaatacttcaggagcctgctgcctgacgcgagtataacaatgtgcccatcttgctttcagatgtttcattcagaggattatgaattgctggtcctccagcacggatgctgtccctattgtaggcggtgcaaagacgaccctggaccctag

SEQ ID NO: 227321 - DNA, 3396 bp, synthetic construct
  misc_feature 1..3396: note = Description of Artificial Sequence: Synthetic coding sequence
  source 1..3396: mol_type = other DNA
atgcgcgcagtgctgacatggagagataaagctgaacattgtatcaatgacatagccttcaagcccgacgggacccaactaattcttgccgcaggaagcaggctgcttgtttatgatacatctgatggcacattactacagcctctgaaaggtcacaaagacactgtttactgtgtcgcttacgcaaaggacgggctctggtcccccgagcagaaaagtgtgtcaaaacacaaaagctccagcaaaataatctgctgtagctggacaaacgatggtcagtacctggcattgggtatgtttaatgggatcataagcatccggaataaaaacggggaggagaaagtgaaaatagagagacccggtggctcccttagcccaatctggagcatttgctggaatccgtctcgggaggaacggaatgacatcctcgctgtcgcagattggggccagaaagtgagtttttaccagctgtctggtaagcagatcgggaaagacagagctctgaacttcgacccctgctgcatcagctattttactaaaggagaatacatactgttggggggttctgataagcaggtttcactatttaccaaagacggggtgcgcttggggaccgttggcgagcagaactcatgggtttggacgtgccaggcaaagccagatagtaattacgtggtggtcggctgccaagatggtactatctctttttatcagttaatattctccactgtccacgggctttataaagatagatatgcataccgggacagcatgaccgacgtcatagtacagcaccttatcactgagcagaaagttcgcattaagtgcaaggagttagtgaaaaagattgcaatatacagaaataggctcgctatccaattgccagaaaagatcctcatttacgagctgtatagcgaggacttgagcgacatgcattaccgggtaaaggagaagatcatcaagaagtttgagtgtaatttactggtggtgtgcgcaaatcacatcatcctgtgccaagaaaagcggctgcaatgtctttcttttagtggggtaaaggaaagggaatggcagatggagagcctgattaggtacattaaggtgatagggggtcccccagggcgagaaggcctgctggtgggtctgaagaatggtcaaatcctcaagattttcgtcgataacctctttgcaattgtgctgctgaaacaggccacggctgtcaggtgcttggacatgagcgcctcccggaagaaattggcagtagtggatgaaaatgacacttgtctcgtctacgatatcgataccaaagagctcctctttcaggaacctaatgccaatagcgtggcctggaacactcagtgtgaggatatgttgtgtttctctggaggcggatatctgaacatcaaagcgagtaccttccctgtgcaccgccaaaaactgcaggggttcgtggtgggctacaacggatccaagatattctgtctgcacgtgttcagcattagcgccgttgaggttccacaaagcgcgccaatgtatcagtatttggatagaaagctgttcaaagaagcctaccagattgcatgcctgggtgtgaccgacacagattggagggaactggccatggaggctcttgaaggactggatttcgagacagctaagaaggctttcattagagtccaagacttacggtacctggagctgatctcttccatcgaagagaggaagaagaggggagaaacaaataacgatctgtttctggcagatgtgttttcctatcagggcaaattccacgaagccgctaagctatacaaaagaagcggacatgagaacctagcccttgaaatgtatacagacctatgtatgttcgagtatgcaaaagacttcctggggtccggagaccccaaggagacaaagatgctgataaccaagcaggccgattgggcgagaaatatcaaagagcccaaggcagccgtggagatgtacattagtgctggagagcatgtgaaggctatcgagatctgcggggaccacgggtgggtagacatgcttattgatatcgccaggaaactagataaggcggagcgggaacccctgcttctgtgtgcgacttacctcaaaaagctggacagccccggatatgctgctgaaacctatctgaagatgggcgatttaaaatcccttgtgcaactccatgtggagacccagcgctgggatgaagcttttgctttgggggagaaacatcccgaattcaaggatgacatttatatgccatacgcgcagtggctcgcagaaaatgacagattcgaggaggcgcagaaagctttccacaaagcaggccgtcagcgcgaagcagtgcaggtgctcgaacagctgaccaacaacgcggtggcagagtcaaggttcaacgacgccgcttactattactggatgctatccatgcagtgcttagatatcgcccaggcagatccagcccagaaggatacaatgttggggaagttctaccactttcaaaggttagcggagctttaccacggatatcacgccattcataggcatactgaagacccgttttctgttcaccgcccagagaccctgtttaatatctccagattcttgctgcactccctaccgaaggacactcccagcggaatctcaaaggtgaagattctgttcaccttagcaaaacagagcaaggccctgggtgcatatcggcttgcacgccatgcatacgacaagctgagagggctgtacatccccgcacggttccagaagtccatcgaacttggaaccctaactatcagagcaaagccatttcacgattccgaggaacttgttcccctgtgctaccgatgctctacaaacaacccactactgaacaatttgggaaatgtctgcattaactgccggcagccgttcattttctccgcttcctcttacgacgtgctgcacctcgtagagttctacctcgaggagggtatcactgacgaagaagcgatttctctaatcgacttagaagtgctgagacccaaacgcgacgacaggcagctcgaaatcgcgaataatagcagtcagattcttcgtctcgtcgagacaaaggactcgattggcgatgaggaccccttcacagccaagctgtcctttgagcaaggcggttcagagttcgtgccagtggtcgtatctcgcttagtattacgttcaatgagccgaagagatgtgctcatcaagcgatggccacccccactacggtggcagtatttcaggtcgctcctgccagacgcctcaataacaatgtgtccatcttgctttcagatgttccattcagaggactatgaacttctagttttgcaacatggctgctgtccctactgtcgacggtgcaaagatgatcctggtccctag

SEQ ID NO: 227322 - DNA, 3276 bp, synthetic construct
  misc_feature 1..3276: note = Description of Artificial Sequence: Synthetic coding sequence
  source 1..3276: mol_type = other DNA
atgtttaatgggataatctccattagaaacaaaaatggggaagaaaaagttaaaatcgagcggcctggcggttccttaagtcctatatggagtatatgctggaatccgagcagcaggtgggaatcattctggatgaatcgcgagaacgaagatgcagaagatgtcatcgttaacaggtatatccaagagatcccaagcaccctcaaatctgctgtctattcctcacagggtagtgaagcagaagaagaagagcctgaagaagaggatgatagtccaagagatgacaatctggaagaaagaaacgatattctagctgtggcagattggggacagaaggtctccttttatcaactcagtgggaagcagatcggcaaggacagggccctcaacttcgacccctgttgcatctcctattttacgaaaggggaatacattctacttggcggaagcgacaagcaggtgtctctcttcactaaagacggggtgagactaggcacggtgggggagcagaatagttgggtgtggacttgtcaggcaaagccagactccaattatgtggtggtgggttgccaagacggcaccatctccttctaccaactgatcttttccaccgtacacggcttgtataaagatagatacgcttatcgcgacagtatgacagacgtgatcgtgcagcatcttattacagaacagaaagttcgaatcaagtgtaaggagctggttaagaaaatcgctatctaccggaacagactggctattcaactccctgagaaaatccttatatatgagttgtattcagaggatctctcagatatgcactatcgcgtcaaggagaagatcatcaagaagttcgagtgtaatctcctggtggtatgtgccaatcatattatcctttgtcaggaaaagagactccagtgcctatctttttctggtgtaaaagagcgggaatggcagatggagtcattgattcggtatattaaagtaatcggaggccctccagggcgagagggacttttagttgggctaaagaatggccagattctgaaaatctttgtcgataacctgttcgctatcgtgctgctgaagcaggccaccgctgtgcgttgcttggatatgtctgcgtcaagaaaaaagctcgctgtcgtcgatgaaaatgacacatgtctggtctacgacatcgatacaaaagaactcctttttcaagaaccaaatgcgaatagcgtggcttggaacacacagtgcgaagacatgctgtgtttttctggcggagggtacctgaacattaaagctagtaccttccccgtacacaggcaaaagctgcaagggttcgtcgtgggttacaacggatctaaaattttctgcctgcatgtgtttagcatatccgcagtggaagtgccccagagcgctccaatgtaccaatacctagaccggaagttatttaaggaggcgtaccagatcgcctgcctgggcgtcacagacacagactggcgggaactcgcgatggaagcattagaaggtttagatttcgagacagctaagaaggccttcattcgggtgcaggatcttcggtacctcgaactgatcagctcaatcgaggaacgcaagaagaggggggagacaaacaacgacctgtttctcgccgacgttttttcttatcagggcaagttccatgaagcggctaagctttataaacgctcgggccatgagaatcttgccctggaaatgtacactgatttgtgcatgttcgagtacgcaaaggacttcctcggcagcggagatccgaaggaaaccaagatgttaataactaaacaggcagattgggcccgtaacatcaaggaacctaaagccgctgtagagatgtacatctctgccggtgagcacgtgaaagcaattgagatttgtggagaccatggatgggtcgacatgttaatagatatcgcgagaaaacttgacaaagcggaacgggagcctctgctgttgtgcgcgacctacctcaaaaaactggactccccaggatatgcagcagagacctatctgaagatgggagatttaaagagcctggtgcagctgcatgtggagacccagagatgggatgaggcctttgcgctgggcgaaaaacaccccgagttcaaggatgacatctatatgccctatgcccagtggctggctgaaaatgaccgatttgaagaggcgcagaaagcatttcataaggcaggcagacaaagggaagcggtccaggtccttgagcagctgaccaataacgcagtcgcagaatcacggtttaacgacgccgcttattactactggatgctgtcaatgcagtgtctcgatatcgctcaagaccctgcgcagaaagataccatgctgggtaaattttaccacttccagcggttggctgaactgtaccatggataccacgctatccacaggcacactgaagatcctttttccgtgcaccggccagagacgctatttaatattagccgtttcctgcttcacagcctgccaaaggatactccctctggtattagtaaagtgaagatcctcttcacacttgcgaaacaatccaaggcgctgggcgcttacagactggcgaggcatgcctacgacaagctgaggggtctgtatattcctgctaggtttcagaaatcgattgaattgggcactctaaccattagggccaaaccctttcacgatagtgaagaactggttcccttgtgttacagatgtagcaccaataatcctctgctgaataacctgggcaatgtttgcattaattgtaggcaaccatttatatttagcgcaagcagctatgatgtcctgcacctagttgaattctatcttgaggagggaattactgacgaggaggccatatctctcatagatcttgaagtactgaggccgaagagagacgacagacagctagaaatcgccaacaactcttctcagatcctgcgattggtggagactaaggactcaattggggacgaggatccattcacggcaaaactgtcgtttgaacaggggggtagcgagttcgtccccgtcgtagtgtctcgtttagtactgaggtcaatgtctagacgagacgttctgattaaaagatggcccccacccctgcggtggcagtactttaggtcactcttaccggatgccagcataacaatgtgcccttcgtgtttccaaatgtttcatagtgaggattacgaattactggtattgcagcacgggtgctgcccgtactgtcggcgttgtaaggatgatcctgggccttag

SEQ ID NO: 227323 - DNA, 3099 bp, synthetic construct
  misc_feature 1..3099: note = Description of Artificial Sequence: Synthetic coding sequence
  source 1..3099: mol_type = other DNA
atgttcaacggtatcattagtatcagaaacaagaacggcgaggagaaagttaaaattgagcggccaggcggaagtctgtcacccatatggagtatttgttggaatccgtccagagaggaacgtaatgacatcctggcagtcgcagattgggggcagaaagtgagtttctaccagctatcaggcaaacagattggtaaggatagagcccttaatttcgatccttgttgcatctcttactttaccaagggagaatacattttacttggaggcagcgataagcaggtctctttgttcaccaaagacggggtgcgcctgggcaccgtcggggagcagaacagctgggtttggacttgtcaggccaaaccagattctaattatgttgtagttggatgccaagacgggactataagtttttatcaactaatcttttctaccgtccacggcttgtacaaagaccgctacgcctacagggacagcatgacggatgtgatagtccagcacctgatcaccgagcagaaagttcggattaagtgcaaggaattagtcaagaaaattgccatttaccgtaataggctggctattcaactccctgagaaaatcctgatctacgaattatattctgaggatctgtccgatatgcattaccgagtaaaggaaaaaatcataaaaaaattcgaatgcaatctgttagtagtgtgtgcaaatcacatcatactgtgccaggaaaaacgtctccagtgtttgtctttcagtggggtgaaagagcgcgagtggcagatggagagtctgatccgttacattaaagtcatagggggtcctccgggtcgcgaaggcctgctcgtaggcctgaagaacggccagatcttaaaaatttttgtggacaatttgtttgccattgtgctgttaaagcaggcaaccgctgtgagatgcctggacatgagcgccagcaggaagaaactggccgtggtagacgagaacgacacttgtctcgtatacgacatcgatactaaggaacttttatttcaagaacccaacgcaaacagcgtcgcttggaatacccaatgcgaagatatgctctgcttctctggtggtggatacctcaacattaaagcttcgacattccctgtgcaccggcaaaagctgcagggttttgtggttggttataatggatcgaagatattctgcctgcacgtgttttctatttccgctgtcgaggttcctcagtccgcacccatgtaccagtatctggataggaagctctttaaagaggcgtaccagattgcatgtctgggtgtcactgacactgattggagggaactggccatggaggccctggaaggtctagatttcgagacagctaaaaaagcattcattcgcgtgcaggatctgaggtacctggaactaatatcatccatcgaggaacggaagaagagaggggagactaacaacgatctcttcctggcagacgttttcagctatcagggcaaatttcacgaggctgctaagctctataaaaggtcaggtcacgaaaatcttgctctcgaaatgtacacagatctatgcatgtttgaatatgctaaggattttcttgggtcaggcgacccaaaggaaacaaagatgctgattactaaacaggctgattgggcaagaaacatcaaggagcctaaagcagcagtggagatgtacattagcgcaggggagcacgtgaaagccattgagatatgcggcgaccacggatgggttgatatgctaatagacattgctcgaaagctggacaaggccgaaagggagccgctgctcttatgtgcgacgtatctcaagaaattggattctcccggatacgccgctgaaacctacttgaaaatgggggacctgaagtccctggtccagctacacgtagagacccaacgctgggatgaggcctttgctctcggcgaaaaacacccggagttcaaggacgacatatatatgccttatgctcagtggctggcagaaaacgatagatttgaggaggcacaaaaggccttccataaagctggtcgccagcgggaagccgtgcaggtcctggagcagctcacaaacaacgcagttgctgaatccagattcaacgatgctgcctattactactggatgttgtctatgcagtgcctcgatattgctcaggatcccgctcagaaggacaccatgctgggcaaattttaccatttccagcgcctcgccgaactataccatggctatcacgctatccatcggcacactgaagatccattttctgtgcataggcctgagactctctttaacattagccgcttccttctccatagtctgcccaaagataccccaagtggaatttccaaagtaaagattctttttaccctcgcaaaacagagtaaagcattgggagcctacagactagctaggcacgcatatgacaaattgaggggcctctatattccggctagatttcaaaagtctattgagttaggcacacttacaattcgagccaaaccattccatgactccgaggaactggtgcccctgtgctatcgttgtagtacaaacaaccctcttttgaataatctgggtaacgtatgtatcaattgtcgacagcctttcattttctccgcatctagctacgatgtgttgcatctagtggagttctacctggaggaaggcattacagacgaggaggccatctctctgattgacttagaggtgttgaggcctaagcgcgacgataggcagcttgagatagctaataattcttcacagatactgagactggtcgagaccaaagactctattggcgacgaagaccctttcaccgccaagctcagttttgagcaaggagggagcgagttcgttcctgtggttgtttcccggctagtgttacggtccatgagtagacgcgatgttctgattaagagatggccaccacctttgcgctggcagtattttcggagcttgcttcccgacgcctctatcacaatgtgcccgtcatgctttcagatgtttcatagtgaagactatgaactccttgtgctgcagcatgggtgctgtccctattgtagaagatgtaaagacgaccccggtccgtag

SEQ ID NO: 227324 - DNA, 3252 bp, synthetic construct
  misc_feature 1..3252: note = Description of Artificial Sequence: Synthetic coding sequence
  source 1..3252: mol_type = other DNA
atgcgggcagtgctgacgtggagagataaggccgagcattgtattaatgacattgccttcaagccagatggcacccagctgatactagccgctggatccaggctgctggtatacgataccagtgacgggacactgctccagccacttaagggccacaaggatacggtgtactgcgtggcctacgccaaggacggcctttggtcacctgagcagaagtctgtctctaaacacaagtctagctctaagataatctgctgcagggaggagaggaacgacattctggctgttgcagactggggccaaaaggtgtcgttttatcagctctccggaaagcaaatcggaaaggaccgcgctctgaattttgacccctgctgtatctcctattttacaaaaggagaatacatcctgttgggcggatctgacaagcaggtgtctctgttcaccaaggacggtgtccgactggggaccgtgggagaacagaactcctgggtgtggacttgtcaggcgaaacccgatagtaattacgtggtggtaggctgtcaggacggcaccatctctttctaccaactgatcttcagtaccgtccatggtctatacaaagatagatacgcataccgagacagcatgactgacgtgatcgtccagcacctcatcactgagcaaaaggtgcgcattaagtgtaaggaactggtgaagaaaatcgccatatatcggaatcggttagcaatccaacttcctgagaaaattcttatatacgaattgtattccgaggacctgagcgacatgcattacagagtgaaagaaaagatcattaagaaattcgagtgcaatcttctggtggtctgcgctaatcacatcatcctctgccaggagaaacgattgcagtgtctgtcatttagcggcgtaaaggagcgcgaatggcagatggaatctctcatccggtacataaaagtgatcgggggaccccctggtagagaaggtctgctagtaggactgaaaaatggacagattctgaagattttcgtcgataacctttttgccatcgtcctactcaagcaagcaaccgctgttagatgcttggacatgtcagcaagtcgcaagaagctggccgttgtggacgaaaatgatacctgcctcgtgtatgacattgacaccaaggagctcctatttcaagaacccaacgcaaacagcgttgcttggaatacacagtgcgaagacatgctttgtttctctggtggaggttacctgaatattaaggcctcaactttccccgttcaccggcagaagttacagggcttcgtggtggggtacaacggctcaaagatcttctgcctgcacgtgtttagcatcagcgctgtggaggtgccccagtccgctcccatgtatcagtatctcgatcgcaagctcttcaaggaggcctaccagatcgcgtgtttaggggtcaccgataccgactggcgggagttggcaatggaggcccttgaaggcttggactttgagaccgccaaaaaagcctttatacgagtgcaggatcttcgttatttggaactgattagttccatcgaagaacggaaaaagaggggcgaaacaaataatgacctgtttctggcagatgtgttctcctaccaggggaagtttcacgaggcggcaaagctgtacaagagatctggccacgaaaacctcgccctggagatgtacacagacctatgtatgtttgagtatgcaaaagatttcctgggctcaggcgatccaaaggagaccaagatgctgattactaagcaggcagactgggccaggaacatcaaagagcctaaggccgcagtggaaatgtacattagtgccggtgaacacgtgaaagccatcgagatttgcggcgatcatggctgggtggacatgctaatcgacatagctcggaaattagataaagccgagcgagagccgctgttactgtgcgctacctacctcaagaaactggattctcccggttacgcggcagagacttatctgaagatgggagatctgaagtcactcgtgcaactgcatgtggagactcaacgttgggacgaagcgttcgccctcggagagaaacatccagagtttaaggatgacatatacatgccctacgcccagtggttggccgagaacgatcggtttgaagaggctcagaaagccttccacaaggccggtcggcaacgggaagccgttcaggttctggagcagctgacgaacaatgcagtggctgagtctcgcttcaatgacgcggcttattattactggatgctcagtatgcagtgcttggatatcgcccaggccgatcctgcccagaaagatacgatgttgggcaagttttaccactttcagaggctcgccgagctttatcatgggtaccacgccatccaccgtcacacggaggacccattctccgtccatagacctgagacactcttcaatatctcccggtttttattgcacagtctccccaaagatacccctagcgggataagcaaagtgaggaagattctctttactctggccaaacaatccaaagccctcggcgcatatcgactcgcaaggcatgcttatgacaaattacgcggtctctacataccagcgaggtttcagaaatccattgagctggggacgttgaccattagagccaaaccatttcacgacagtgaggagctcgtgcctctctgttaccggtgttcaactaataaccccttactgaataatctcggcaatgtctgcatcaattgtaggcagccctttatcttcagtgctagctcttacgacgtcctacaccttgtggagttttatctggaggagggaatcaccgacgaagaggcaatctcccttattgatctcgaagtactccggcctaagcgggacgatcgtcaactggagatcgcaaataactcgagtcagattctaagactcgtggagactaaagattctatcggcgacgaagacccattcacggcaaagctgtcatttgagcaaggcggatcagaattcgtcccggttgtggttagccgcctcgtgctccggagtatgtcacgccgagacgtgctcataaaacgatggcctccaccgctaaggtggcagtactttcgtagcctgctccctgacgcttctattactatgtgccccagctgtttccagatgtttcattcagaggactatgaactgttagtacttcagcacggttgctgcccttattgtaggagatgcaaggatgatcctggtccgtag

SEQ ID NO: 227325 - DNA, 2886 bp, synthetic construct
  misc_feature 1..2886: note = Description of Artificial Sequence: Synthetic coding sequence
  source 1..2886: mol_type = other DNA
atgcgagccgtgctaacctggcgcgataaagccgaacattgcatcaacgatattgccttcaagcccgacggtactcaacttattctggcggcaggctcaaggctccttgtgtatgatactagcgacggcacacttcttcaacccctcaaaggacataaagacacggtttactgtgtcgcctatgctaaggacggaaagcgctttgcttccgggagtgcagataaatccgtgatcatttggacgtccaagctcgagggaattttgaaatacacccataatgacgcaatccaatgcgttagctacaaccctatcactcaccagttggcatcttgtagcagcagcgattttgggctgtggtcaccggagcagaagagcgtgtctaagcataagtcttcaagtaaaattatctgctgtagctggacgaatgatgggcaataccttgcattgggaatgttcaacgggatcatctctatcaggaacaagaatggcgaagaaaaggtgaagattgaacgtcctggcggaagcctctcccccatatggagtatctgctggaacccatctagagaagagaggaatgatatcctagccgtggccgactgggggcagaaagtttccttctaccagctcagtggcaaacagatcggaaaggacagggcactcaacttcgatccctgctgtatttcttacttcacgaagggtgagtacattctgctcggaggatctgacaaacaggtttccctattcacaaaagatggggtccggctgggaaccgtaggagagcagaacagttgggtctggacctgccaggcgaagcctgactcaaactacgttgtagttggctgtcaggatgggacaatatccttttatcaactgatcttctctactgtccatggactgtataaagaccgctacgcataccgagactccatgactgatgtgatcgtgcagcacctcattacggaacagaaggtgaggattaagtgtaaagagctggtcaaaaaaatagcaatctaccgcaaccggctggcaattcagttaccggaaaagattctgatttacgagctatatagcgaggatctgtcagatatgcattaccgagtaaaagagaagattatcaaaaagtttgaatgcaacttacttgtcgtgtgcgccaaccatattatcctttgccaggagaagagactgcagtgtctgtcctttagcggggtgaaagagcgtgagtggcaaatggagtcattgatacggtacatcaaggtaatcggcggacccccaggcagagaggggctcttagttgggttaaagaatggtcaaatcctcaaaatctttgttgacaatctcttcgccatagtgcttctgaaacaagcaacggctgtgagatgtctcgacatgtcagcctcccgaaagaagctcgcggtggtggacgagaacgacacatgtctggtctacgacattgatactaaagaactcctttttcaggagcctaacgctaactcagtcgcctggaacacccagtgtgaggacatgctgtgctttagcggcggtggttacctcaacattaaagcgagcacttttcccgtccacaggcagaaactgcaaggtttcgtggtgggctacaatggatctaaaatcttctgtctgcacgtgttctcaattagcgcggtggaggtgcctcagagcgcgcctatgtaccagtacctggatcggaaactttttaaggaagcgtaccagatcgcatgtctcggggtcaccgataccgactggcgggagctcgccatggaagcgctcgaaggtttggattttgagacggccaaaaaggcatttatcagggttcaggacttaagatacctcgagttgatcagttcgattgaggaacggaagaaacgcggagagacgaataatgatctttttctggcagatgtcttcagctatcagggtaagttccatgaggccgctaagttgtataaacgctctggtcacgaaaacctggctctcgagatgtacaccgatctttgcatgtttgagtacgccaaggatttcctgggatctggagatcctaaggagactaagatgcttatcactaagcaagcagattgggccagaaatatcaaggagcctaaggcagcggtcgagatgtatataagcgccggagagcatgtaaaagccattgagatttgcggggatcacggttgggtggacatgctaattgacatcgcgagaaaacttgacaaagccgagcgcgaacccctgttgctctgcgccacttacttaaagaagctcgattctcccggttacgccgctgaaacatacctcaagatgggcgacctgaaatctcttgtccaactgcatgtagagacgcagcgctgggacgaagcattcgccttgggcgaaaagcaccccgagtttaaagacgacatctatatgccatacgcccaatggctggccgaaaatgatcgcttcgaagaggcccagaaggcgttccacaaggctgggcgacagcgcgaagccgtacaggtgctggaacaactcactaacaatgccgtggccgaaagccgctttaacgatgcagcttattattattggatgctgtctatgcaatgcctggacatcgcccaggatcctgcccagaaggacacaatgctgggtaagttttatcattttcagcgcctggccgagctgtatcacggctaccatgcaatccacagacacactgaagatccgttctccgtccatcgtcccgaaacattgtttaacatctctaggttcctcctgcattccctcccgaaggacaccccttcaggcatttctaaggtgtgcgagaatacgctgcatctcggccaggccgagcagggaccaagatgcctgcaggctggccctgcacggctgtag

SEQ ID NO: 227326 - DNA, 3357 bp, synthetic construct
  misc_feature 1..3357: note = Description of Artificial Sequence: Synthetic coding sequence
  source 1..3357: mol_type = other DNA
atgcgcgctgttttaacttggagagacaaggccgagcactgtataaatgacattgctttcaaacctgacggaacacagctcatcctcgccgctgggagtcgactactggtctatgatacctctgatggaactctcctgcaaccattaaaggggcacaaagatacggtttactgcgtggcctacgctaaagatgttctatgtatcgaagggctctggagccctgagcagaagagcgttagcaagcataagtcaagctcaaaaatcatatgctgcagttggacgaatgatggccagtacctggccctcggcatgtttaatggtataatatctattcgcaataagaacggagaagagaaagttaagatagagcgtcctggcggtagtctgtcacctatatggagtatctgctggaatcccagtcgtgaggaacggaatgatatcctggcggtggccgactggggccagaaagtctctttttaccagctgtccggtaaacaaatcggaaaagaccgggcactgaacttcgacccctgttgtatctcatatttcacaaagggtgaatacattctgttgggcggtagtgacaagcaggtgagtctcttcactaaggacggagttaggttgggcacagtgggcgagcagaattcctgggtgtggacgtgccaggccaagcctgattctaactatgtagtggtgggatgtcaggacggaactatttcattctaccagctaatcttcagcacagttcacggcctctataaggatagatacgcctatagggacagcatgactgatgtcatagtgcagcatcttatcacagagcagaaggtccgcatcaaatgtaaagagctggtaaagaagattgccatctacaggaacaggctggccatacaactcccagaaaaaatcttaatctacgagctttactctgaagatctcagcgacatgcactatagggtgaaagagaagattataaagaaatttgagtgtaatctgcttgtggtctgcgccaaccacataatcctgtgtcaggagaaaagactgcagtgcctctcattttccggagtcaaggagcgagagtggcagatggagtctctaatccgatacattaaggtcatcggtgggcctcctggaagagaaggcctgctcgtgggacttaaaaacggccagatactcaaaatcttcgtggataatttattcgctatcgtgctcctgaaacaggcaactgctgtgaggtgcttggacatgtcagcctccagaaaaaagctggctgtagtggatgagaacgatacgtgcttggtttatgacatcgacacaaaggaattactatttcaagaacccaatgccaactcggtggcttggaacactcagtgcgaagacatgctctgcttttctggcggtggttatcttaatattaaggctagtacattcccagtacacagacaaaagttgcaaggatttgtggttggatataatggaagtaagatcttctgcctgcatgtattttctatctctgctgtggaggtgccacagtcagcccctatgtatcagtaccttgataggaaactctttaaggaggcctatcagatcgcctgtctgggggttacagatacagactggagggagctcgccatggaagccctcgagggtctggacttcgaaaccgcaaaaaaagagcggaaaaagcgcggtgagacgaacaacgatctctttttggcagacgtgttctcgtatcagggtaaattccacgaggcggctaaactgtacaaacgctcgggtcacgagaacctcgctttagagatgtacactgatctgtgcatgtttgagtacgctaaagactttttggggagcggtgatccgaaggagacaaagatgttgatcaccaagcaggccgattgggcgaggaacatcaaagagccaaaggcggcagtggaaatgtacatctccgctggggagcatgtaaaggcaatcgagatatgcggagaccacgggtgggtggatatgctgattgatatcgccaggaagctcgataaagctgagcgcgagcctctccttctgtgtgcgacatacttgaagaagctggacagtcctggatacgccgcagagacatacctgaagatgggagacctgaagagcctcgtccagcttcacgtggagacccagcggtgggatgaagccttcgcgctaggagagaagcaccctgagttcaaagatgacatatatatgccctacgcacagtggctggccgaaaatgatcggtttgaggaagctcagaaggctttccacaaggccggtcggcagcgggaggctgtgcaggtgctggaacagctgacaaacaatgctgtggcagaaagccgctttaacgatgcagcctactactactggatgttatcgatgcagtgtctcgatatagcccaggccgatccggcacagaaggacacaatgctgggtaagttttaccatttccagaggttggcggagctttaccacggataccatgcaatccaccgccacacagaagatcccttctctgtccaccgaccggaaactctgtttaacatctctcgattcctgctgcattccctgcccaaggacaccccgtcgggaattagcaaagtgaagattctttttaccctggctaagcaatcaaaggccttaggagcttacaggctcgcacgccacgcatacgataaactgcgtggtctgtatatccctgccaggtttcaaaagtcgattgaactgggtacattgaccattagggccaagcctttccacgatagcgaggaattggttccgctgtgctaccgttgcagtacgaataatccgttacttaataatctgggcaacgtgtgtattaactgtaggcaaccttttatcttctccgctagctcgtacgacgtgttacatctagtggagttctatcttgaagagggaattactgacgaagaggccatcagtctcatagatttggaagttctccgaccgaagcgcgatgaccgccagctcgagatcgccaataatagtagccaaattctgcgccttgtcgagactaaagatagtatcggagacgaggatccgttcaccgcgaagctgagtttcgagcaaggagggagcgagtttgtgccagtggtggtgagccgcctcgttctcaggtcgatgtccaggagggacgtgctaatcaagcgctggccgccacctttgcggtggcagtatttcaggagcttgctgcccgacgccagcattacgatgtgtccaagctgtttccagatgtttcattccgaagattacgaacttttagtgctgcagcacggctgctgtccttactgcagaagatgcaaggacgatccaggcccttag

SEQ ID NO: 227327 - DNA, 5249 bp, synthetic construct
  misc_feature 1..5249: note = Description of Artificial Sequence: Synthetic coding sequence
  source 1..5249: mol_type = other DNA
atgcacctgaagcaccttcggactctgctttctccacaggacggcgcagcaaaggtgacttgtatggcttggtcacagaacaatgcaaaatttgccgtttgtacggtcgacagagtcgtgctgctgtacgatgagcacggggaacgacgggacaagtttagcactaagccagcggatatgaagtatgggcgtaaatcatatatggtcaaagggatggctttctcgccagactcaacaaagatcgccattggtcagaccgacaatatcatatatgtgtacaaaatcggtgaggactggggggacaaaaaagtgatctgcaacaaattcattcaaacttctgctgtgacttgcctccagtggccagctgagtatatcatagttttcggcttggccgaagggaaggttcgattggccaatactaagacgaacaagagcagtactatctatggaacggagtcttacgtggttagcctgacaacaaactgttcagggaagggaatactttctggccacgccgatgggacaattgtgcggtatttttttgatgatgaggggtccggtgaatctcagggaaaacttgtgaaccacccctgccccccttatgccttagcctgggctactaactccatcgtggcggctgggtgcgataggaaaatcgttgcatatgggaaagagggacatatgctgcagacgtttgactactcgagagaccctcaagaaagggagtttactacagcggtcagcagccctggcggacagtccgtcgttttggggagctatgataggctcagagtgttcaattggatcccaagacggagcatttgggaggaagccaaaccaaaagagatcaccaacctgtacactatcaccgctcttgcatggaagagggacggctccagactgtgcgtaggcactctatgcggtggagtggagcagttcgattgttgcctccgcagaagtatttacaagaacaagttcgaattgacttacgtgggcccatcacaggtgatagtgaagaatttgtctagcggcactcgggtggtgctcaaatctcactatggatatgaggtcgaagaggtgaagatcttggggaaagagaggtacctcgttgcccacacctccgagactttgctgcttggggatctgaatactaatcgcctctctgaaatagcgtggcagggctccggcggtaacgaaaaatacttttttgagaacgaaaatgtgtgcatgatttttaatgctggcgaacttaccctcgtcgagtatggaaataatgacaccctcggcagcgtccggacagagtttatgaatcctcatctcatatccgttcggattaacgaaagatgccagaggggtactgaagacaataagaagttggcctatcttatagacattaagactatcgcgattgttgacctgattggtggctacaacatcgggacagtgtctcacgagagccgcgttgattggcttgaactgaacgagaccggtcacaaactgctgttccgcgacagaaagcttagactgcatctctacgacatcgagtcttgctcaaagacaatgatcttaaatttctgctcatacatgcagtgggttcccggatcagacgttttagtggcccagaatcggaattccctgtgcgtctggtataacattgaggcccctgagcgggtgaccatgttcactatcaggggggatgtgattgggctggagagaggaggtggcaaaacagaagtcatggtaatggagggggtcaccaccgtggcttataccttggacgaggggctaattgagttcggtacagccatcgacgatggcaattatatccgcgcaacggccttcttagaaactctggaaatgacacccgagaccgaagcaatgtggaagactctgtccaaactcgccctggaggccaggcaactgcacatcgcagagagatgcttctccgcgttgggtcaggtggccaaggctcggtttctccacgagacgaatgagatcgccgaccaggtgtcgagggaatacgggggagaagggacagacttctatcaggttagagccagactggccatgctggaaaaaaattacaagctggccgagatgatttttcttgagcagaatgcagtggaggaggccatgggcatgtatcaggagctgcacaggtgggatgagtgtattgctgtagctgaagccaaagggcacccagcactcgagaagctcaggaggtcctattatcagtggctcatggatacccagcaggaagagcgagctggcgaacttcaggagagtcagggggatgggcttgctgcaatttcactgtacctaaaagctggtctgccagccaaggcagctcggctagtactcaccagagaggagctcttggccaataccgagctggtggagcatatcacggccgctctgatcaagggtgagctgtatgagcgagctggggatctgttcgagaaaatacacaacccacagaaagctttggagtgttatcggaagggaaatgcctttatgaaagcagttgagctggcccgactggcttttcccgtcgaagtggtgaaactcgaagaggcatggggggatcacctagttcagcaaaaacaactagacgccgctatcaaccattatatcgaggccagatgctccatcaaggccatcgaggctgcattgggcgcacggcagtggaagaaggctatttatattcttgatctgcaggatcggaacactgcatcgaaatactaccccctcgtcgcacagcattacgccagcctccaggaatatgaaatcgctgaggaactttatacaaaaggagatcggactaaggatgctattgacatgtacacccaggccggtcgctgggagcaggcacataagctagcaatgaagtgcatgcggccagaagacgttagcgtgctgtatattactcaggcccaggaaatggaaaagcagggtaaatatcgtgaagccgagcgactgtatgtgaccgtgcaagagccagacctcgccattactatgtataaaaagcataagctgtacgacgacatgatcagattagtgggcaagcaccacccagatctgcttagtgatacgcacctgcatctcggaaaagagttagaagccgaggggcgactgcaagaagcggagtaccactacctggaggctcaggaatggaaagccaccgttaacatgtatcgcgctagtgggttatgggaagaggcctaccgcgttgccaggacacagggtggcgctaacgcccacaagcatgtggcctacctctgggccaagagcctggggggtgaggcggctgtccgccttctaaacaagctgggcctcctggaagctgccgtggaccatgccgcagacaattgttcatttgagtttgcatttgagttatctcgcctggcacttaagcacaagacccctgaggtccacctgaaatatgctatgtttttagaggacgagggcaagttcgaagaggccgaagctgaatttatccgagcaggcaagccaaaagaagccgtgctcatgtttgtgcacaatcaggactgggaagcggctcagcgtgtcgccgaagcacacgatcccgatagtgtcgcagaagtcctcgtgggtcaggcgagaggcgctctggaggagaaagacttccaaaaagccgagggcctcttattacgcgctcagaggcctggactcgctttgaactactacaaagaagccggattgtggagcgacgctctaaggatctgtaaagattacgtgcccagccagctcgaggccctgcaggaagagtatgagcgggaagcgacgaaaaagggagcgagaggagtggaaggattcgttgaacaggccagacactgggagcaagcaggagaatatagcagggccgttgactgttatctcaaggtcagagatagtggcaacagcggcctcgctgagaagtgctggatgaaggccgcagagctgtccatcaaatttctgcctcctcagcgcaatatggaagtcgtgcttgcggtggggcctcaactgattggtataggaaagcactctgcagccgctgaactgtaccttaatcttgatctagtgaaggaggcaattgatgcctttattgagggagaggagtggaataaggccaagagggtcgccaaagagttggaccccaggtacgaggattatgtggatcaacactataaggagttcttaaagaatcagggcaaggttgacagcttggtgggtgttgacgttatcgctgcactcgatctctacgtggaacaaggtcagtgggacaagtgcatcgaaactgcgacgaaacagaactacaagatcctccacaagtacgtggctctgtatgccactcatctgatccgggaaggcagctccgcacaagctctggccctgtatgtgcaacacggtgcgcctgctaatccacaaaatttcaatatctataagagaatattcactgacatggtctcctctcccggtaccaactgtgctgaggcctaccactcttgggctgacctgcgtgatgtgctgtttaacttgtgtgaaaatttagttaagtcctccgaggcaaactcaccagcacacgaggagttcaaaacaatgctgctgattgcgcactactacgccacacgctcggccgctcaaagcgtgaagcagttggaaaccgttgccgctagactgtccgtgtctcttctcaggcacacgcagctgcttcctgtggataaagcattttatgaagcagggattgctgcaaaggccgttggctgggataacatggccttcatatttctgaaccgtttcctggacctgactgacgcaatcgaagagggcacactagacgggctggatcattccgactttcaggacaccgatataccgttcgaggtgccactgcccgctaaacaacatgtgcccgaggcagaacgcgaggaggttagagattgggtcctgaccgtgtccatggaccagaggctggagcaggtgttgcccagggacgagagaggtgcttacgaagcctccctggtggcagcctccacgggggtgagggccctgccttgccttattactggataccccatccttcgtaataaaattgagttcaaacgcccaggcaaagctgcaaataaggataattggaacaagtttttgatggcgataaagaccagtcattcccccgtctgccaagatgtccttaagttcatatcccagtggtgcggcggtctcccaagcacctctttttcttttcagta

SEQ ID NO: 227328 - DNA, 1536 bp, synthetic construct
  misc_feature 1..1536: note = Description of Artificial Sequence: Synthetic coding sequence
  source 1..1536: mol_type = other DNA
atggcatggtcacagaataacgccaaattcgcagtgtgcacggtggatagagtggtgcttttgtacgacgaacacggcgaacgcagagacaagtttagcactaaacctgccgacatgaaatacggcaggaagagctatatggttaagggaatggcgttttcgccagacagcactaaaattgccattggacagaccgataatatcatctatgtctataagattggggaagactggggggacaagaaggttatatgcaacaaattcatccagacttccgccgtgacgtgcctccagtggccagccgaatacatcattgtcttcgggctcgctgagggaaaagtacgcttagccaatacaaaaacgaataagtctagtacgatctatgggaccgaaagttacgtcgtgtcactgactactaattgctccggcaaggggattctatctggtcatgccgacggaacaatcgtgagatacttcttcgacgatgaagggagcggcgagagccaggggaagctggtgaaccatccatgccctccatatgcccttgcttgggccaccaattctatagtggctgctggatgtgataggaaaatcgtcgcttacggaaaggaagggcacatgctgcaaaccttcgactactccagagatcctcaggaacgagaattcacgacagccgtttccagccccggagggcagagcgtggtgctgggatcctacgatcgcctgcgagttttcaactggatccccagacgcagtatctgggaggaggctaagcccaaggagattacaaatctctacacaattacggctctcgcctggaagagggacgggtcgcgcttatgcgtaggaactctgtgcgggggtgtagaacagtttgattgttgcctgcgccgatctatctataaaaataagttcgaactaacatacgtgggaccaagccaggtgatagtgaaaaacctgagctccgggactcgggtggtactgaagtcccattatggatatgaagtcgaggaggtaaaaatccttggcaaggagcgctacctagtggcacacaccagcgaaacgctgctgctaggcgatcttaacaccaataggctgagcgaaatagcttggcaaggtagcgggggtaatgagaagtattttttcgagaacgaaaacgtgtgtatgatcttcaatgctggcgaactgacactcgtggagtacggaaataacgacaccctcggaagtgtccgcacggagtttatgaaccctcatcttattagcgtgcgcattaacgaaagatgccagaggggcaccgaggataataaaaaacttgcctacctgatcgacattaagacaattgctatcgtggacttaataggtggttataatatcggaaccgtttcacatgagagcagggtggattggctggagctgaacgaaaccggccataagctcctgtttcgcgaccgcaagttgcgtgttaggcgtgccaccaaggcactgggtataggctggccaaccgagggagtccgccaggctgccacaagggattag

SEQ ID NO: 227329 - DNA, 369 bp, synthetic construct
  misc_feature 1..369: note = Description of Artificial Sequence: Synthetic coding sequence
  source 1..369: mol_type = other DNA
atgacacacttgcttctgacagctacagtgaccccatctgaacagaattcatcacgggaaccgggatgggagactgcaatggccaaagacatccttggagaggcgggactgcacttcgacgaactcaacaaacttcgggtgctggatccggaagtaacccagcagactattgagctaaaagaggagtgtaaagattttgtggataagattggacagtttcaaaaaattgtgggagggctgatcgagttggtggaccaacttgctaaagaagcagagaacgaaaagatgaaagtgaggtccgcctgcttgccccctacttcctggcccggaacactggtgcattatcccctaatccctcttccttcctag

SEQ ID NO: 227330 - DNA, 447 bp, synthetic construct
  misc_feature 1..447: note = Description of Artificial Sequence: Synthetic coding sequence
  source 1..447: mol_type = other DNA
atggcgaaggatattctcggggaagcaggacttcattttgacgagttgaacaagcttcgagttcttgatcctgaagttacgcagcagaccatcgaactcaaggaggaatgcaaggacttcgtagataaaatcggtcagtttcaaaaaatcgtggggggactgatagagctggtagatcagctggcaaaggaagctgaaaatgagaagatgaaatcacttgccgtttctccacgactggagtgtacaggagccattagtgctcactgtaagctatgcctgtctgacagctcagactcccccacaagccccagtcgtgttggcggaacgacagggcaccgatgtagtgagctggcccagatttattctaaggccgagagatctagcactgcagctacttccagtcctaactcacgcaaagagaacgcggcacggaaggtgagcggttag

SEQ ID NO: 227331 - DNA, 399 bp, synthetic construct
  misc_feature 1..399: note = Description of Artificial Sequence: Synthetic coding sequence
  source 1..399: mol_type = other DNA
atggctaaggatatattgggagaagctggactccattttgatgaactcaataagctccgtgtgctggacccagaagtgacccaacagacaattgaactcaaggaagagtgtaaagattttgttgacaagatcggacaatttcagaagattgtgggaggactgatagagttagtggaccaattggccaaggaagccgaaaatgaaaaaatgaaggccatcggggcaagaaacctgctgaaaagcattgccaagcagcgtgaagctcagcagcagcagctccaggctctgatcgccgagaagaaaatgcagctagaaaggtacagagtggaatatgaggccttgtgcaaggtggaagcagaacagaatgaattcatcgatcagttcattttccagaaatag

SEQ ID NO: 227332 - DNA, 216 bp, synthetic construct
  misc_feature 1..216: note = Description of Artificial Sequence: Synthetic coding sequence
  source 1..216: mol_type = other DNA
gatatcctgggggaggctggccttcactttgacgaacttaacaaactccgagtgctcgaccctgaagtgacccagcagactatcgagctaaaagaggagtgtaaggattttgtggacaagatagggcagttccagaagatcgtaggaggcctcatcgagctcgtcgaccagctcgctaaggaggccgaaaatgagaagatgaaggtaagcggctag

SEQ ID NO: 227333 - DNA, 345 bp, synthetic construct
  misc_feature 1..345: note = Description of Artificial Sequence: Synthetic coding sequence
  source 1..345: mol_type = other DNA
atggcgaaggatatcttgggggaggctggcttacacttcgatgaactcaacaagttgcgagtccttgatcctgaggtgacacaacagacaatcgaactcaaagaggagtgcaaggacttcgtagacaaaatcggtcaatttcagaagatcgtcggcggtctcatcgaactagttgatcagctggccaaagaagccgaaaacgagaagatgaaagctatcggcgctaggaatctcctaaagtccatagctaagcagcgcgaggctcagcaacaacagctccaggctctgatcgccgagaagaagatgcagctggaacggaacgagcttaagattagcctgctgtag

SEQ ID NO: 227334 - DNA, 477 bp, synthetic construct
  misc_feature 1..477: note = Description of Artificial Sequence: Synthetic coding sequence
  source 1..477: mol_type = other DNA
atgactcacctgttgttgacagccaccgtgacaccctccgagcagaactcatctagggaacctggttgggagacggcaatggctaaggatatactcggcgaggctgggttacactttgatgagctgaataagctgagagtcctggacccggaagtgacacagcagaccatcgaattgaaagaagaatgcaaagactttgtggacaaaatcggtcaattccagaagattgtgggcggtcttatcgagttggtggaccagctggctaaggaggctgagaatgaaaagatgaaagcaataggcgcaaggaacttgcttaagtccattgcgaagcagcgggaggcccaacagcagcaacttcaggccctcattgcggaaaagaaaatgcagctggaaagataccgggtcgaatatgaggcactgtgtaaggttgaggccgaacagaacgagtttatagatcagtttatatttcaaaaatag

SEQ ID NO: 227335 - DNA, 399 bp, synthetic construct
  misc_feature 1..399: note = Description of Artificial Sequence: Synthetic coding sequence
  source 1..399: mol_type = other DNA
atggcgaaggatattctgggcgaagccggactgcacttcgatgaactaaataagctccgggtcctggaccccgaagtaactcagcagaccattgagctgaaggaagagtgtaaggacttcgttgacaaaatcggtcagttccagaagatcgttggagggttaattgagctggttgatcagctggcgaaggaagccgagaatgagaaaatgaaggcgattggagctcggaacctcctgaagagtatcgctaagcagagagaagcacagcagcagcagcttcaggcgctgattgccgaaaaaaaaatgcagcttgaacgctatcgagtcgaatacgaagcgctgtgcaaggtggaggctgagcaaaatgaatttattgaccagttcatctttcagaaatag

SEQ ID NO: 227336 - DNA, 642 bp, synthetic construct
  misc_feature 1..642: note = Description of Artificial Sequence: Synthetic coding sequence
  source 1..642: mol_type = other DNA
atggaagacctgctggatctggacgaggagttaagatattctctcgcgaccagcagagcaaagatggggagacgcgctcaacaggagtcggcgcaggctgaaaatcacctgaacgggaagaatagtagcctaactctaacaggagagacctctagcgccaagctgccaagatgccggcaaggaggttgggcaggggattcagtgaaagcctctaatgggacgcagaccggcaagcagcagttagaccttaacgcctgctaccataaaactcaccatagagaccttggactggcctccttggaagaagcagacataccaattattcccgacctggaagaagtgcaggaggaggacttcgtactccaggtggccgctccccctagtattcagatcaaacgggttatgacataccgggacctggacaacgacctgatgaaatacagcgcaatccaaacactggatggcgagatcgacctgaagctcttaacaaaagtactggcgcctgaacacgaggtacgtgaggatgatgtaggctgggactgggaccacttatttaccgaggtctcctcagaggttttaacagagtgggatcccttgcagactgaaaaggaggaccctgctggtcaggcaaggcatacttag

SEQ ID NO: 227337 - DNA, 627 bp, synthetic construct
  misc_feature 1..627: note = Description of Artificial Sequence: Synthetic coding sequence
  source 1..627: mol_type = other DNA
atggaagatctgctggacctggacgaggaactcaggtatagtctggcgacttcgcgggcaaagatggggaggcgggcacagcaagagagcgcacaggcagagaatcacttgaatggcaagaactcaagcctgactctgaccggggaaactagcagcgcaaaactccctcgatgccgccaggggggatgggcgggtgattccgtgaaggcatccaagtttaggcgcaaagcgtccgaggagatcgaagacttcaggctgaggccacagagcctgaatggcagcgattacggcggtgacattcccattatcccagacttggaggaagtacaggaggaggacttcgtgctgcaggtagctgcacctcctagtatccagataaaacgtgtcatgacttaccgagacttagacaacgatctgatgaagtacagcgccattcagacactcgacggcgagatcgatctcaagctcctgaccaaggtgctcgccccagaacacgaggtgcgcgaagatgacgtgggatgggactgggatcacctctttaccgaggtgagctcagaagttttgactgaatgggacccgctacagacagagaaggaagatcccgcaggccaggcccgacatacttag

SEQ ID NO: 227338 - DNA, 342 bp, synthetic construct
  misc_feature 1..342: note = Description of Artificial Sequence: Synthetic coding sequence
  source 1..342: mol_type = other DNA
atggaagatttgctcgacctcgacgaagagctgcgctactccctcgccactagcagggccaagatgggccgacgagcacaacaggagtctgcccaggctgaaaaccacctgaacggcaaaaactctagtctgacgctcacaggggaaactagtagcgcaaagctgcctcgttgtagacagggcggatgggctggcgactcggtgaaagctagcaagttccgtcggaaggcctcggaggagatcgaggaatatgtatcatccatccttatattgatggttagctatgtagatttggggcagcagtgcagcctgggtggacacgatctctttcacctttgctag

SEQ ID NO: 227339 - DNA, 1290 bp, synthetic construct
  misc_feature 1..1290: note = Description of Artificial Sequence: Synthetic coding sequence
  source 1..1290: mol_type = other DNA
atgaccgcagctctggccgtggtaacaacctccggcctggaagatggcgttcctagaagcagaggagagggcaccggggaggtggtgctcgagcgtggacccggagccgcataccacatgttcgtggtgatggaggatcttgtcgagaaactcaagttgctcagatatgaggaggagttcttgagaaaatccaatctcaaggctccaagtcgccactatttcgccttacccacaaatcccggtgagcagttttacatgttttgcacgttggcggcttggctaatcaataaagctggcaggccattcgagcagccccaagagtatgatgatcccaatgctacgatttctaacattcttagcgaactgcgtagcttcggcagaacagccgacttccccccaagcaagctaaaatcaggatatggggagcacgtgtgttacgtccttgattgttttgccgaagaggcacttaagtacatcggctttacgtggaagcgacccatttatccagtggaggagctcgaagaagagagcgtcgctgaagatgacgcggaactcacgctcaataaagtcgacgaagagtttgtggaggaagaaactgacaacgaggaaaattttattgacctaaatgtgctcaaggctcagacataccacttagatatgaatgaaactgccaaacaggaggacattcttgagtccaccaccgacgccgcagagtggtctctggaggtagaaagagtgctgcctcagctgaaagtgacgattcgcactgacaacaaggattggcgcattcatgttgaccagatgcaccagcatcgcagcggaattgagagtgcactcaaagagactaaggggtttctggacaaactgcacaatgagatcaccagaaccttggagaaaatcagttccagggagaaatacatcaacaaccagctggagaatctcgtgcaagaatatcgagcagctcaagcacagctcagcgaagctaaagaacggtaccagcaggggaacggtggggtgaccgagcgcaccaggctcctgtctgaggtgatggaagagctcgaaaaggttaaacaagagatggaggagaagggaagctccatgacagacggtgcccctcttgtgaagatcaaacagagccttaccaagttaaagcaggagaccgtcgaaatggacatccgtattggcatcgtcgagcatactctccttcagtccaaattgaaggagaagagtaatatgacccgcaacatgcacgccactgtcattccagagccagctaccggattttactag

SEQ ID NO: 227340 - DNA, 2334 bp, synthetic construct
  misc_feature 1..2334: note = Description of Artificial Sequence: Synthetic coding sequence
  source 1..2334: mol_type = other DNA
atgaggctgaagatttcactcttaaaagagccaaagcaccaggagctggtgagctgtgtcggttggacaactgcggaggaactctactcttgctctgacgatcaccagatcgttaagtggaatctgttgacctcagagaccacgcagattgtgaagctcccagatgatatctacccaatcgattttcattggttccctaagagtctcggggtgaaaaaacaaacacaggctgagagttttgtgctgacgtccagtgacggcaagttccatctgatctccaagctcggccgtgtagagaagtcagtggaggcacactgtggagccgttctggctgggaggtggaattacgagggcactgctctcgtaacggtcggagaggatgggcagattaaaatctggagcaaaaccgggatgctccggtccactcttgcccagcaaggcacacctgtttactccgtagcttggggccctgactccgagaaagtcctatacacagccggtaagcaactcataattaaaccactgcaacccaacgcaaaggtgctgcagtggaaagctcatgacggcattattctcaaggtagattggaatagtgtgaatgacctgatcctgtcagcgggagaagactgtaaatacaaggtgtgggatagctatggacggcctttatataattcccagccccacgaacatcccattaccagcgtcgcctgggcaccagacggggaactgttcgctgtcggatcctttcacacgttgcgactctgtgataaaactggttggagctatgctctggagaagcctaataccggttctatatttaatatcgcatggtcaatcgacggcacccagatcgctggcgcatgcggcaacggccatgtggtcttcgcccatgtcgtggaacaacactgggagtggaagaacttccaggtgacactgacaaagaggagagcaatgcaagtgagaaatgtcctgaacgatgccgtcgatttactggagtttcgcgatcgagtgatcaaagcaagtctgaattacgcacacctcgtggtcagcacaagtctgcaatgctacgtgttcagtacaaaaaattggaataccccgatcatctttgatcttaaagagggaacagtctccttaatcctgcaggcggagcgccactttctgttagtggacggcagctctatctacctgtacagctatgagggacgctttatttcatcacctaagttcccagggatgagaactgatattttgaatgcacagaccgtgagtctttctaacgacactattgcaatcagagataaagcggacgagaaaatcatatttctgtttgaagcatcaaccgggaaaccgctgggagacggaaagttcttgtcacataaaaatgaaattcttgagattgcactagaccaaaaggggctaacgaacgataggaaaattgcatttatcgacaagaacagagatctatgtatcaccagcgtcaagcgctttggaaaagaggagcagataatcaagctcggcactatggtgcataccctcgcctggaacgacacctgtaatattctgtgcggcttacaggatacaaggttcattgtgtggtattatccaaacactgtgtatgtggatcgggatatcctgcctaagaccctttatgagagggatgccagcgagttctctaagaatccacacatcgtttccttcgttgggaaccaggtgacaattagacgggctgacggatcgctggtgcatatctccataactccatatcctgcgattttgcacgagtacgtctcatccagtaaatgggaagatgcggtgagactgtgtaggttcgtgaaggaacagacaatgtgggcctgtctcgccgctatggccgtggccaaccgagatatgaccacagcagaaattgcctacgccgctattggagagattgataaggttcagtatatcaactcgataaagaacctgcctagtaaagagagcaagatggctcatatcctgctgttctcagggaatatccaagaggcagagattgtcctgctgcaggctggcctggtgtatcaggcaatccagataaatattaatctgtacaactgggagcgcgcacttgagctggccgtaaaatacaagacacatgtagataccgtcctggcctacaggcagaaatttttggagacttttggcaaacaggagaccaataaaagatatcttcattacgccgagggcctccagatcgactgggagaagatcaaagctaagattgaaatggagattaccaaggaacgagaacagtcatcttcgagccaatccagcaaaagcatcggccttaagccctag

SEQ ID NO: 227341 - DNA, 195 bp, synthetic construct
  misc_feature 1..195: note = Description of Artificial Sequence: Synthetic coding sequence
  source 1..195: mol_type = other DNA
atgagactgaagatttccttactgaaggagccaaaacaccaggagctggtttcttgcgtgggctggaccaccgcggaagaactgtactcttgctcagatgatcaccagattgtgaagtggaacctgctgacaagcgagacaacacaaatcgtaaagctgcctgatgacatttacccaatcgattttcattggtag

SEQ ID NO: 227342 - DNA, 1923 bp, synthetic construct
  misc_feature 1..1923: note = Description of Artificial Sequence: Synthetic coding sequence
  source 1..1923: mol_type = other DNA
atgctgagaagtacgttggcccaacaagggacccctgtttacagtgtcgcatggggacctgacagcgaaaaagtgttgtacaccgctggcaagcagttgattatcaagcccctgcagccaaacgctaaggtcctccagtggaaagcccacgacgggattatcctgaaggtcgattggaactcagtcaacgatctcattctctcggcaggggaggattgcaaatacaaggtgtgggactcttacggtcgtcctctgtacaatagccagcctcacgagcaccctatcaccagcgtggcgtgggcaccagacggggagctgtttgccgttggctcttttcacactcttcgattgtgtgacaagactgggtggtcatacgccctcgagaaacctaacaccgggagcatctttaacattgcctggagtattgacggaacacagatcgccggagcctgtggtaacggccacgttgtgttcgcccatgtggtcgaacagcactgggaatggaagaacttccaggtcactcttaccaaacgtcgtgctatgcaggtccggaatgtgttgaatgatgctgtggacttactggaatttagagacagggtgattaaggctagccttaactacgcacacctcgttgtctccacatctcttcagtgttatgtcttctctactaaaaactggaacacccccatcatatttgatctgaaagaaggtaccgtgtctcttattctgcaagcggagagacacttcctcctcgtggatggaagctctatatacctgtattcatatgagggcaggttcatctcctctcctaaattcccgggtatgaggaccgatattctcaacgcccagaccgtaagcctgagcaatgacacaatcgcgatcagagacaaagcagatgaaaagatcatcttcctgtttgaagcaagcacaggcaaacccctgggtgacgggaagtttctcagccataagaatgagatactcgagatcgctctggaccaaaagggccttaccaacgaccgcaagatcgccttcattgacaagaatcgtgacctatgcatcaccagcgttaagcgctttggtaaagaggagcaaattattaagttaggcaccatggtccataccctggcttggaatgacacctgtaacatcctgtgcggccttcaggatacacgtttcattgtttggtactatccaaatacagtttacgtggatcgggacatcctgcccaagacgttatacgagcgcgacgcctcagaattctccaagaacccccacattgtttctttcgtaggcaaccaagtcacgataaggcgggcagatggtagcctcgtgcatatctccatcacaccttaccctgctatcctgcacgaatacgttagttcttctaagtgggaagatgccgtgcgtctgtgccgctttgtcaaggaacaaacaatgtgggcttgtttggcagctatggccgtggcaaatcgggacatgaccacggcagagatcgcctacgctgctattggcgagattgacaaagttcaatacattaactctattaaaaacttgcccagtaaggagagcaaaatggctcacatactcctgttctccggtaatattcaggaagcagaaatagtgcttttgcaggccggactcgtgtatcaggcgatacaaattaatatcaatctctataattgggaacgggcactggagctggccgtaaaatataaaacacacgtcgatacagttttggcctaccggcagaagttcttagaaacattcggtaaacaggagacgaataagagatacctgcattacgcggaaggactgcagattgactgggaaaaaataaaggctaaaatagaaatggagatcacgaaggaaagggaacagtcctccagttcccagagcagcaaaagtattggactgaaaccttag

SEQ ID NO: 227343 - DNA, 366 bp, synthetic construct
  misc_feature 1..366: note = Description of Artificial Sequence: Synthetic coding sequence
  source 1..366: mol_type = other DNA
atgcggctgaagatctccctgttaaaagagccaaaacaccaagaacttgtgtcctgcgtcgggtggactacggctgaagaactgtacagctgcagcgatgatcaccagatagttaagtggaatttgctcacgtcggaaaccactcagatagtcaaactgcccgacgatatttaccccatcgactttcactggtttcccaaaagccttggtgtgaaaaagcagacccaggccgagtcatttgtactgacttccagtgacggcaagttccatctcatctccaaactgggacgggtggagaaaagtgtggaggcgcactgcggggctgtcctggcagggagatggaattacgaggggactgctctctag

SEQ ID NO: 227344 - DNA, 1923 bp, synthetic construct
  misc_feature 1..1923: note = Description of Artificial Sequence: Synthetic coding sequence
  source 1..1923: mol_type = other DNA
atgctgcgcagcacactggcccagcaaggaacccccgtctattccgtggcctggggtcccgattctgagaaggtgctgtataccgctggcaaacagctaatcatcaagcccctgcaaccgaatgctaaagtacttcagtggaaagcccatgacgggatcattttgaaggtcgattggaattcagtaaacgatttaatcctaagcgccggtgaagattgtaagtataaagtgtgggacagttacggcaggcctctatataacagccagccacacgagcaccccataacctctgttgcgtgggccccagacggggagctgtttgccgtgggctccttccatactctgaggctttgcgacaagacaggatggagttacgccctggaaaaaccaaatactgggagtatctttaacatcgcgtggtctattgacgggacacaaatagccggagcctgcggaaacgggcatgtagtgtttgctcatgttgtcgagcaacactgggagtggaagaacttccaagtgacactgacaaagcggagagcaatgcaggttcggaacgttctgaacgacgccgtcgatctcctggaattccgcgaccgagttatcaaagcctctctcaattacgctcaccttgttgtatcgacttcactgcagtgctatgttttctcgaccaaaaattggaatacacccatcattttcgacttaaaagagggcaccgtgtcactgattcttcaggccgaacggcactttctgctggtggatgggagcagcatttacctgtactcttatgaaggtcgatttattagctctccgaagttccctggcatgcggactgacattctaaacgctcagaccgtctcactgtctaacgataccatcgccattcgggacaaggccgatgaaaagataatttttttgttcgaagccagcaccggaaaacccctgggcgacggcaagtttctgtcacacaaaaatgaaattttggagatcgccttggaccagaagggcctcaccaacgacagaaaaatcgcgttcattgataaaaaccgcgacctctgcatcacctccgtcaagaggtttgggaaagaggaacagatcatcaaactgggaaccatggtgcatacactcgcttggaacgacacttgtaatatcctgtgtggcctgcaggacactcgcttcatagtttggtattacccaaacaccgtttacgtcgatcgtgatattctgccaaagactctgtacgagcgcgatgcctccgaatttagcaagaacccacatatcgtgagttttgttgggaatcaggttacaatccgcagagccgacggttccctcgtgcacatctcgattaccccatatcctgccatcctccacgaatacgtgagctcaagtaagtgggaggatgccgtgcgcctgtgccgattcgtgaaggaacaaaccatgtgggcttgcctggctgcaatggccgtggctaatcgcgacatgaccaccgctgaaatcgcttacgcggctattggcgaaatagataaagtgcaatacatcaactctatcaaaaacttaccttccaaggaaagcaagatggcacacatattactgtttagcgggaatattcaggaagcggaaattgtgttactacaagccggactggtttatcaggccatccaaattaacattaacctgtacaattgggaacgagcactagagctggcagtgaaatacaagactcacgtggacaccgtactagcctaccggcagaagtttcttgaaacttttggaaagcaagagactaacaagaggtatttgcactatgccgaggggctgcagatcgactgggagaagatcaaggccaagatcgaaatggaaatcaccaaggaaagagaacagtcttccagcagccagtcaagtaaatcaattggtctgaagccatag

SEQ ID NO: 227345 - DNA, 540 bp, synthetic construct
  misc_feature 1..540: note = Description of Artificial Sequence: Synthetic coding sequence
  source 1..540: mol_type = other DNA
atgaggctcaagatcagcttgcttaaagagccaaaacaccaggaactggtgtcatgtgttggctggaccacagccgaggaactgtactcatgcagcgatgaccatcagatagtcaaatggaacctgctcacctccgagaccacccagatcgtcaagttaccggacgacatttacccaatcgactttcactggttcccaaagtctttgggtgtaaaaaaacagactcaagcagagtcgtttgtgctgacatccagcgatgggaaatttcacctcatctccaagttgggcagggtggagaagtcagtggaagcccactgtggggctgtgctggcgggaaggtggaattatgaaggcaccgcactggtcacagtcggcgaggacggccaaatcaaaatttggtcaaagacggggatgctcagatccactctggctcagcagggcacccctgtctactcagtagcgtggggtccagactcagaaaaagttctgtatacggccggaaagcagttaatcatcaagcctctgcaaccgaacgcctag

SEQ ID NO: 227346 - DNA, 1227 bp, synthetic construct
  misc_feature 1..1227: note = Description of Artificial Sequence: Synthetic coding sequence
  source 1..1227: mol_type = other DNA
atggcaagtgtggccagctgcgatagtaggccaagttccgacgaactgccaggcgacccgtcctcccaggaggaggacgaagactatgattttgaagacagagtgtccgacagtggctcctacagcagtgcgtcctctgactacgacgacctggaaccagaatggttggactccgtccagaaaaatggcgagctgttctatcttgagctttccgaggacgaggaagagagcctcttgccagaaaccccaactgttaatcatgttcgattttcggaaaatgaaatcattattgaagatgattacaaggaacggaaaaagtatgagccgaagctgaagcaattcacaaagatccttcgccgtaaaaggctgctgcctaagcgctgtaataaaaagaattccaacgataatggcccagtctctatcctgaagcaccaatctaaccagaaaacaggcgtgattgtgcagcagcgctacaaagatgtaaacgtgtatgtgaatcccaagaagttgactgtcatcaaggcaaaagagcagttgaaactcttagaagttttggtcggaataattcaccaaacaaaatggagctggcgacgcactggaaaacaaggggacggggagcgactggtggttcacggccttctgcccggagggtctgcaatgaaatctggacaggtcttaatcggtgatgtattagtcgctgtgaacgacgtcgatgtcaccaccgaaaacatcgaaagagttctctcctgtatccctggacccatgcaggttaagctcacatttgagaatgcttacgatgtgaagcgcgagactagccatccgaggcaaaaaaagacgcaatccaacaccagtgatcttgtcaagctgctgtggggggaggaggttgaggggatccagcagagcggacttaacacccctcatatcatcatgtatctcacactccagctcgatagcgagacttctaaggaggagcaagaaatcctgtaccattatcccatgtccgaagcttctcaaaagctcaaatctgtcaggggtatattcctgactctgtgtgatatgcttgaaaatgtgaccgggacacaggtgaccagcagttcactcctgctcaatggaaagcaaatccatgtggcctactggaaggaaagtgataaactgctgctgatcgggcttcctgcggaggaaatcgaacttccttccagcgcacacacccatggcgaaaggaactag

SEQ ID NO: 227347 - DNA, 2829 bp, synthetic construct
  misc_feature 1..2829: note = Description of Artificial Sequence: Synthetic coding sequence
  source 1..2829: mol_type = other DNA
atggctagcgtggccagctgtgattcccgcccatcatcggatgagttgccaggagacccctcctcacaggaagaagacgaggactacgatttcgaggatagggtatccgatagcggctcctactctagcgcaagctcggactatgacgacctagagcctgagtggttggactcagtacagaagaacggagagcttttctatcttgaactcagtgaagatgaggaggagagcctattacccgagactccaactgtgaaccacgtgagatttagtgagaatgaaatcattattgaggacgattacaaggagcgtaaaaaatacgaacctaaactcaaacagtttacgaagatactacgaagaaaaagactactgcctaagaggtgcaacaaaaagaattcaaatgacaatggaccggtctctattctgaagcaccaaagtaatcagaaaactggtgtgatcgttcaacaaagatataaagacgtcaacgtgtatgtgaatccaaagaagcttaccgtgataaaggccaaggaacagttaaagctgctcgaagttctagtaggcatcattcaccagaccaaatggagttggaggcggaccggaaagcaaggcgacggagaaagactagtggtgcacggccttcttcccggtggatccgctatgaagtccgggcaagtcctcatcggcgatgtcctcgtggcggttaatgacgtggacgttacgacagagaacatagaacgcgtgctctcttgtataccagggccaatgcaggtcaagctcacctttgagaacgcatacgatgtgaaaagagagaccagtcacccaagacagaagaagacacagagcaatactagcgacctcgtaaagttgctgtggggggaagaagtggaaggcattcagcagagtgggctgaatacgccccatataattatgtacttgacactacagcttgactccgaaacttcgaaggaggaacaggaaattctctatcactatccaatgtccgaagcttcgcagaaactaaagagcgtaagaggtatctttttgactttgtgtgatatgctggagaacgtcacaggtactcaggtgacctccagctctctactcctgaacgggaaacagattcacgtagcctattggaaagagagcgacaaactgctgttgatcgggctccctgcagaggaggtcccgctcccaagactgcgaaacatgatagagaacgtaatccaaacgctcaaatttatgtatggtagtctcgacagcgctttctgccagatagagaatgtccctcgactagatcacttttttaatctcttcttccagcgggctctgcagccagccaagctgcacagttccgccagcccctccgcccagcagtatgatgctagctctgcagtgttactcgacaacttgccgggagttaggtggctgactcttcccctagagattaagatggagctggacatggccttgtcagacctggaggcagcagattttgccgagctgtctgaggattattatgacatgcggaggctctacacaatcctaggctcttcgctcttctataaagggtaccttatctgctctcacttaccaaaagacgatctgattgacatcgcggtgtactgtcggcactactgtctgctccctctcgccgcaaaacagagaatcgggcagttgattatctggagggaggtctttccacagcaccacttgcgccctttagctgactcctcgacagaagttttcccagagccagagggtcgctacttcctgctcgtagtgggcctgaagcactatatgctctgtgtcctgttagaagccggagggtgcgcctctaaagccattggcagcccaggaccagattgcgtgtatgtggatcaggtgaagacgactctgcaccaactggatggggtggactccagaatcgatgagcggctcgcctccagccccgtgccatgtctttcatgcgccgattggttcctgaccggctctagagagaaaactgactctttgactacttcaccgatcttgtcaaggctgcagggcacgtctaaggtcgctacatcacccacctgtagacgcactctgttcggggattactccttaaaaacaaggaaaccaagcccctcctgttcctcaggcggaagcgacaatggttgtgaagggggtgaggacgacggcttttccccccataccaccccagatgccgtgagaaagcagcgtgagtctcaaggaagcgatggccttgaggagagcggaacgctattaaaagtcacaaaaaagaaaagcacactcccgaacccttttcatctgggaaacctgaagaaggatctccctgaaaaggaactcgagatttacaatactgtgaagcttacctctggacctgaaaataccctgtttcactatgttgcactcgagacagtccagggcatattcatcacgcctaccctggaagaagtcgcacagctgagcggcagcattcaccctcagttaatcaagaactttcaccagtgctgtctttcaatcagagcggttttccagcagacccttgtggaggagaagaagaagggtctgaactccggcgatcatagcgatagtgctaaaagcgtaagtagccttaaccctgtaaaggagcacggcgtgctgttcgagtgcagccctggtaactggaccgaccagaaaaaggcgccacccgttatggcctactgggttgtcggccgactgtttctgcaccctaaaccacaggagctgtacgtgtgttttcatgattcagttaccgagattgctatcgaaatcgccttcaaactctttttcggactgacactgtag

SEQ ID NO: 227348 - DNA, 2688 bp, synthetic construct
  misc_feature 1..2688: note = Description of Artificial Sequence: Synthetic coding sequence
  source 1..2688: mol_type = other DNA
atgaacaaatcagaaaacctactttttgctggcagcagtctggccagtcaagtgcacgcagctgccgtgaatggggacaagggcgcactgcagagactcatcgtgggtaactcggcactgaaggataaggaggatcagttcggaaggaccccgctgatgtactgcgtgctggctgatcgcctggattgtgcagatgctctgctgaaagccggtgcagacgtaaataaaactgatcattcacagagaaccgccttacatctggctgcacaaaaggggaattaccgattcatgaagttgctactgacaaggcgtgctaattggatgcagaaggacttggaagagatgacacctttgcatttgactacaagacacagaagccccaagtgcctcgccctgctgctcaagttcatggcacccggagaggtagacacacaggacaagaataaacagacagcactgcactggtctgcttactataataatcctgaacacgtgaaacttctgatcaagcatgatagtaacattggcatccccgacgttgagggcaagatccctttgcattgggccgctaaccacaaggacccctcagcagtccataccgtgagatgtatcctggatgcagccccaacagaatctctgctgaactggcaggactacgaaggccgtacacctctgcactttgccgtcgcagatgggaatgtcacggtggtggatgtcctcaccagctacgaaagctgtaatattacatcatacgataacttgttccggacccctctacattgggcggcactactgggtcacgctcaaatcgtgcatcttctactcgagcgtaataagtcgggcaccataccctccgacagccagggcgctacacccttgcactacgccgcacagagcaatttcgcagaaactgtgaaggtcttcctgaagcatccctccgtcaaggatgatagcgatctcgagggaaggacctctttcatgtgggcggctggaaagggatcagacgatgtattgcgcactatgctgtctttgaaatctgatatcgatatcaacatggccgataaatatggcggtaccgccctgcacgctgctgccctaagcggccacgtgtccacagtgaagctgctgcttgaaaataacgcacaggtagatgcgaccgatgtgatgaaacatactccattgttccgagcctgcgagatgggtcataaggatgtgatccagacactgatcaagggcggagccagggtggatctggtggatcaggatggtcactcactcctgcactgggcagccctgggcggaaacgctgacgtctgccagattttgatcgagaataagataaaccctaatgttcaggattacgcgggacgcactcccctgcagtgtgctgcctacggcggttatattaattgtatggcagtcttgatggagaataatgccgatccaaacatccaggataaagagggtcgtacggctctgcattggagctgcaataacggctatctggatgccatcaagctgctactcgacttcgctgcgttcccaaaccagatggaaaataacgaggaaagatacaccccactggactatgcactcctaggtgagaggcatgaggttatccagttcatgctcgaacacggtgcattgtccattgctgccatccaagacatcgcagccttcaaaattcaagccgtttacaagggctacaaagttcgaaaagcctttcgggataggaaaaacttactgatgaagcatgaacaactcagaaaggacgcagcggctaaaaaacgagaggaagagaataagagaaaagaggccgagcagcagaaaggtagaaggagccctgactcatgccggcctcaggctctgccctgtctgccttctacacaggatgtgccatccagacagagcagggcaccatctaagcagcccccagccggaaatgttgcacagggaccggagcccagagattcgagaggatcccccggaggttccctgggcggtgccctccagaaagagcagcacgttagtagcgacctgcaggggacaaatagtagaaggcccaatgagactgcacgcgagcacagcaagggacagtctgcgtgcgtccacttcaggccaaacgaaggctcagatggaagccgccatcccggagtgccatccgtggagaagagtagagagctgagactccagatcatccagcgggagcgaagacggaaggagttattcaggaagaagaacaaggccgctgccgttatccagagagcttggcgcagctaccagctgaggaagcatctctcccacttaagacacatgaaacagctcggggctggtgatgttgataggtggagacaggagtctaccgccctcttactccaggtctggcggaaggaattggagctgaagttccctcaaactacagccgtttctaaggcacccaaatccccctctaaagggactagtgggacaaaaagcacgaaacactcagttctgaaacagatctacggctgttcccatgagggcaaaatccaccatccgactcgcagcgtgaaagcaagtagtgtactgagactgaattccgtcagcaacttgcagtgtatacacctgctggaaaactcaggccgatctaagaacttctcgtataaccttcagtccgctacacaacccaaaaataaaactaaaccgtag

SEQ ID NO: 227349 - DNA, 3198 bp, synthetic construct
  misc_feature 1..3198: note = Description of Artificial Sequence: Synthetic coding sequence
  source 1..3198: mol_type = other DNA
atgaacaagtccgagaatctcttgttcgcaggatctagcttagcctcacaggtgcatgccgctgcggttaatggcgacaaaggagcgctgcagcggttgattgtgggaaactcagcccttaaggataaggaggatcagtttgggcgaactccactgatgtattgtgttctcgccgaccgccttgattgcgccgatgctctactgaaagccggtgcagacgtgaacaagacggaccacagtcaaagaacggccctccatctcgctgcacagaaaggtaactatcggtttatgaaacttctgctcacacgtagggcaaattggatgcagaaagatttggaagaaatgacccctctgcaccttaccacccgccacagatcgcctaaatgcctagcattactcctgaagtttatggctccaggcgaagtcgacactcaagacaaaaacaagcaaacagctttgcattggtcggcttattacaacaatcccgagcacgtgaagctgcttataaagcacgattctaatatcggcattccggacgtagaaggaaagatccctcttcattgggccgcaaaccacaaagatcctagcgcggtgcacactgtgcggtgtatactggacgccgcaccaactgaaagccttctcaattggcaggattacgagggccgtacaccgttacactttgctgttgccgacggaaacgtcaccgttgtggacgtgctaacaagttatgaatcttgcaacataactagctatgacaacctatttaggacaccgttgcattgggctgccctgttaggccacgcccagattgtgcacctactgctggaacggaataaaagtggcacaattccttccgacagccaaggcgcaactccgttacactacgccgcacagagcaattttgctgaaactgtgaaagtcttcctgaagcacccatcagtgaaagacgactcggacctcgaggggagaactagtttcatgtgggccgctgggaagggatccgatgacgtattgcgcaccatgctgtcactcaagagtgatatcgacatcaacatggcggataaatatggtgggacagccctacatgccgcagccctaagtggccacgtcagcaccgtgaaattgctgctggagaataacgcacaggtggatgccacagacgtcatgaagcataccccactttttcgggcatgtgaaatggggcataaggacgtcatccagactctgattaaaggcggtgcaagggttgacctggttgatcaggacggtcactctctattgcactgggctgcactgggcggaaatgccgatgtttgccagatactcatcgagaataaaattaaccctaacgtgcaggactacgctggaaggactccattacagtgcgcggcatacggaggatacatcaattgtatggcagtgctcatggaaaacaatgctgaccccaacatccaggacaaagagggacggacagctctacattggagctgtaacaatggctatctcgacgcaataaagctgctgctggattttgctgcctttccaaatcaaatggagaacaacgaagagcggtacactccacttgactatgccctactcggggaacgccacgaggttatccagtttatgctcgaacatggtgctcttagcatcgctgcgattcaggatatcgccgcattcaaaattcaggccgtttacaagggatacaaggtgaggaaggcctttcgcgataggaaaaatctgctcatgaagcacgagcagctccggaaagatgcggcagctaaaaagagggaagaggagaacaaacggaaggaagccgaacagcagaaaggaaggcggagtcccgattcatgccgcccacaggcactgccatgcttgcctagcacccaggatgtcccaagccggcagtcgcgcgcaccttccaagcagcctcctgccggtaatgtggcgcaggggcctgaaccaagagactcccgagggagtcctggcggatctttgggcggtgccttgcagaaggaacagcacgtctcaagtgacctgcagggcacgaactctcggagaccaaatgagaccgccagggagcacagtaagggccagtccgcctgtgttcatttccgccctaacgaaggttctgatggatcaaggcaccccggtgtaccgagtgtcgagaagtcccggggagaaacagcaggcgacgagcggtgcgctaaggggaagggatttgtaaaacagccaagttgcattcgggtcgccggtcctgatgagaaaggggaagatagtcgcagggccgcagcctccctgccaccccacgattcccactggaaaccttcccggaggcacgacactgaaccaaaggcaaagtgtgcacctcaaaaacgaagaacacaggagttgcgaggcggtaggtgctcacccgctgggtcatctaggccaggatctgcccgaggggaggccgtgcatgcaggccagaatccgcctcaccatcgtaccccccgaaataaggtgacacaggccaagttaaccggcggattatactcgcacctgcctcagtctactgaggaattgcggagcggggctcgaagacttgaaacaagtaccctttccgaggacttccaggttagcaaggaaacagacccggctcccggtcccttaagcgggcagtccgtcaacattgaccttttacccgtggaactgcgactacagatcatccagagggagaggagaaggaaggagctctttcgcaagaaaaacaaagcagccgcagtgatacaacgcgcttggagatcctatcagctgcgcaaacacctttcgcacctgcggcacatgaagcaactgggcgctggcgacgtcgaccgatggcgccaggagtccacagcgctgctgctgcaggtgtggagaaaggaactcgaattgaagtttccacagaccacagctgtgagtaaggccccaaaaagcccctcaaagggaacttcgggtactaaatccacgaaacactccgtgctgaagcagatttacggatgttcacacgaggggaaaattcatcatcccacacgttcagttaaagctagcagcgtcctgcggctgaactctgtctctaacctgcagtgtatccatcttttggagaattccggccgtagcaagaatttctcttacaaccttcagagtgccacccagcctaagaataaaaccaagccctag

SEQ ID NO: 227350 - DNA, 306 bp, synthetic construct
  misc_feature 1..306: note = Description of Artificial Sequence: Synthetic coding sequence
  source 1..306: mol_type = other DNA
atgaacaaaagcgaaaaccttcttttcgcaggctcctctctggcgtcccaggtgcacgctgccgctgtgaacggagataagggggcactacaaagactcatcgtcggcaactcggcccttaaagacaaggaagaccagttcggtaggacaccactgatgtattgtgtgttggcagataggctagactgtgccgacgcgctgctcaaggccggtgcagatgtgaataagaccgatcactcacaacgaaccgctctccacctggctgctcagaaagcgttaaggacaataagtacgggacgtatctag

SEQ ID NO: 227351 - DNA, 2967 bp, synthetic construct
  misc_feature 1..2967: note = Description of Artificial Sequence: Synthetic coding sequence
  source 1..2967: mol_type = other DNA
atgaaactgctcctgacgagacgagcgaattggatgcagaaagatctggaggagatgactccattgcatctcactacacggcaccgctcccccaagtgcctggcattgctgcttaaatttatggcgcctggagaagtggatactcaggacaagaataaacagacagcgttacactggtctgcatactataataatccagaacatgtgaaactgttaattaagcacgactcgaacatcggtatcccagatgtggagggaaagattccacttcactgggccgcaaatcacaaggacccatctgctgtgcatacagtccgctgcattctcgatgccgctcctactgagtccctgttgaactggcaggattatgaaggacgcacccccctccactttgcggtggcagatggaaatgtgaccgtggtggatgtcctgacaagttatgagagctgtaacattacttcttacgataacctgttccggacaccgcttcactgggccgctttgctcggtcatgctcaaattgtacacctgctgctggaaagaaacaaaagcggaaccattccatcagattcccaaggcgctactccactccattatgcggctcagagtaatttcgcagagaccgttaaagtgttcttgaagcacccctctgttaaagatgactccgaccttgagggaaggacgtcatttatgtgggcagcagggaaaggcagcgacgatgtcttgagaacaatgttgagcctgaagagcgatattgatattaacatggctgataagtacggcggaaccgcgcttcacgccgctgccctctcaggccatgtatccaccgtgaagctgttacttgaaaataatgcgcaggtcgacgctaccgacgtaatgaaacacaccccactttttcgggcttgcgaaatgggccataaggatgtgatccagactctgattaaagggggtgcacgggtcgatctcgtggatcaggacgggcatagcttgttacattgggcagccttgggaggtaatgctgatgtttgtcagattctgattgaaaataaaattaaccccaacgttcaggactatgcgggtaggaccccactgcaatgcgccgcttatggtgggtatattaattgcatggccgttttgatggaaaataacgccgatcccaacatacaagataaggaagggcgtactgccttgcactggtcctgcaacaatggatacctggatgccatcaaattactgttggattttgccgcattcccaaatcaaatggagaacaatgaagagcgatatacccctctcgattacgccctcctgggggagaggcacgaggttatacagttcatgcttgaacatggcgcattgtcgattgcagcaatacaagatatagcagcgtttaagattcaggccgtatacaagggctacaaggtgcgaaaggcattcagagacagaaagaacctattgatgaagcacgagcagttacggaaggacgctgctgctaaaaagcgggaagaggaaaataaaaggaaggaggccgagcaacagaaaggccgtaggtcgccggacagttgtcggccacaggccctcccatgcctcccaagtactcaggatgtgcccagtaggcagtctagggccccatccaagcagccaccggcaggtaacgtggcccaagggcctgaacctcgggattctcggggatccccgggagggagcctaggaggcgcactgcagaaggagcagcatgtgtcatctgatctccaggggaccaatagtcgccgtccaaatgaaacagcgagggagcatagcaaaggacaaagcgcctgcgtgcacttcagaccaaatgagggtagtgatggttctcgacatccaggggttccgagtgtggagaaatccagaggtgagaccgccggagacgagaggtgtgctaagggaaagggatttgtgaaacagccgtcatgtatccgtgtggccggaccggacgagaagggcgaggactcacggagagccgcagcaagtctgccaccccatgacagccactggaagccctcccgaagacatgatacggaaccgaaagcaaaatgtgcccctcaaaaacgccgtactcaggagctccggggaggcaggtgctcacctgctgggtccagcagaccgggatctgcccgtggagaagcggtgcatgctggacaaaatccaccccatcatcggacgcctagaaataaagtgacacaggccaagctcacggggggactctatagtcacctgccccagtctacagaggagcttcgatctggcgcacgcagactcgagacgagtacgctaagcgaggatttccaggtcagtaaggaaacagatccggctcccggtccactgagtgggcagagcgtcaacatcgacctcctccctgtggagttgagactccagattattcaacgagaacgcaggcgaaaggagctgtttcggaaaaagaacaaagctgccgctgtgatccaaagggcttggcgatcttatcagctcaggaaacacttgagccacctgaggcatatgaaacagctgggggctggcgacgtggaccggtggaggcaagagtcgactgcacttctgttgcaagtctggagaaaagagctggagctgaaatttccacaaaccaccgccgtgagcaaggctcccaaaagcccatccaaaggaacttctgggaccaagtcaaccaagcactccgtgcttaaacagatctacggatgtagccacgagggtaaaattcaccatccaacacggtcagttaaagcctcttccgtgttgcgcctgaacagcgggaaggccgcaaccgccaagcagatggttggcaagaacatggggaaacactttcccctgttccatccccaacgccagaagacacttgagcagatctggcccggattttccaatggccatttaatctcatgggattattactgcagccaacacttaagtccatag

SEQ ID NO: 227352 - DNA, 3723 bp, synthetic construct
  misc_feature 1..3723: note = Description of Artificial Sequence: Synthetic coding sequence
  source 1..3723: mol_type = other DNA
atgtctgtgaaggagggtgcccaacgaaaatgggctgccttaaaggaaaaactcggtcctcaagattctgatcctaccgaggcgaacctggagagcgccgatcctgagctgtgtatccgccttttgcaaatgccctcggtggtgaattacagtggcctgcggaagcgcctcgaaggcagcgacggcggatggatggtccaattcctcgagcaatccgggctggatttacttctcgaggctcttgcacggttgagcggcagaggcgtagctcgcatttcagatgctttgttgcaattgacttgtgtgagttgtgttagagccgtcatgaactctaggcagggaattgaatatattttatctaatcagggatacgttaggcagctttcccaagcccttgatacctccaacgtgatggtaaagaagcaggttttcgaactgctagctgccctttgcatctattctcctgagggccatgtcctaactttagacgccttggatcattacaagaccgtctgctcccagcaataccgcttttctatcgtgatgaacgagttatccggcagcgacaacgtcccttacgtagtgactctcctgtcagtgatcaatgccgtgattctaggacctgaggaccttcgcgcacggactcaactgcgcaacgagttcatcgggttacagctcctggatgtactggcacggctgcgcgatctcgaggatgcggatttactcatccaattggaggcattcgaggaggcaaaggctgaggacgaggaagagctgctgcgagtaagcgggggtgtggatatgtcctcccatcaggaggtttttgcgtccctgttccataaagtgagctgtagtccagtttctgctcagctgctgagcgtgctacaaggactgctgcatctggaaccaaccctgcgcagttctcagctgttgtgggaggcactggaaagtctggttaaccgcgctgtgcttctggctagtgatgcccaggaatgtacactcgaggaggttgtggagcgccttctttccgtgaagggaaggccgcgaccatcacctttagttaaggcgcacaagagcgtccaggccaatctggaccagagccagagaggctcatcaccccagaatacgactacacctaaacccagcgtggagggccagcaacctgccgctgcggcagcttgtgaacccgtcgaccatgctcagagcgaatcgatcctgaaagtttcccaaccacgcgcactcgaacagcaggcaagcacaccgcctcctccaccaccccctcctcttctacccggaagctctgcggagccccctcctccgccaccccctccgcctctcccttccgttggggcaaaggcactgccaacagcccctccgccaccccctctgccgggactaggcgcaatggcgcctccagcccctccactccccccaccccttcctggttcttgcgagtttctgcctccccctcctccccctctgccaggcctcggatgcccccctccaccgccaccactgctccctgggatgggctggggaccgcctcctcctcctcccccactactgccttgcacatgtagcccgccagtggctggaggaatggaagaagtgatagtcgcacaggtggaccacggcttgggttccgcctgggttccgtcacataggagagtaaatccacctaccctcagaatgaaaaaactcaactggcagaagcttcctagcaatgtcgcacgcgaacataactctatgtgggcttccctgagttcacccgatgccgaggccgtcgaaccagatttttccagtatcgagcgtctcttctcatttcccgcagccaagccaaaggagcctacaatggtcgctcctcgcgctcgaaaggaaccaaaagagatcacttttttggacgctaagaaatctttgaacttgaacatctttctcaaacaatttaagtgctccaacgaagaggttgctgcaatgattagggcgggtgacaccactaagttcgacgtggaagtcctcaaacaactgctgaagctgctgccagagaaacacgaaatcgaaaacctgagggcatttacggaggaacgtgccaagcttgcctctgcagatcatttctaccttctgctcctcgccattccttgttaccaactacgtatagaatgtatgttgctttgtgagggagcagcagcagtgcttgatatggtcaggcccaaggctcagctagtcctcgccgcttgtgagtcattgctgacgagccgacagctccccattttttgccagctcattttgagaatcggaaatttcttgaactatggtagccacactggtgatgcagatgggtttaaaatctccacgctgctcaaactgactgagacaaaatctcagcagaatagggtcaccctactccatcatgttctggaggaagccgagaaatcccatccagatttactgcaactcccaagagacctggaacagccgtcacaggctgccggaatcaatttagaaattatccggtcagaagccagcagcaacctgaagaagctccttgaaaccgagcggaaggtaagcgcatccgtcgcagaagtgcaagaacagtacaccgagcgactccaggccagcatcagtgccttccgggcactcgacgagctgttcgaagccattgagcaaaagcagagggagctggcggattacctgtgtgaggatgcccagcagctcagtctcgaggacacattttctaccatgaaggctttccgtgatctctttttgcgtgcgctgaaagagaacaaagataggaaggagcaggccgcaaaggccgagcggaggaagcaacagttagctgaagaagaagctaggcgtcccagaggagaagacggcaaaccagtcagaaaagggccaggtaagcaggaggaggtctgtgtcattgacgccttgctggccgacataagaaaaggcttccaacttaggaaaacagctagaggcagaggcgacacagatgggggtagcaaagccgctagtatggacccacccagggccaccgagcctgtggcaaccagtaaccctgccggtgatcccgtcggctccacccggtgtcctgcttctgagcccggacttgacgctacaaccgcctccgagagccggggttgggacctggttgatgcggtgacacctggcccacaaccaacactggagcagctagaggaaggaggcccaagacccctggagaggaggagttcgtggtatgtggacgcttccgatgtgctgaccacggaggatccccaatgtccacagcctctggaaggagcctggccagtgacactgggggatgcacaggcactgaaacccttgaaattcagctccaatcagccacccgctgcaggttccagccggcaagacgctaaggatccaacatccctgctcggagttttacaggctgaagctgactcaacctcggaggggctcgaggacgcagtgcatagtcgaggtgcccgacctcctgccgctggtcctggcggagacgaggacgaggacgaggaggacactgcacctgagtccgctttggacaccagtctcgataaaagtttctctgaggacgcagtgactgattcaagtgggagcggcaccctgcctagggcacgcggacgcgcttcaaaaggaacgggcaagaggagaaaaaaacggccaagccgcagccaagagggcctgcggcctaggccaaaggccaaatag

SEQ ID NO: 227353 - DNA, 3750 bp, synthetic construct
  misc_feature 1..3750: note = Description of Artificial Sequence: Synthetic coding sequence
  source 1..3750: mol_type = other DNA
atgtccgtgaaggaaggtgctcagaggaaatgggccgcactcaaggaaaagcttggccctcaggactccgatcctactgaggccaatcttgagtctgcagaccctgagctgtgtataaggctgcttcagatgccctctgtggtgaactactccgggctgcgcaagagattggaagggtccgacgggggatggatggtgcagttcctggagcagtccgggctggatctcctcctggaggccctagcaaggctgtcagggcgaggagtggccaggatcagcgatgctctgctgcagttgacatgcgtgtcatgcgttagagccgttatgaactctcgccagggaatcgaatatattctgtctaatcaaggttacgtgagacagctctctcaggctctcgacaccagtaacgtaatggtcaagaagcaggtgttcgaactgcttgccgcactctgcatatattctccggaaggccatgttctcactcttgatgcattagatcattacaaaactgtgtgtagccagcagtacagattttccatcgtcatgaacgaactgagcggaagtgataatgtgccttatgttgtgactttgctcagcgtaattaatgctgtcatcctgggaccagaggaccttcgggctaggacccaactccgcaacgagttcatcggattgcagctcctggacgtgctggctagattgagggatcttgaagacgccgaccttcttatccagctggaagcattcgaagaggcaaaagccgaggacgaagaagaactgttgcgcgtgtctggcggtgttgacatgtcatctcaccaggaggtttttgcttctctgttccataaagtcagctgcagtcctgtaagtgcacaactgctaagtgtgctccagggtctactgcacttggaaccaaccctgcgcagttcccaattgttatgggaggctctcgaaagcctcgtgaaccgggcagtcctgctggcttctgacgcccaggagtgcaccctggaagaagttgtggagcggctgctgtctgtcaaaggcaggcccaggcctagccccctcgtgaaagcccataaaagcgtgcaggccaatctcgaccaatctcagaggggctctagtccacagaacaccaccacacctaagccatccgtggaaggccagcagccagccgctgcagcagcatgcgaacctgtggatcatgcccagtctgagtccattctgaaagtgtcgcaacccagggccctcgagcaacaggctagtaccccacctccccctcctcctccacctttacttcccggttcatccgctgagccgcctccacccccacctccgccacccctcccatcagttggtgccaaggctctgccaacagcccctccccctcctcccctgcctggattaggcgcaatggcaccgccagcaccccctttgcctcctcccctgccagggtcctgtgagttcctgcctccaccaccccctcccttacccggtcttggatgtcctccaccgcctccccctttgctccccggaatggggtgggggccacctccgccacctccgcctttgttaccttgcacgtgctcccctcccgtggccggtggcatggaggaagtcattgttgcacaggtggaccacggcctcgggtccgcatgggttcccagccataggcgagtcaaccctcctaccctgaggatgaaaaaattgaattggcagaagctgcccagcaacgttgctcgcgagcacaactctatgtgggctagcttatcaagtcccgatgcagaggccgtcgaaccagatttcagcagtattgaacgcctgttttcctttccagccgcaaagccaaaagaacctacaatggtggcccctcgagccagaaaggagcctaaggaaatcaccttcctggatgccaagaagtccctcaatctgaacattttcctgaagcagttcaagtgtagcaacgaggaggtagccgctatgataagagcaggcgacacaactaaatttgacgtcgaggtgctcaagcaactgcttaagctcctgcctgagaagcacgagatagagaacctccgcgctttcacagaggaaagagccaagcttgcgtctgcggaccatttttatctcttgttactagctataccgtgttaccagctccgcatcgagtgtatgctcctgtgcgagggagctgctgccgttctggatatggttagaccaaaggcccagctggtgctcgctgcctgcgaatccctccttacctcgcgtcagttgcccatcttctgccagctgatactgagaatcggtaactttctaaactatggaagtcacacaggggacgccgacggatttaagatatcaacacttttgaagctgacagagacaaaatcccaacaaaaccgggtgacactcctgcaccatgtgctcgaagaggctgagaaaagccaccccgatctgcttcagctacctcgcgatctcgagcagccctcccaggccgcaggaataaaccttgaaatcattcgcagcgaggcttcttctaaccttaagaagctcctcgagacagagcgcaaggttagcgcttccgtagctgaagtgcaggaacagtatacagaacggctgcaagcaagcatcagcgctttcagagccctcgatgagctgttcgaagcaattgagcagaagcaaagagaactcgccgactatctatgtgaggacgcccagcaactgagtctggaagataccttcagcactatgaaagccttccgggacctgttcctgcgcgctctgaaggagaataaggacaggaaggaacaagcggcaaaggctgagaggagaaaacagcaactagccgaagaagaggccagacggcctcgcggagaggatggaaagcctgtgcgaaaaggacctggaaagcaggaagaagtgtgcgtcatcgacgctctgttagcagatattcggaagggttttcaactgagaaagactgccaggggacggggtgacaccgacggtggatccaaggctgcctcaatggacccccctcgagccaccgaacccgtggcaactagtaatccggcaggagacccagtcgggtcaactcgctgtcctgccagtgagcccggtttggacgctaccaccgcttctgaaagcagagggtgggatctcgttgacgctgtgaccccagggcctcagcccactcttgagcagcttgaagaaggcggtccaaggccactggaacgcaggtcaagctggtatgttgatgcttcagatgtgctcaccaccgaggacccccagtgtccccagcctctggagggggcatggcctgtcaccctgggtgacgcccaggccttaaaacccttgaagttctcctccaatcagcccccagcagctgggtcctctcggcaggacgctaaggatccaacatccctcctgggggttcttcaggctgaagctgattccacatctgaaggactggaggatgccgtgcattcaaggggagctaggcccccagctgccggaccgggtggggacgaggatgaggatgaggaagacactgcccctgaatccgccctggatacctccctagacaaaagcttcagcgaggacgccgtgaccgactcctcaggatctgggactttgccacgcgcacgcggtcgagcgagtaaagggactggcaagcgccgtaagaaacgtcccagcaggtcccaggaagaggtccctccagattccgatgataacaaaaccaaaaagctttgtgtcatccagtag

SEQ ID NO: 227354 - DNA, 705 bp, synthetic construct
  misc_feature 1..705: note = Description of Artificial Sequence: Synthetic coding sequence
  source 1..705: mol_type = other DNA
atgtccgtgaaggaaggtgcgcagaggaaatgggctgccctgaaagagaagctgggccctcaagactctgacccaaccgaggccaatctagagagcgccgaccccgagctgtgcattcgcttgctgcaaatgccatctgtcgtaaactactctggtctccgcaaaagactggaaggctccgacggtggctggatggttcaatttctagagcagtccgggctagacctgctgctcgaagccctggctcggctttctggaagaggggtggctaggatctcagacgccctgctgcagctcacttgcgtttcctgcgtgagagcagttatgaatagtcgtcagggaatcgaatatatcttatcaaatcagggctatgtgcggcagctatcccaggccctggatacttcaaacgtcatggttaaaaagcaggtgttcgagctcctcgccgctctctgcatttatagtcccgaggggcatgttctcacactcgatgctttagaccactacaagaccgtctgctcacaacagtaccgctttagcattgttatgaacgagctatcagggagcgataatgtcccctacgtcgtcacactactgagcgtgatcaatgcggtgatactgggtccagaagatcttcgagctcggacacaactgagaaacgagttcatcggtttgcagctcttggatgtgctcgcccgactgagatag

SEQ ID NO: 227355 - DNA, 1758 bp, synthetic construct
  misc_feature 1..1758: note = Description of Artificial Sequence: Synthetic coding sequence
  source 1..1758: mol_type = other DNA
atgagtcagcagcatactttgcctgtcacactgtcgccagctttgtcacaggagcttttgaagactgtacctcccccagtcaatacacaccaagagcagatgaaacagccaacacccctgcccccaccgtgccagaaggttcccgtcgaactccctgtcgaagttccttccaagcaggaagagaagcacatgaccgctgtgaaaggtctgcctgagcaagagtgtgagcagcaacaaaaagaacctcaagagcaggagctgcagcagcaacattgggaacaacacgaagaatatcaaaaggcagaaaacccggaacagcagctgaagcaggaaaagacccagcgagatcaacagttgaataagcagctggaagaagagaaaaaactgctggatcagcagctggaccaggagcttgtcaagcgagacgagcaactggggatgaaaaaggagcagctgctcgagctaccagaacagcaggaaggtcatttgaaacatttggaacagcaggaggggcaactgaaacaccccgaacagcaggaaggtcagttagagcttccggaacaacaggaggggcaactggagctccccgaacagcaggagggacagttggaacttccagaacagcaggaaggacagctcgaattgccggaacagcaggaagggcagttggaactacccgagcagcaggagggtcaactggagctgccgcaacagcaggaaggccagctcgagctgagcgagcaacaggaggggcagttggagctgtcagagcagcaggaagggcagctgaagcacttggagcaccaggagggccaactggaagtgcctgaggagcagatgggtcagcttaagtacctggaacaacaggagggccagcttaagcacctggaccagcaggaaaaacaaccggagttgcctgagcaacagatggggcaactcaagcacttagagcaacaggagggccagccaaagcatcttgagcagcaggaaggacagctggaacagcttgaggagcaggaaggacagctgaagcacctggaacagcaggaagggcaactcgaacatctagagcatcaggagggtcagttgggcctccctgagcagcaggtgctccagttgaagcaactagaaaaacaacagggccagcctaagcacctggaagaggaagagggccaactcaagcacttggtccagcaggaaggccagctcaaacatcttgtgcagcaggaagggcagctggagcagcaagaacggcaagtcgagcacctcgagcagcaggtgggccagctgaagcatctcgaagagcaggaaggccagcttaaacacctagagcaacagcaagggcaactcgaggtgccagagcaacaggtgggacagcccaaaaaccttgaacaggaagagaaacagctggaactcccagaacagcaagagggccaggtcaagcacctggaaaaacaagaagcgcagctcgagctgccggagcagcaggtgggtcaaccaaaacacctagagcaacaagagaagcacctggaacaccccgagcagcaagatggtcagctgaagcacctggaacagcaggagggccagctaaaagatttggagcagcagaaaggccagcttgagcagccagtcttcgcccctgcccctggacaagtacaggacattcagccagccctacctacaaagggggaagtactcctgccagttgaacaccagcaacagaaacaggaggtccagtggcctcccaagcataagtag

SEQ ID NO: 227356 - DNA, 1320 bp, synthetic construct
  misc_feature 1..1320: note = Description of Artificial Sequence: Synthetic coding sequence
  source 1..1320: mol_type = other DNA
atgaagaaagaacagttgctggagttgcctgagcaacaggaaggccaccttaagcatttggaacagcaagagggacagctaaaacatccagagcaacaggagggccagctcgaattgccagagcaacaggaaggccagcttgagctgcctgagcagcaggaaggccagctggaactgccagaacaacaggaaggccaactagaactcccagaacaacaggaggggcagctggaactccccgagcagcaagagggccaactggaattgccccagcagcaggagggacagctggaacttagtgagcagcaggaaggacagctggaactgagtgagcaacaggaggggcaattgaagcacctggagcatcaagaaggccagctggaggtgcctgaggagcagatggggcaacttaagtacctggagcagcaagagggccagctaaagcacctggatcaacaggagaaacagcccgagctgccagagcagcagatgggccagctcaagcacctggagcaacaggagggccagccaaagcatctggagcagcaggagggccaacttgagcagttggaggaacaagaaggccaattgaaacatctggagcaacaagagggccaactcgagcacctggaacatcaggagggccagctgggcctgcctgagcagcaggttcttcaactaaaacagttggagaaacagcagggtcagcccaagcacctagaggaggaagaggggcaactaaaacatctcgttcagcaggaaggtcaacttaaacacctggtacaacaagaggggcagctggagcaacaagaaagacaggtcgaacacctagaacagcaggtcggccagctgaaacaccttgaggagcaggaaggacaactcaaacacctggagcaacagcaggggcagctcgaggtgccagagcagcaggtgggtcagcccaagaatttggaacaagaggagaaacagctcgaactgcccgaacaacaggaggggcaagttaagcacctcgaaaagcaggaagcccagctcgagctccctgaacagcaggtcggacagcctaaacatctagagcagcaggagaaacacctggagcaccctgagcagcaggatggccaactgaaacacctggagcagcaagagggacaacttaaagacctggagcagcaaaaagggcaacttgaacagcccgtgttcgcccctgcccctgggcaggtgcaggatatccaacccgctcttcctacaaagggcgaggtgctgcttccagtggagcaccagcagcagaagcaggaggtccagtggcccccaaaacacaaatag

SEQ ID NO: 227357 - DNA, 1914 bp, synthetic construct
  misc_feature 1..1914: note = Description of Artificial Sequence: Synthetic coding sequence
  source 1..1914: mol_type = other DNA
atgggactgctaagccaaggtagtccccttagctgggaagaaacaaagcgtcacgcagatcatgttagacgacatgggatactgcagttcttgcatatttatcacgcagtgaaagatcggcacaaggatgtgttaaaatggggagacgaagtggagtacatgctggtcagctttgatcacgagaataaaaaagttcgcctcgtgctgtcaggggagaaagtcctggaaacgcttcaagaaaaaggagaaagaaccaatcctaaccatcccacattatggcgccctgagtacggaagctatatgattgagggcaccccgggacaaccttacggcggtacgatgtctgaattcaacacagtggaagccaatatgcgtaagcgcagaaaagaagcaacaagcatcctggaggaaaaccaggcactgtgcaccattaccagctttccacgcctgggctgtccaggcttcacattgcccgaggtaaaacccaatcctgtggaaggcggagccagtaaaagcctgttcttccctgacgaggctatcaataaacatccgcgatttagcaccctgacacgaaatatccgacacaggagaggcgagaaagtcgtgattaacgttccgatcttcaaagataagaatacacccagtcccttcattgagacgtttaccgaagacgacgaagccagtcgtgcctcaaagcccgatcatatttatatggatgctatgggatttggtatggggaattgctgcctgcaggtgacctttcaggcttgttccattagcgaagccagatacctgtacgaccagctggccaccatctgcccaattgtgatggcactcagcgctgccagtcctttttacagaggctacgtctcagacatagactgtaggtggggagtcatttcggcatctgttgacgaccgaaccagggaggagaggggcctggagcctctgaagaacaacaactaccggatatccaaatcacgatacgatagcatcgactcttatcttagcaaatgtggtgagaaatataacgatatcgatctgactatcgataaagaaatctacgagcagttgctgcaggagggaattgatcacttactggcccaacacgtggcccacttgtttattcgcgaccctctgactctgtttgaggagaagatccacctggacgacgccaatgagtcagaccattttgagaatatacaaagcacaaattggcaaacaatgcgctttaagcccccaccacctaatagcgacattgggtggcgagtggaatttagacctatggaggttcagctgaccgattttgagaacagcgcttacgtggtgtttgtcgtacttctgacgagggttattctgtcctacaagctcgactttctgataccactgagcaaagtcgatgaaaatatgaaggtcgcccaaaaacgggatgccgtgctgcagggtatgttctatttcaggaaagacatttgcaaaggcggaaacgcggtggtcgatggttgtggaaaggcccagaactccaccgaattagccgcagaagagtatactctgatgtctattgacacaattataaacgggaaggaaggcgtgttccctggcttgatacccatcctgaacagctatctcgagaacatggaagtggatgtagacacgagatgtagcattctcaactacctaaagctcatcaagaagcgagctagcggcgagctgatgactgtcgcaagatggatgcgcgagtttatagctaaccaccccgactataaacaggattcggtgataaccgatgagatgaattacagcctcattttgaagtgtaaccaaatcgctaatgaactctgcgaatgccccgaactcctgggttctgcgttcagaaaggtcaagtacagtggcagcaagacggattcttctaactag

SEQ ID NO: 227358 - DNA, 870 bp, synthetic construct
  misc_feature 1..870: note = Description of Artificial Sequence: Synthetic coding sequence
  source 1..870: mol_type = other DNA
atgtattttctgactcctattctcgtggcaattttatgtatcctggtcgtgtggatcttcaagaacgccgatcgctccatggaaaaaaaaaaaggagaacccagaactcgggcagaggccagaccgtgggtggacgaagacctgaaggatagctcagacctgcaccaggccgaggaagacgccgatgagtggcaggaatctgaggaaaatgttgaacatatccccttttcccacaaccattaccctgaaaaggagatggtgaagagatctcaagagttctacgaactgctaaataagcggcgatcggtgcgtttcatttctaacgagcaagtgcccatggaggttatagacaacgtgataagaacagcaggcactgcacccagcggagcccacacggagccatggaccttcgtcgtggtgaaagatcccgatgttaaacacaaaatccggaaaattatagaggaagaagaagagatcaactatatgaagcgcatgggccacaggtgggttactgaccttaaaaagcttaggactaactggataaaggagtaccttgatacagcccctattctaatcctaattttcaagcaggtccacggcttcgccgctaatgggaaaaagaaagtccattattataatgaaatttctgtgtccatcgcttgtggtatactcctcgctgcactgcagaacgccggactcgtcactgttactaccacaccacttaactgcggtcctcgcctcagagtgctgctggggaggccagcccatgagaaactgctgatgcttctccccgtgggatacccttcgaaggaggccaccgtgccagatctgaagcgcaagcccctggatcagatcatggttaccgtctag

SEQ ID NO: 227359 - DNA, 813 bp, synthetic construct
  misc_feature 1..813: note = Description of Artificial Sequence: Synthetic coding sequence
  source 1..813: mol_type = other DNA
atgtatttcttgacacctattctcgtagctatcctgtgcattcttgtcgtgtggattttcaagaatgctgataggtctatggaaaagaagaagggagagcctcgtacacgcgcagaggccagaccttgggtggacgaggatcttaaggacagctcagaccttcatcaggccgaggaagatgccgacgagtggcaggagtcggaggaaaatgtcgaacatatcccatttagccacaaccattacccagagaaggaaatggtgaaaaggagtcaggaattttacgagctcttaaacaaacggagaagtgtacggttcattagcaacgaacaagtgcctatggaagtgatcgacaatgtgattaggaccgcagggacggccccttctggcgctcacacggagccctggacctttgttgtagtcaaagaccccgatgtcaaacacaaaattcgtaaaattatcgaagaggaggaagaaattaattatatgaaacgcatgggtcacaggtgggtgactgacctgaaaaagctacggacaaactggatcaaagaatacctggacacagctccgatcctcatcctcatctttaagcaggtccacggctttgccgcaaatggcaagaagaaggtccactattataacgaaatctctgttagcattgcatgcgggatcttactggccgctctgcaggttaataatgggattaccatgagacaccaaaccgcccgtcaccgacacttaattgagggacccggtcggtcgtcagaagcctgttcgaaactgagctctcaaggctgccctggtttttattgttag

SEQ ID NO: 227360 - DNA, 744 bp, synthetic construct
  misc_feature 1..744: note = Description of Artificial Sequence: Synthetic coding sequence
  source 1..744: mol_type = other DNA
atgtacttcctaacccccatcctcgttgccatcctgtgcatcctggtcgtatggatcttcaagaatgcggaccgctcaatggagaagaaaaagggggaaccacgtactcgagcggaggcacgcccttgggttgatgaggaccttaaagattcaagcgacctgcatcaggccgaagaggacgctgacgaatggcaggaaagcgaggagaacgtggagcacattcccttctcccacaatcactatccggaaaaggaaatggtgaaacgaagtcaggagttttacgaacttctaaacaaaagacggtccgttagatttatctcgaacgagcaggtgccaatggaggttattgacaacgtcatccgcaccgctggaacggccccaagtggcgctcataccgagccttggaccttcgtcgtggtgaaggatcctgacgtaaagcacaagatacgtaagatcattgaagaggaggaggagatcaactatatgaagcgcatgggccaccggtgggtgactgacttgaaaaagcttcggactaactggatcaaagaatacctggacacagcgcctattctcatcctgatcttcaagcaggtgcacggctttgctgcaaatggcaagaagaaagtgcattactataacgaaatctcagtcagcatcgcgtgcgggatcttacttgccgctctgcaggtgttcggaaagattattctcaaggaactggccctcatctctttcctcaacctctag

SEQ ID NO: 227361 - DNA, 855 bp, synthetic construct
  misc_feature 1..855: note = Description of Artificial Sequence: Synthetic coding sequence
  source 1..855: mol_type = other DNA
atgtacttcttgacgccaattctggtggcaattctgtgtatcttagtcgtgtggatctttaagaacgctgatagatctatggagaagaagaagggggagccccgaactagagcggaggctcggccatgggtggacgaggaccttaaggacagctctgacttacaccaggccgaagaagacgctgatgagtggcaagagtctgaggaaaacgtcgagcatattcctttcagtcataaccattaccctgagaaggaaatggttaaaaggtcccaggagttctatgagctgctgaacaaaagacgctcagttagattcatttctaatgagcaggtacccatggaagtgattgacaacgtcatccggactgctggcaccgcgccttctggggctcataccgagccctggacctttgtcgtagtgaaggatccagacgtgaagcacaaaatcaggaaaatcatcgaggaagaggaggaaataaactacatgaagaggatggggcatagatgggtcacagatctgaagaaattacgcaccaattggattaaggagtatttggacactgctccaatcttgatcttgatcttcaaacaggtccatgggtttgccgcaaatggcaagaaaaaggtgcactactacaatgagatcagcgtttctattgcatgcggaattctactggctgctctacaggtgaataacggcataactatgcgccatcaaaccgccagacaccggcatttgattgaaggccctggacgatcgtcggaagcttgttctaagctgagcagtcagggttgcccaggggcaagtgccgcaggctccttattccattttgccattgaattcgccgctccatag

SEQ ID NO: 227362 - DNA, 2850 bp, synthetic construct
  misc_feature 1..2850: note = Description of Artificial Sequence: Synthetic coding sequence
  source 1..2850: mol_type = other DNA
atggagccccctggtcgcagtagcagatccaccgcgtctcacaccctgcaccagtactgctgtccaacccaggtgcttgactccatgaaactcaccccaagcggcaggttggccgagagctctgtcgagggcgatgcccctggttccgatctgtccacagccgtcgatagccctggttcccagcccccttaccggctaagccaactgcccccttcaagctcacatatgggcggaccacctgcaggcgtgggtctaccatgggctcagagggccagactgcaacccgcttccgttgccctccgcaagcaagaggaagaggaaataaaacggtctaaagcccttagtgattcctatgaactgtctactgacctccaagacaaaaaggtggagatgctcgaaagaaaatacggagggtctttcctgagtcggagagcagcgagaacaattcagacagcgtttaggcagtatcgcatgaataaaaattttgagagattgagaagtagcgcgagcgaatctcgcatgtcgcgtcgtataattctgtctaacatgcgaatgcagtttagtttcgaggaatacgagaaagcccagaaccctgcatattttgaaggcaagcccgcttcactggatgagggcgcaatggctggcgcacgctctcataggctagagcggggactaccgtacgggggaagttgtggcggaggcattgatggagggggtagcagcgtcactacgtcaggggaatttagcaacgatattaccgagctcgaggattccttttcaaagcaagtgaagagcctcgctgaatctatagatgaggcactgaactgtcacccctcagggccaatgtctgaggagcctgggagcgcccagttagagaaacgggagtccaaagagcagcaggaagattcaagtgctacctccttctcagacctgccgctgtaccttgatgacacagtccctcagcaatcccccgaacgactgccatcaaccgagccgccaccccaggggagacctgagttttgggcacccgctcctcttccccctgtacccccaccagtgccaagtgggactcgggaagacggttccagggaagagggcacccgcagaggacccggttgtcttgagtgccgcgactttcggctccgggctgcacacctgccccttctgacgattgagcccccttcggattcctccgtagacctgtctgatcgctcagatagggggagcgtccaccggcaattagtatatgaggccgatggatgtagtccacatggtacattgaagcacaaaggccctcccggaagggcgcctattccccaccggcactatccagctcccgagggacctgcccctgctccaccaggcccactccccccagcccctaacagtggtacaggcccatcaggcgtcgccggagggagaaggttaggaaagtgcgaagctgccggagagaattctgatggtggagacaacgaaagcctggagtccagctcaaattccaatgaaactatcaattgtagcagcggaagctctagccgcgactcgctgcgtgagccaccagccaccggcctctgcaaacagacctatcagcgcgagacccgccattcctgggactctccagcattcaataacgatgtggtacagagacgtcactacagaattggcttaaatttatttaataagaaacctgagaagggcattcagtacctgatagagcgaggattcttatccgatactccagtgggtgtggctcattttatcctcgagcgcaaaggcctgtctagacagatgatcggagaattcctagggaatcgacagaagcagttcaatcgggatgtgctggattgcgtagttgacgagatggatttcagcagtatggacctggacgatgcactgagaaaatttcagtctcatatccgtgttcagggtgaagcccagaaggtcgagcggctgatcgaggctttctctcagcgctactgcgtttgtaatccggctctggtgaggcaattcaggaacccggacactatttttattctggcgttcgccattattttgctcaatactgatatgtacagtccatcagtcaaagccgaacgtaaaatgaagcttgacgacttcattaaaaacttacggggagtcgacaatggcgaggatatcccaagggatctcttggtcgggatctatcagcgcatccagggcagggaactgcgcacgaacgacgaccacgtgagccaggtccaggctgtggaacgcatgatagtcggaaaaaaaccagtactctccttgccacatcggagactggtgtgttgctgtcagctctatgaagttcccgacccgaaccgcccacaaagattagggctgcaccaacgtgaagtgtttctgttcaatgatttactcgtagtaacaaagatattccagaagaagaagatactggtcacatattcgttccggcagtctttccctttggttgagatgcatatgcagctattccaaaattcttactatcagttcggcattaaactgctctcggcagtaccaggaggggaaagaaaagtcctaattatatttaatgccccaagtctgcaggacagacttcgcttcacttctgatctgcgggagtctatcgcagaagttcaggagatggagaaatacagagtggaatccgagctggaaaagcagaaaggcatgatgcgccctaatgcatctcaacctggcggagccaaggactctgtaaatggtacgatggctaggtcaagtttagaggacacctacggcgctggcgacggcctgaagagaggcgctctctcatcaagtttgcgagacctgagtgatgccggagtttgttactag

SEQ ID NO: 227363 - DNA, 4437 bp, synthetic construct
  misc_feature 1..4437: note = Description of Artificial Sequence: Synthetic coding sequence
  source 1..4437: mol_type = other DNA
atggaggcgggatccggaccgccaggaggacccggttctgaaagcccaaaccgggctgtggaatacttgctggagttaaataatattatcgagtctcaacagcaactgctagaaacccagcggaggcgaattgaggagttggaaggacagctagaccagcttacacaagagaatcgggatctgcgggaggagtcccagctgcaccggggtgagctacatcgcgacccccacggagccagggatagcccaggtagagagagccagtaccagaacctaagggagacccagttccaccaccgagagttacgggagagccagttccatcaggccgcacgagatgtcggatatcctaaccgggagggcgcataccagaatagagaagcagtgtacagagacaaagagagagatgcatcgtaccccctccaggacacgacgggttacacggccagagaaagggatgtggctcaatgccaccttcaccacgaaaaccccgctctgggcagggagagaggcggtcgggaggctggcccagctcatcctggcagagagaaagaagcgggttattcagccgcagtcggagtgggccctcggccacctagggagcgagggcaattaagccgaggagccagtcgtagctcttctccaggagcgggtggcggacatagcacaagcaccagcacatcccctgctacaactctgcagcggaatgtggaaggggatgctcccggtagtgatttgtctacagctgtcgatagtcctggttcacagcctccgtatcgtttgagtcagcttcctccatcctcctctcatatgggagggcctcctgccggtgtgggcctaccctgggcacagagagcaaggctccagccggcaagcgttgctttgcgcaagcaggaggaagaggagattaaaagatcaaaagctttatcagactcatacgagttgagtacagatcttcaagataaaaaagtggaaatgctggaacggaaatatggtggcagctttctatctcgccgtgctgcgaggaccattcaaaccgcatttagacagtatcgaatgaataagaatttcgaacgcctacgatcaagcgcatctgaatcccgaatgagtcgaagaattatattgtcaaacatgaggatgcagttctctttcgaggagtacgagaaggcacagaaccctgcatattttgaaggcaaacctgccagcttggatgaaggagccatggctggagcacgttcccatagacttgaacggggattgccttacgggggttcctgcgggggtgggatcgacgggggaggtagctccgtaaccactagtggcgaattttcaaatgacattactgaattggaagattcattctcaaagcaagtcaagagccttgccgagtcgatcgacgaggcactgaactgtcacccttcgggtcctatgagtgaagaacctgggtctgcgcagctcgagaagcgggagtccaaggagcagcaggaagattcttcagcaacttccttcagcgacctgccactgtaccttgatgatacagtgcctcaacaaagtcctgagcggctgccctcaacagaaccgccaccccaggggaggcctgagttctgggccccagctccattgccgccagtcccccctcctgtgccaagcggaactcgggaggacggcagtcgcgaggaagggactcggaggggacctgggtgtctggaatgtagggacttccgcctcagggctgcccacttgccattgctgaccatcgagccaccatccgattcctccgtcgacttgagcgatagatctgatcgagggtccgtgcacaggcagctggtttacgaggcagacggatgctccccccacggcacattaaaacacaaaggtcccccaggacgtgcaccgatcccccatcgccattatcccgctccagagggcccagctcctgctccgccagggcctctgccaccagctcctaactctggaaccggaccttccggcgttgctggaggtcgcagactggggaaatgcgaggctgctggcgagaacagtgacggcggagataacgaatccttggaatcaagttcaaactcaaatgaaaccattaactgcagcagcggctcctcgagtcgggactcactccgagagcccccagcgacaggattatgcaagcagacctatcaacgagagacccgccattcgtgggactcgcctgcctttaataacgacgtcgtacagcgtcgtcactatcggatcggcctgaatctgtttaacaagaaaccagagaaagggatacagtacctgattgaaaggggctttctgtccgacactccagtgggcgtggcccactttatcctcgaaagaaaggggctttcgaggcagatgataggcgagtttctgggtaatcgacagaaacagttcaaccgggacgtactcgactgtgtcgtcgacgagatggacttcagtagcatggatctcgatgacgccctgcgcaaatttcaatctcacattagagtgcagggcgaggcacagaaggtcgagagactcatcgaggcattctctcagagatactgcgtatgcaatcccgctctggtgcggcaatttcggaacccagacactatctttatccttgcctttgctatcattcttctgaacacagacatgtacagcccctcagtaaaggcggaaaggaagatgaaacttgacgattttatcaaaaatttgcgtggagtggataacggcgaggatattcccagagacctgctggtggggatatatcaacgtattcaggggagagagctgcgcaccaacgacgaccatgtctcgcaggtgcaggctgtcgagcgtatgattgtcggaaagaagcccgtgttgtccctgcctcataggcgcctggtctgctgttgccagttgtacgaggtgcctgatccgaatagaccacaacgcctcggcttacatcagcgcgaggtctttcttttcaacgacttactggtcgtgacaaaaattttccagaaaaaaaaaatactagtgacatacagctttcggcagtccttcccactagttgagatgcatatgcagctgtttcagaacagttactaccaatttggcattaaactcctgtccgcagtgcctggcggtgaaaggaaggtgctaatcatctttaacgcacccagtctccaggacagactgcgctttacttcagaccttagagagagtatcgccgaggtgcaagaaatggaaaagtatcgcgtcgaatcagaactcgaaaaacagaagggtatgatgcggccaaacgcaagtcagcccggtggagcgaaagactctgtcaatgggaccatggcacggagctccttggaggacacctacggtgctggggacgggctgaaaaggggtgccttatcatccagcctcagagatctttcagacgccggtaaacggggaagaagaaactctgtcgggtccctggacagcaccatagagggatcagttatcagctctccaagaccacatcagcgaatgccccctccacctcctccgcctccacccgaggagtataagtcacagcgacccgtgtcaaatagttcctcatttctgggttccctgttcggttcaaaacgagggaaggggccattccagatgccccctccccctactggccaggcgtccgcgagttcttcttccgcatctagtacccaccaccatcatcaccaccaccatcatggccactctcatgggggacttggggttctgcccgatggacagtctaagctgcaggccctgcacgctcagtactgccaaggaccgggaccagcccctccaccttatctgccaccacagcagccatccctgcccccaccccctcaacagcctcctcccctgccacagctcggctctataccacctccccctgcctccgcccctcccgtcggtcctcataggcatttccacgctcacggtccagtcccaggcccacaacattacaccttgggacggccaggtcgggctcccagacggggagctggaggccatcctcaattcgcccctcacgggaggcacccgctgcaccaacccacaagtcccctacccctgtactcccccgcaccacaacatcctcctgcccacaaacagggaccgaagcatttcatcttctcacatcaccctcagatgatgccagccgctggggcagcgggaggcccagggtcacgcccacccggaggctcatacagtcaccctcaccaccctcagagtcccttatcccctcactcccccatccctccacatccctcctaccctcccttgcctcctccctctcctcatactccacattctccactgccccctactagtccccatggtccactccacgcatccggccctcccggaactgctaacccaccatctgcaaacccaaaggctaagccctctaggattagcacagtggtgtag

SEQ ID NO: 227364 - DNA, 4467 bp, synthetic construct
  misc_feature 1..4467: note = Description of Artificial Sequence: Synthetic coding sequence
  source 1..4467: mol_type = other DNA
atggaggcaggatccgggcctccaggcggacctgggtccgagtccccaaacagagccgtcgagtatctcctggagctgaacaacatcatagaatcccagcagcagctattagagacccagcgcagaaggattgaggaactggaaggccagctggaccagctcacgcaggaaaaccgcgaccttcgcgaagaaagtcaacttcatcgcggtgaactgcacagggatcctcatggggcacgcgattcaccgggtagggaatcacaataccagaatctgcgcgaaacccagtttcaccatagggaactcagagagagtcagttccaccaggccgctcgtgacgtgggatatccaaatcgtgagggtgcctaccagaatagggaagccgtttatcgggataaagaacgcgatgcctcatatccgctgcaggataccactggatatacagcaagagagcgcgacgtggcacagtgtcacttgcatcatgagaaccccgcactcggaagggagagaggcggtcgcgaggcaggcccagcgcaccctgggagggaaaaagaggccggatacagcgcagctgtaggggtgggccctaggccaccaagggaacggggacagctctcccgcggtgcctcccgaagctcaagtcccggagctggtgggggacatagcacttctacctctactagtcccgctacgaccctgcagaggaaaagcgacggcgaaaactcccggactgtgtccgtcgaaggcgatgcccctggatccgacctgagtaccgctgttgacagcccaggcagtcagccaccttaccggctgtcacagctccctccctcatctagccacatgggaggccctcctgctggagtcggacttccatgggcccagcgtgcacgcctgcagccagccagtgttgccttgcgaaagcaggaagaagaggagatcaagcggtccaaggctctgtccgactcctacgagctcagtacggatctgcaagataagaaggtggagatgctcgaacggaagtacggagggtcttttctttcaaggcgggctgccaggaccatccagaccgcttttcgacagtatcgcatgaacaagaatttcgagcgccttcgatcttcagcatctgagagtcggatgtctcgccgtatcatcctttcaaatatgcggatgcaattctccttcgaggagtacgaaaaggctcagaaccctgcctacttcgagggcaagcccgcttctctcgacgaaggagcaatggctggggcaaggtcccaccggctggagaggggactgccctatggtggctcatgcggcggagggatcgatggcggtggttcatctgtcaccacgtccggcgagttcagcaacgacatcaccgaactggaggatagcttttccaaacaagtgaaaagtttggccgaatcaatagacgaggcactcaactgtcatccaagcggccctatgtccgaagaaccgggaagcgcccagttggagaagcgagagtcaaaagagcaacaggaggacagtagcgctactagcttcagcgacctgcccctgtatctcgatgacaccgtgccacagcagtccccagagcggcttccttccactgagcccccaccccagggaaggccagagttctgggcgccagcaccgctcccgccagtcccccctcccgtgcccagcggcactagggaggacggatcccgcgaagagggtaccaggaggggccctggctgcctcgaatgtagagattttcgtttaagagctgcacacttaccattgctcaccatcgagccaccgtctgactcttcagtggacttatctgataggtcagacagaggctccgtgcacaggcagctcgtctatgaagcagacggctgctcgcctcacgggacgctcaagcacaagggacctccgggaagggcccctattccccaccggcattatcccgcaccagagggcccagccccagccccacctggaccactgcctcccgctcccaactctgggactgggccttccggggtggctgggggtcgcaggctggggaagtgcgaggccgcaggtgagaacagcgatggtggtgataatgagtcgctcgagtcctcttctaacagcaatgagacaattaattgtagttcaggcagctcatcacgcgacagtctccgggagccccctgcgaccggcctatgcaagcagacttatcagcgcgagacccgccatagttgggatagtcctgcattcaataacgatgtggttcagcgcaggcattacaggatcggactaaatctcttcaataaaaagccagaaaaaggcattcagtacttgatcgaacggggttttctttctgatacgccagtgggcgtggcccactttattctcgaacgcaaaggcctctcccgtcagatgattggagagtttctggggaacagacagaagcagttcaatcgggacgtcctcgactgcgtggtggacgaaatggattttagttccatggatctggacgacgccttgagaaaatttcagagccacatcagggtgcaaggtgaagcccagaaagtggagagattgattgaggctttttcgcagcgttactgtgtgtgcaatcccgctttagtgaggcagtttcggaatccggacactatcttcatccttgccttcgccatcatactacttaataccgatatgtattctccttcagtaaaggcagaacgtaagatgaagctcgacgactttattaagaacctgcggggagtggataacggggaagacatcccacgggatctgctcgtcggaatttaccaaaggatccaagggagagaattgcgcactaacgatgaccatgtgtcacaggttcaggcagttgagcgcatgatcgtgggcaaaaagccggtactgagcctgccgcacaggcgcttagtgtgctgctgccagctgtacgaagtgcccgatccaaacaggccacagcggctcgggctgcaccagagggaggtcttcctgtttaatgacttgttggttgttaccaagattttccagaaaaagaagattctcgtgacctactctttccggcaaagctttccactggtggagatgcatatgcagctctttcaaaactcatactaccagttcggaattaaattgctgagcgccgtcccgggaggagagcgtaaagtccttattatatttaatgctccctcattacaggaccggctgaggtttacaagcgacctcagagagagtatcgcggaagtgcaggagatggagaagtatcgggtggaaagtgagctagagaagcagaaggggatgatgagacctaatgctagccagcctgggggagccaaggactctgtcaacgggaccatggctcggtctagcctcgaagatacctatggagctggtgacgggctcaagcggggagcactatcgagttccctgcgagacctctctgatgccggaaagcggggaagaaggaattccgtgggcagtcttgatagcaccatcgaaggatccgtcattagtagccctagaccccaccaacgcatgcccccaccccctcctcctcctccacccgaagagtacaaaagtcagcggcctgtctcaaattcctcgtctttcctaggatcgctgtttggttccaagagagggaaaggtccattccaaatgccaccaccacctaccggtcaggctagcgcctcttcaagtagcgcttcgtcaacccaccatcaccatcaccatcaccaccacgggcatagccacggtggcctcggcgtcctgccagatggccagagtaaactccaagccctgcacgcccaatactgtcaaggccctggacctgcacctcctccatacctgcctccacagcagccaagcctgccacctccacctcagcagccccctcccctgccgcagctgggaagcattccgcctccccctgccagtgcccctcctgtgggccctcaccggcactttcacgcacacggcccagtgcccggtccccagcactacactctcggaagaccaggtcgtgcccctcgacgcggagccggaggacacccccagttcgcacctcatggcaggcatcctctccaccagccaacttccccactgcctctgtacagtccggctccccaacatccccctgctcacaaacagggaccaaaacatttcatctttagtcatcacccgcaaatgatgccagctgccggagcagccggaggaccagggtctcgaccgccagggggatcttattcccatccgcatcatccccagtcacctctttctccgcacagcccaattcctccacacccatcttatccgccacttccacccccatcacctcataccccccattccccgctgccccctacgtccccccacggccctctacacgccagcggtcctcccggaacagcaaacccaccgagtgccaatcccaaggccaagccttctagaatcagtaccgtggtatag

SEQ ID NO: 227365 - DNA, 3549 bp, synthetic construct
  misc_feature 1..3549: note = Description of Artificial Sequence: Synthetic coding sequence
  source 1..3549: mol_type = other DNA
atggaatctctcttagagaatcccgtgagggccgtgctgtacctcaaggaactgactgccatcgtgcagaatcagcagagtctaattcacacgcagcgtgaacgaattgatgaactggagcgtcgacttgatgagctctccgccgaaaacaggtcactttgggagcatcaacagttgctccaggcccaaccgcctcctggacttgtgccgccatcctctgcccctcttcctgccgcaccagctaccgcaccagccgctgccgctagagcgcaggaacccttgcaagaccaaggccagcgatccgctgccgctcctcatccagcacccgataggccaccacgccaacaccatggtcaactgctcgaacagcctcagcgcggacccggaagcagggcgcacacaccacagtctccacacaagcacttagggacacaaggggctgttacggataaagaaaaggagcgcccaccttcttgctgtgcggcagccggagctcttctgcagcataaatctccgtctgcccttggcaagggcgttctcagtaggaggccggaaaacgagactgtcctgcaccaattctgctgcccggctgctgacgcctgctctgacctggcttcgcaatctgacggctcatgcacacaggctggcggaggaatggaagacagtgttgtggccgctgctgcagtcgctgccggaagaccttccgcccacgctcccaaagcccaggctcaggagcttcaggaagaggaagaacggcctggagccggtgccgcttcgcccagagcaggtccacagcacaaagcctcccctgggcgtcaacagcctgcactagcaactgcgctgtgcccacacgctcctgcagcctctgattacgagctgtccttggacctcaaaaataagcagattgagatgctggaacataaatatgggggtcacctggtctctcggagagccgcttgcaccattcagacggcattcagacagtaccagctgtccaagaatttcgaaaagatccgcaactccctgctggagagtagactccctagacgaatcagcctgcggaaggtgcgctcccccacggccgagagtctcgcggcagaaaaggcgctgatggagggctatggactggttggcttacctttagttaggtctcctagtctcccgcctacattcgcaggcaccctgactgaacttgaagatagcttcacagagcaggtccagagtttggctaaaagtattgatgacgctctgtccacatggtctttgaagacaatgtgttcactacgtgagtccggcgcatatcagctgcatcaggctctccaggcagccgctgggcctcccggactggaggccgaaggtagagccccagagtcggccggaccaggccctggagacgacgcggctgagacaccaggcctcccaccggctcatagcggcacgctgatgatggctttcagagatgtgacggtacagattgctaaccagaacatatccgtgagtagctctaccgctttgagtgtcgccaattgtttgggggctcagaccgtccaggcgcctgcagagccagccgctggaaaagccgagcagggcgaaacatcagggagggaggcgcctgaagccccagcagtcggccgagaggatgcgtctgccgaggactcatgtgctgaggcggctgcctccggcgctgccgacggtgccacagcccctaagacggaggaggaagaagaagaagaagagaccgccgaagtaggcaggggcgctgaagctgaggcgggtgatctggagcagctgagtagctcctccacaagtactaagtcagctaagtccggaagcgaagcatccgcctccgcttccaaagatgctctgcaggccatgatactcagccttcccaggtaccattgtgagaatcctgcctcctgcaaatcccctactctctctacagacacccttagaaagcggctttataggattgggttgaacttatttaatataaatccagacaaggggatacaatttctgataagccggggattcattccagatacacctatcggggttgcgcactttttacttcaacgcaaagggctgagccggcaaatgatcggcgaattccttggcaacagtaagaaacagttcaaccgtgatgttcttgattgcgtggtcgatgaaatggatttcagttccatggaactggatgaagccctaaggaaattccaggcccatattcgggtgcagggcgaagcccagaaggtcgaacgcctgattgaagctttcagtcagcggtattgtatgtgtaacccagaggtggtgcagcagttccataatccagacaccatattcatcctggccttcgcgatcatcctgctgaatacagacatgtactcccccaacattaagcctgatcgcaagatgatgctggaagactttattcggaacctccgaggagtggacgatggggcagatatcccccgagagctggtagtaggaatctatgaacgtatccagcagaaggagcttaaatcgaacgaggaccacgttacatacgttaccaaggtggaaaagagcatcgtcgggatgaaaactgtgctgagtgtgcctcaccgacgactagtctgttgctctcgtttgttcgaagtcactgacgtgaacaagctgcagaagcaagcggctcaccagcgcgaggtcttcctattcaacgatcttttagttattcttaaactgtgcccaaaaaaaaaaagttctagcacctatactttttgtaaaagtgtcgggctgctcgggatgcaatttcagttgtttgagaatgagtactattcgcatggcattaccctcgttacaccgctaagcggctcagagaagaagcaggtactccatttctgcgccttggggtcggatgaaatgcagaaatttgttgaggacctcaaggagtcgatcgctgaagtaactgaactggaacagattcgaattgaatgggaactggagaaacagcagggaactaagactttaagttttaaaccttgcggagcacaaggagatccacaaagcaagcaggggagccctaccgccaaaagagaagccgcactcagggagaggccggctgagtctacggtagaggtgtcgatacacaaccgtctacagacatcccagcacaactccggccttggggctgagaggggcgcaccggtgccccctcctgacctacagccctcgcctccaaggcagcagacgcccccactacctccccctccccctacccctccaggcaccctcgtccaatgtcagcagattgtcaaagtgatcgtgctcgataagccgtgcctcgctagaatggaacccctcttgagccaagctttgagctgctacacttcaagctcatccgactcctgtggaagcacgccgttgggcggacctgggtcacctgtaaaggtcacccaccagccacctctgccccctcctcctcctccatataatcatccacaccaattttgtccacctggaagccttcttcacgggcaccggtacagctcaggctctaggagcctggtttag

SEQ ID NO: 227366 - DNA, 2280 bp, synthetic construct
  misc_feature 1..2280: note = Description of Artificial Sequence: Synthetic coding sequence
  source 1..2280: mol_type = other DNA
atgctagagcacaaatatggcggacacctggtgagccgcagggcagcctgcaccatccagacagcattccgccagtaccaactttcgaaaaatttcgagaaaatcagaaattcattattggaaagccgactgccgagacgtattagtctacgaaaggttagatcgccaaccgccgaaagtctcgccgcagaaaaagccctgatggaagggtatggtcttgtcggcctgcctctcgtgagatcccctagcctcccccctacattcgcagggacccttacagaactggaggactcctttacagaacaagtgcagtctctggctaaaagcattgacgacgctttgtctacgtggagcctgaaaacgatgtgcagtctgcgtgagtctggcgcataccagctccaccaggccctgcaggctgctgcaggccctcctggtttagaagctgagggccgtgccccagagtctgcgggacccggtcccggagacgacgccgctgaaacgccaggattacctcccgctcactccggaacgcttatgatggcttttagagacgtgacagtacagattgccaatcagaacattagcgtgagcagcagcaccgcgttgagtgtggcgaactgtctgggcgctcagacagtccaggccccagcagagcccgcagctggcaaggctgagcagggcgaaacaagtggacgcgaagccccagaggcacccgcagtggggcgagaggacgcctccgccgaggattcgtgcgccgaggcagcagcatctggggcagccgatggcgcaaccgccccaaagaccgaggaagaggaggaggaggaagaaaccgcagaggtcggcaggggggctgaggcagaggctggcgatctcgaacaattgagcagcagtagcaccagcacaaaaagcgccaagagcggaagtgaagcttctgccagtgcatccaaggatgcattgcaggccatgatcttgtcccttcccagatatcattgcgagaacccagcctcttgtaaatcccccacccttagcaccgacaccctgcgcaagcggctgtatcggataggcctgaacctcttcaacattaaccctgacaaagggatccagtttctaatctcaagaggctttatccctgacacacccattggtgtggcgcattttctgctgcaaagaaaaggactgtcgcgccaaatgattggtgagtttttaggcaatagtaaaaagcaatttaacagggatgtgctcgactgcgttgtcgacgaaatggatttttccagcatggagctcgacgaggcactcagaaagttccaggcgcacattagggtacaaggagaggcccagaaggtcgagcggctgatagaggctttctctcagaggtattgcatgtgtaaccctgaggtggtgcagcagtttcataaccccgacaccatattcatcctcgcttttgccatcatcctgctgaacacagatatgtacagtcctaatatcaagcctgaccggaagatgatgttggaggactttattcggaatttacgaggggtggatgatggggcagacataccaagagaactggttgttggcatatacgaacgcatccaacagaaggagttgaaatcgaacgaagaccatgtcacatacgtcactaaggttgaaaagagcatcgttggcatgaaaaccgtgctgagtgtgcctcaccgacggctggtatgttgttctagacttttcgaggtgaccgacgtcaacaaacttcagaagcaggccgcacaccagagagaagtctttcttttcaacgacttactggtgattctcaagctgtgccccaagaagaaaagcagcagtacctacactttctgcaaaagcgtcggcctgctcggaatgcaatttcagttattcgaaaacgagtactatagtcatggcatcaccctagttacgccgctctccggcagcgagaaaaagcaggtcctccatttctgtgccctgggcagtgatgagatgcagaaatttgtggaagacctgaaagagtctatagcggaggtcacagaacttgagcagatccggattgagtgggagttagagaaacagcagggtactaagactttatcatttaagccgtgtggagcccagggggatccccagagtaagcagggtagtccaacagctaaacgggaagcagcactacgcgagcggcctgccgaaagcactgtggaagttctgattaacgcgtcaccagctaggcttacaattctgcctatttctcgggacacaatcaagtcatattgttag

SEQ ID NO: 227367 - DNA, 3549 bp, synthetic construct
  misc_feature 1..3549: note = Description of Artificial Sequence: Synthetic coding sequence
  source 1..3549: mol_type = other DNA
atggaaagcctgctcgagaaccccgtaagagctgtactatacctgaaagaactgactgcgattgtgcagaaccagcagagcctgatccatacccagagggagaggattgatgagctcgaacgcaggcttgatgaactatccgcagagaaccgcagcctctgggagcaccagcaactgttgcaggcccaacctccaccagggttagtgccaccatcatcagcccctctcccagctgccccagctactgcaccagccgctgccgctcgagcacaggaaccgctgcaggatcagggtcagagatcagccgctgctccacaccccgctcccgatcgaccacccaggcagcatcatgggcagctgctcgaacagccacagcggggacccggttctcgggctcacacgccacagagtccccataagcacttaggcacacagggcgctgtaaccgacaaagaaaaggagcgaccccctagttgctgtgcggcagccggtgcgctcctgcagcataaatccccgtccgcgctcgggaagggtgtcttatcgaggagacccgagaacgagacggtcttacaccagttctgctgtcctgctgcagatgcttgcagtgatctggcctcacagagtgatggaagttgtacgcaggcaggcggaggtatggaggactccgttgtggctgcggctgctgtcgcagcaggcaggccctcagcccatgctcctaaagcccaggcccaggagctgcaggaagaggaggaacgcccaggtgcgggagccgcatccccaagagcaggccctcagcataaagccagtcctgggcgtcagcaaccagccttggccacggcactgtgcccccacgctcccgcagcaagcgactacgaattgagcctcgatctgaagaataagcaaatagaaatgctggagcacaagtatgggggacacctggtttctagaagggccgcttgtactatccagaccgcatttcgacagtatcaactttctaaaaactttgagaagattcggaattcgttactggagtcccggctcccaaggcgcattagtctccggaaagtgcgttcccccacagccgagagcctcgccgctgagaaggccctgatggaggggtacggcctcgttggcttacctctcgtgcgctcaccctcattacccccaactttcgcagggacactcactgaactggaagactccttcactgaacaggtgcagtctctggctaaaagtatagatgacgcgctgtctacctggagtctgaaaaccatgtgcagcctgcgggagagcggcgcataccaactgcaccaggccctgcaggctgctgcagggcctccgggacttgaagctgaaggcagggctccggagtctgctggacctgggccaggcgacgacgcagcagagacaccaggcttaccaccagctcatagcggcaccctcatgatggccttcagggatgtcacggtgcagattgcaaaccaaaatatttccgtgtctagttcaaccgccctctcagtggccaattgcctaggggctcagacagtgcaggctcctgcagagccagcagctggcaaagctgagcagggggagaccagtgggagagaggctccagaagccccagcggtaggaagggaggacgccagtgccgaggactcatgtgcggaagctgctgccagcggcgcagccgatggcgctaccgctcctaagactgaggaggaagaagaagaagaggagacagccgaagttggtcgaggtgctgaagcagaagccggtgacttggagcagctttcatctagcagtacctctacgaagagtgccaagtctggcagtgaagcaagcgccagtgcaagcaaagatgctttgcaagccatgattctctctctgcccagatatcattgtgagaatcctgcttcctgtaaatctcccacattgtcaaccgacaccctgcgcaaacgactttacagaatcggtctgaatctcttcaacattaatcctgacaagggcattcagttcttaatttcacgcggttttatccctgataccccaatcggtgtggcacactttctgctgcaacggaagggcttgtctagacagatgattggcgagtttttgggcaactctaaaaaacaattcaatcgagacgtcctggattgtgtagtcgacgagatggattttagttccatggagctggatgaggcactgcggaaatttcaggcgcatatacgcgtgcagggagaggcgcagaaggtggaacggctcattgaagcattctctcagcggtattgtatgtgtaatcctgaggtcgtccagcagtttcataacccagacacgattttcatcctcgcctttgctatcatcctcctgaacacagatatgtacagtcctaacataaagcccgatcgtaaaatgatgcttgaggattttattaggaatttgcgcggtgtcgacgacggggctgatataccaagggaattagtggtgggaatctacgagcgcatacagcagaaggagctgaaatccaatgaagaccatgtgacgtatgttacgaaagtggaaaagtccatcgtcgggatgaaaactgttctgagtgtcccccaccggaggctcgtgtgctgcagcagactattcgaggtcactgacgtcaacaagttgcagaagcaggcggcacaccaaagagaggttttcttgttcaatgatctcctggtaattctgaagctgtgtccaaagaagaaaagctcatccacctatactttctgtaaaagtgttggtctcctgggcatgcaattccagttgttcgaaaatgaatattattctcacggcattaccttggttacccctctctccggatctgagaaaaagcaggtgctgcacttctgtgcactgggctccgatgaaatgcaaaaattcgtcgaagatctgaaggagtccatcgctgaggtcacagaactggagcagattagaattgaatgggaactcgagaagcagcaagggaccaaaactctatcattcaaaccttgcggggctcagggagacccgcagagcaagcagggaagtccaactgccaagagggaggctgctctgcgggaaagaccagccgaaagcacagtcgaagtgtctatacacaatcgcctgcagacgtcacaacataattccggactgggcgcagagcggggtgcccctgtgccaccacccgatctccaaccttccccacccaggcagcagactccccctctgccccctccaccgcctacaccgcctggcacactggtacaatgccagcagatcgtcaaagtgattgtgctcgataagccatgcctggctcgaatggagcctctcctgtcacaagcactctcctgctacaccagtagtagctcagattcttgcggctccacacccctgggaggtccaggatccccagtgaaggtcacacatcagcctccacttcctcctccgccaccaccatacaaccacccccaccaattttgcccaccaggctcgctgctgcacgggcaccgatattcgagcgggtcaagaagccttgtgtag

SEQ ID NO: 227368 - DNA, 1797 bp, synthetic construct
  misc_feature 1..1797: note = Description of Artificial Sequence: Synthetic coding sequence
  source 1..1797: mol_type = other DNA
atgaaaccaaccgggacggatcctcggatactctccatcgccgcagaagtggctaagtcaccagagcagaatgttcctgtaattctgcttaagctgaaagaaattatcaacattacacccttgggcagttctgagctgaaaaaaattaagcaggacatttactgctatgatcttattcagtactgtctgctggtgttgtcccaggattactcgcgaattcagggaggctggacaaccatttcacaactgactcagatactatctcactgctgcgtaggactcgagcccggagaggacgcggaagagttctacaatgaactgctgccttccgccgctgaaaatttcttggtcctcggtcgacagcttcaaacctgcttcatcaacgccgcaaaagcggaggagaaagatgaacttctgcacttctttcagatagtgaccgatagtctgttctggctgttagggggacatgtggagctgattcagaacgtgttgcaatcagatcatttcctgcatctgctgcaggcggataacgtccagataggttctgccgtgatgatgatgttgcaaaatatcctccagatcaacagcggcgatctgctgaggatcgggcgtaaggctctgtattccattttggatgaagtgatattcaaactcttcagcactccttccccagtgatcagatccacagccaccaagctgctgttgcttatggccgagtcccaccaggagatcctgatcctgctccgccaatcaacatgttataaaggtctccgcagacttcttagcaaacaggagaccggaaccgagttcagccaggagcttagacagttagtcgggttgctctcccccatggtgtatcaagaagtcgaggagcaaaaactgcaccaggccgcttgcttaatccaggcttactggaaggggtttcagaccaggaaacgcctaaaaaagctgccgtctgcagtgattgccttgcaacgcagttttaggagcaaacgatccaagatgctgctcgagattaaccgacaaaaggaagaagaggatctgaagctccagctgcagctccagcgccagcgtgctatgagactatcacgggagcttcagctgtctatgttagagattgtccaccctggccaggttgaaaaacactatcgagaaatggaggagaaaagcgcgctgattatccaaaaacactggaggggataccgagaacgcaaaaattttcaccagcagcgtcagtctctaattgaatataaggccgcagtgaccctccaacgggcagccctaaaatttctggcgaaatgtcgcaagaaaaaaaagcttttcgcaccctggagagggttgcaagaactaactgacgccagacgggtggagttaaagaagcgcgttgacgactacgtgagacgccatctcggttctcccatgtctgatgtagtctcccgagagttgcatgcacaagcccaggaacggttgcaacattactttatgggacgcgctctggaggagagggcccagcagcaccgggaagccctcatcgcacaaatatctaccaacgtggagcagctgatgaaagctccatcactgaaggaagctgagggcaaagagcccgaactgtttctttcacgatccaggcccgttgccgctaaagcaaagcaggcccatctcaccaccctgaagcatattcaggctccttggtggaagaaactcggtgaagaaagcggtgacgaaattgacgtgcctaaagatgagctgtccatcgagctcgagaatcttttcatcggcggaactaagcccccttag

SEQ ID NO: 227369 - DNA, 1398 bp, synthetic construct
  misc_feature 1..1398: note = Description of Artificial Sequence: Synthetic coding sequence
  source 1..1398: mol_type = other DNA
atgaaacctactggcaccgatccccgtatactgtccattgccgctgaggtagcaaagtcaccggagcaaaatgtaccggtcatcctgttgaaactgaaagaaattatcaacattactccattgggcagcagcgagcttaaaaaaatcaagcaggacatctattgttatgatctgattcagtattgcttgcttgtcctttcccaggactacagccgcattcagggcggatggacaactatctcgcaattgacccagattctctcacactgctgtgtgggactggaaccaggagaagatgctgaggaattctacaacgagctcctgcctagcgccgcagagaatttcctggtcctcggcagacagctccagacatgttttatcaatgccgctaaggccgaggaaaaagatgagctgctgcatttcttccagattgtgactgactctctattctggctccttggcggacacgtggaattaattcaaaacgtcctgcagtctgatcattttttgcacttgctgcaggcggataatgtgcagatcggctccgctgtaatgatgatgctccaaaatattttgcaaataaaccggtccaaaaggtccaagatgttgctggaaatcaacagacagaaagaagaagaggatctgaagctccaactgcagctgcaacggcagagagctatgagactttctcgcgagctccagttgagcatgctcgaaatagtgcaccccggacaggtcgagaaacactaccgtgaaatggaggagaagtccgcactaatcatacaaaagcattggcggggttaccgggagcgaaaaaacttccatcagcaaagacaatctctgattgagtataaggccgcagtgacacttcaaagagctgcactaaagtttttggcgaagtgtcggaaaaaaaaaaaactgtttgccccatggaggggtttgcaggagctcaccgatgcacgcagggtggagttgaaaaaaagagtggacgattatgtgcgccgtcacctgggcagccccatgtcagacgtcgtgtctcgcgagctgcatgcacaggcccaagaacggcttcagcactatttcatgggacgggctctcgaagaaagagctcaacaacaccgagaagctctgatagcgcagatcagtaccaatgtcgagcagctgatgaaagccccatcccttaaggaggccgagggtaaagagcccgaactgtttctgtccaggtctaggcctgtggcagccaaggccaaacaggcccacctaacaactctgaagcatatccaggcaccctggtggaagaagctgggagaggagtccggggacgagatcgacgttcctaaggatgagttgtctatcgagctggaaaatctgtttatcggaggcaccaagcccccatag

SEQ ID NO: 227370 - DNA, 264 bp, synthetic construct
  misc_feature 1..264: note = Description of Artificial Sequence: Synthetic coding sequence
  source 1..264: mol_type = other DNA
atgaaaccgaccggcacagacccccgaattctctccatagctgccgaggtggccaagtccccagagcagaatgtgccggttatcctgcttaaactcaaggagatcataaacatcacacctttagggtccagcgaactgaaaaagatcaagcaagacatttactgttacgatctcatacagtactgcttgttggtattgtctcaggactacagtaggattcaggggggatggactactattagccagctgacacagatcctgtag

SEQ ID NO: 227371 - DNA, 1332 bp, synthetic construct
  misc_feature 1..1332: note = Description of Artificial Sequence: Synthetic coding sequence
  source 1..1332: mol_type = other DNA
atggaggaagattcacttgaagacagcaatttgccaccaaaagtgtggcacagcgaaatgacagtgtccgtgacaggcgagcctccatccactgtggaagaagagggaattcccaaggagaccgatattgaaatcattccagagatccccgagacacttgaaccactgtctctaccagatgtacttcgcatatcggctgtacttgaagacactaccgaccaactgtcaatcctcaattacataatgcctgtgcagtatgaaggacggcagagcatctgcgtgaagagcagggagatgaaccttgaaggaacaaacttggataagctgccaatggctagcacaatcaccaaaattcctagtcctctgataaccgaggaaggacccaacctgccagaaattagacacaggggtcggtttgccgtcgaatttaacaaaatgcaggaccttgtattcaagaagccaactcggcagacaatcatgaccactgagaccttaaagaagatccagatcgacaggcagttcttctccgacgtcatcgctgacaccatcaaggagctgcaggattctgctacatacaacagcctgctccaggctcttagcaaagagcgcgagaataagatgcatttctacgacataatcgctagggaggagaaggggcgaaaacagatcataagcctgcagaagcagcttattaacgtgaagaaagagtggcaattcgaagtgcagagccaaaatgaatacatagcaaacctgaaggatcagctccaagaaatgaaagcaaaatcaaacctggagaacaggtatatgaaaacgaacactgagttacagatcgcacagacacagaagaaatgtaaccggacggaagagctgctcgtagaggagatcgaaaagctcagaatgaagacagaggaagaagcacggactcacaccgaaattgaaatgttcctgcggaaagagcagcagaagctggaagaaaggctagagttttggatggagaagtacgacaaagacacagagatgaaacagaacgaactgaacgccctcaaggccacaaaagcctcggacttggcgcacctgcaagatttagccaagatgatcagggagtacgagcaggtgatcattgaagacaggatcgaaaaagaaaggagcaaaaagaaagtcaagcaggatttattagaactcaagtccgtgatcaagctgcaggcttggtggcgcggtactatgatcaggagagaaatcggaggctttaaaatgcccaaagacaaggtcgatagcaaagattccaaaggcaaaggcaagggcaaagataagaggcgcggtaaaaaaaagtag

SEQ ID NO: 227372 - DNA, 165 bp, synthetic construct
  misc_feature 1..165: note = Description of Artificial Sequence: Synthetic coding sequence
  source 1..165: mol_type = other DNA
atggaagaggacagcctggaggattccaatcttccgcctaaagtgtggcacagcgaaatgaccgtttctgtgactggcgagcccccatccacggtggaggaagaggggatccccaaagagactgatatcgagattattcctgaaattccagagacacttgagtag

SEQ ID NO: 227373 - DNA, 1332 bp, synthetic construct
  misc_feature 1..1332: note = Description of Artificial Sequence: Synthetic coding sequence
  source 1..1332: mol_type = other DNA
atggaggaggacagcctcgaggacagcaacctgccacccaaagtctggcattcagaaatgacagtttctgttaccggcgagcctccaagcactgtagaagaggaggggatcccaaaggaaactgacatcgaaatcatccccgaaatccctgaaacacttgaacctctgagcctgcccgatgtactgaggatctcggctgtccttgaggacacaacagatcagctgtctatcctcaactacatcatgcctgtccagtacgaagggcgtcagtccatttgtgttaagtccagggaaatgaatttagagggcactaatcttgacaaactgcctatggcttccacgataactaagatccccagcccactgattactgaggaaggaccgaacctccctgagattagacacagggggaggtttgcagtggagtttaacaaaatgcaggatttggtattcaagaagcctacccgtcaaactatcatgactaccgagacgttgaaaaaaatacagatagacaggcagttcttctcagatgtgattgccgacacaatcaaagaacttcaggactccgccacatacaattcactgctgcaggcgttgagcaaagagcgagaaaacaagatgcacttttacgacatcatcgcaagagaggagaaaggcaggaagcaaatcatcagcctgcagaagcaattgatcaatgtgaagaaagagtggcagtttgaggtccaatcccaaaatgagtacatcgccaatctcaaggatcagctgcaggaaatgaaggcaaaatccaatttagagaaccgttacatgaagaccaacactgagctgcaaatcgctcagacccagaagaagtgtaaccgaacagaagaactcctcgttgaggagatcgaaaaattgcgtatgaaaaccgaggaggaagcaaggacccacaccgagatcgaaatgttcttgcgcaaggagcagcagaagcttgaggagcgtctggagttttggatggaaaaatatgataaagacactgagatgaagcaaaatgaactgaatgccctgaaggcgacaaaggccagtgatcttgcccatctccaggacctggcaaaaatgatcagggagtatgagcaggttattattgaggatagaattgaaaaggagagatctaagaaaaaggtcaaacaggatctgctggagttgaaatctgtgatcaagctccaggcgtggtggagaggaacaatgatcagacgcgagattggtgggttcaagatgcctaaagataaagtggatagtaaagattctaagggaaaggggaagggcaaggataagcgaagagggaaaaagaaatag

SEQ ID NO: 227374 - DNA, 4973 bp, synthetic construct
  misc_feature 1..4973: note = Description of Artificial Sequence: Synthetic coding sequence
  source 1..4973: mol_type = other DNA
atgtctgctgccgacgaagtggatggactaggtgtggcaagacctcactacggatctgtgctcgataacgagcggctgactgcagaagagatggacgaacgtcgtagacaaaatgtggcatacgaatatctgtgtcacctggaggaggccaagcggtggatggaagcctgcctaggggaagatttgccacccacgactgaactcgaggaaggcctgcgcaacggagtgtatttggcaaaactgggcaactttttttccccgaaagtcgtgtccttgaaaaaaatctacgatagagagcagactagatacaaagcgacgggactacacttcagacatactgataatgtgatccaatggttgaacgccatggacgaaatcggactgcccaagattttctaccctgagactaccgatatctacgaccggaagaacatgcccaggtgcatatattgtatccatgcactgagcctctatctgttcaagcttggcctggctccccagatccaggacctctatgggaaggtggacttcacagaagaggagataaataatatgaagaccgagcttgagaaatatggtatccagatgcctgctttttccaagattggaggtattcttgcaaatgagttgagcgtagacgaagccgctctccacgcagcggtgattgctattaacgaggctattgatcggagaatacctgccgatacattcgctgcccttaaaaacccgaatgcaatgttagttaacctcgaggagcccttggcgtctacataccaggacattctgtaccaggccaagcaggataagatgacaaacgcaaagaacaggaccgaaaatagtgagagagaacgcgatgtctatgaggagttgctgacacaggctgagattcagggcaacattaataaagtgaataccttctctgcgctcgccaatattgacctagcccttgagcagggcgacgcactcgcgctgtttcgggcactccagtcgcctgcacttggcctgagaggcctacagcagcaaaattccgattggtatctgaagcagctcctcagcgacaagcagcagaagcgccagtccggccagaccgaccccctgcaaaaggaagaactccaatccggtgtcgacgcggcaaattcagcggcacagcagtatcagagaagactcgcagccgtcgctctgatcaacgccgcaattcaaaaaggggtcgctgaaaaaactgtgttagaattgatgaaccccgaagctcagttaccacaggtttatcctttcgccgcagatctgtatcaaaaggaactggctaccttacagcgacaatcaccagaacacaatctcacgcaccctgaactttccgtggccgttgagatgctcagcagtgtggcgcttattaatcgggcattagaatcaggagatgtcaataccgtctggaagcaactatcctccagtgtgacggggctcacgaacattgaggaagagaactgccagcgttatctcgatgagctgatgaaactgaaggcccaggctcatgcagagaacaatgagttcatcacctggaacgacatccaagcctgcgtggatcacgtcaacctcgtggtgcaggaggagcacgagcgcattctggccatcggattgattaatgaagcgctggatgagggcgatgcccagaagactctacaagccctacaaatccccgcagcaaaactggagggggttctggcagaagtcgcccagcactaccaggatactttaattagggccaaacgggaaaaggcacaggaaatccaagacgagagcgcagtgctgtggctcgacgaaatccaagggggtatttggcagtctaataaagatacccaggaagcccagaaatttgccctgggaatcttcgccatcaacgaggccgtggaatccggcgacgttggaaagactttgtctgcccttagaagcccggacgttgggctgtacggcgtgataccagagtgtggcgaaacttatcatagtgatctggctgaggctaagaagaagaagctggccgttggggataataactccaagtgggttaaacactgggtcaaaggagggtattactactatcacaacctggaaacccaggaagggggatgggacgagccacccaattttgtacagaattcgatgcagttgagtagagaagagatccagtcctctatttccggggtgaccgcagcatataaccgggagcagttatggcttgcaaacgaaggacttattacaaggctgcaggccaggtgtcggggttacctcgtgagacaggaattcaggtctaggatgaactttctcaagaaacagatccccgctattacatgcattcaatcgcagtggcgcggatacaagcagaagaaggcttatcaggaccgcttggcttacctgaggtctcacaaggacgaggtggtaaaaattcagagcctcgctcgcatgcaccaggccagaaaaaggtaccgggaccgcctccaatatttccgagatcacattaacgatattatcaagatacaggccttcattagggccaacaaggctcgtgacgattacaaaactctgataaacgcagaggatccccctatggtcgttgtacgaaagttcgtgcacctgctggaccagagtgatcaggactttcaggaagagctggatcttatgaagatgcgggaggaagtgattaccctcattcgctccaatcagcaactcgaaaatgatcttaatctgatggacataaagatcggcctcttggtcaagaacaaaatcacactgcaggacgtggtttcccactccaaaaaactcaccaaaaaaaataaagaacagctgagtgatatgatgatgattaacaaacagaagggaggcctcaaggccctgtccaaagaaaaacgagaaaaactggaggcctatcaacacctgttctacctgcttcaaactaaccctacttacctcgcaaaactaatcttccagatgccacaaaacaaatcaacaaagttcatggatagcgtcatctttaccctctataactatgcctcgaaccagcgggaggagtacctgctccttcgactgtttaagacagccctgcaagaggaaattaaaagcaaggtcgaccagatccaagagatcgttaccgggaacccaacagtaatcaaaatggttgtgtcttttaatagaggggctagaggtcagaacgcattgaggcagattctagcccctgtggtgaaggagattatggatgacaagagcctgaacatcaagaccgatccagtggacatttataaatcttgggtgaaccagatggaatctcagactggcgaagcttccaagctcccttacgatgtcacaccggaacaagctctagcccatgaggaggtcaagacccggctggactcttcaatccggaatatgcgcgctgtcacggacaaattcctctccgcaatagtaagcagtgtcgacaagatcccttatggtatgcgttttattgcgaaggtcctgaaggactctctccacgaaaagtttccagacgccggtgaggatgagttactgaagattattggcaacttgctgtattaccggtacatgaatcctgcaattgtggcaccagacgctttcgatattattgatctgagcgcagggggacagttaaccaccgaccaacgccgaaatttgggcagcattgctaagatgcttcagcatgcagcctctaataaaatgttcctgggtgacaacgctcatctatctattattaatgagtacctgagccaatcttaccagaaatttcgtcgctttttccagaccgcctgtgacgtgcccgaattgcaggacaaatttaatgtggatgaatatagcgatctcgtgactctgaccaaacccgtgatttatatctctatcggcgaaatcattaatacccataccctgctgctggatcatcaggacgccattgccccagaacataacgatcccattcatgagctgctggacgatctgggtgaagttccaaccattgaatcccttatcggcgaatcctccgggaatctcaatgatcccaacaaggaagcactggctaaaacagaggtcagcttgacactgacgaataaattcgatgtgcccggagacgaaaacgcggagatggacgcccgtaccatactccttaatactaagcggctgattgtggacgtgataaggtttcaacctggagaaactctgaccgagatccttgagactcccgctacgagcgagcaggaggctgagcaccagagggctatgcagcgcagagcgatccgagatgcgaagacccctgataagatgaagaagtccaaatctgtaaaagaggactccaatctgaccctccaggaaaaaaaagagaagatccaaactggcctgaagaaacttactgaactggggaccgtggaccccaagaataaataccaggaactgattaacgatatcgcacgcgacatccgcaaccagaggaggtaccgtcagcggaggaaggctgaacttgtgaagctccagcagacatatgcagcgctaaattcaaaagcaacattttacggagaacaggtggattattataaaagctacattaaaacctgtctcgacaatctggccagcaagggaaaggtcagtaaaaagcccagggaaatgaaaggcaagaaatccaaaaagatttccttgaagtataccgccgcaaggcttcatgagaaaggggtcctgctagagattgaggatttgcaggttaatcagtttaagaacgtgattttcgagattagccccaccgaagaggtcggcgacttcgaagttaaagccaaattcatgggggtccagatggaaacgtttatgcttcattaccaggatctgctccagctgcagtatgaaggcgtcgctgtgatgaagctcttcgaccgggcaaaggttaacgtcaacctgctgatctttctgttgaacaaaaagttctatgggaaata

SEQ ID NO: 227375 - DNA, 4728 bp, synthetic construct
  misc_feature 1..4728: note = Description of Artificial Sequence: Synthetic coding sequence
  source 1..4728: mol_type = other DNA
atgccacacgaggagctcccttccctgcagcgcccaaggtatgggtctattgtcgacgacgagcgcttaagcgcagaggaaatggatgagagacgaaggcagaacatcgcctacgagtacctgtgccatctggaggaggccaaaagatggatggaagtctgcttagtagaggagctcccccctacaaccgaattggaggagggcctacggaacggcgtttatctcgcgaagttggccaaattttttgcacctaaaatggtttctgaaaagaaaatctacgatgtcgaacagacccggtacaagaagtctggccttcatttcaggcatacagacaatactgtgcagtggctgagggccatggagtccataggcctgcccaaaatcttttacccagagactactgacgtctatgaccgtaagaacatccctcggatgatttactgtatccacgcgcttagcctatacctctttaaactggggatcgcaccccaaatacaggatctgctgggaaaggtcgattttaccgaggaagaaattagcaatatgcgaaaggagttggaaaagtacgggattcagatgccctcattctcaaaaattggaggtatactggcgaatgaactttcagttgatgaagctgcgctgcacgctgcggtgatcgcaatcaacgaagccgtagagaaaggcatcgcagaacagaccgtggtgaccctacgaaacccaaacgccgtgttaacccttgtagacgataatcttgcaccagagtatcagaaagaactgtgggacgcaaagaaaaagaaggaggagaacgcgagactgaaaaacagctgtatcagtgaggaggaaagggatgcctacgaggagttgcttacccaggctgagatacagggcaacattaataaagtgaaccgccaggcggctgtcgatcacatcaatgccgtcattccggaaggggaccccgagaatacacttcttgcccttaaaaagcctgaagcccaactacccgcagtgtacccattcgccgctgcaatgtaccagaacgagttattcaacctgcagaagcagaataccatgaactacttagcacacgaggagcttttgatagcagtggagatgctgagtgctgtggctttactgaaccaggctctcgaatccaacgacctggtgtccgtccagaaccagctgcgttcccctgcaatcggtctcaataacctggacaaggcctacgtagaacgatatgccaacacccttctatcagtgaagctggaagtcctttcacagggccaggacaacctttcgtggaatgagattcaaaactgtatcgacatggtcaacgcacaaatccaggaggagaatgaccgagttgtggcagtcgggtacatcaacgaggcgatcgatgagggtaacccactgaggacactggagactttactacttcctactgctaatatttctgacgtggatcccgctcatgctcagcactaccaagacgtgctttatcatgctaagtcacagaagttaggagacagcgaatccgtatctaaggttctctggcttgacgagattcaacaggctgtggacgatgccaacgtggacaaggacagggcaaagcagtgggttacactggtggtcgatgtcaatcagtgtttagagggaaagaaatctagcgacatcttgtctgtgttaaaaagctctacctccaatgctaacgatattatccccgagtgtgcggacaaatactacgatgctttggtgaaggctaaggaactgaagtctgagagggtctcttctgacggttcatggctgaaactgaatttgcacaagaagtatgattactactataacaccgattccaaggaatcaagttgggtcactcccgagtcatgcctgtataaggaatcatggcttactggaaaagagattgaggacattattgaagaggtcaccgtgggatacatcagggagaatatctggtccgcttctgaggagcttctgttgcggtttcaggcaaccagcagcggacctatactgcgggaagaattcgaagccagaaagtcctttctgcacgaacaggaggaaaacgtcgtgaaaattcaggccttctggaagggctacaagcagaggaaggagtatatgcacaggaggcagacctttattgacaacactgatagcattgtgaagatccagtcttggtttagaatggcaacagccaggaagtcctacctttcacgactgcagtattttagagaccataacaatgaaatagttaaaattcaatcccttctccgcgcaaacaaagcacgagatgattataagaccctggtgggtagcgaaaatccccctttgacagtgatacggaaatttgtatacctgttggatcagtcagatttagatttccaagaagagctggaagtagctcgcctcagagaggaagttgtgacaaagattagagcaaaccagcaactcgagaaggatttgaatctgatggacatcaagattgggctgctggttaaaaaccgaattactctcgaggacgtgatttcacattccaaaaagcttaataagaaaaagggcggagaaatggagatcctgaataatactgataaccaaggtatcaaaagcctgtctaaagaaagaagaaagacccttgagacataccagcagctcttttatttgctgcagacaaacccactctacttggctaagttgatcttccagatgccccagaacaaatcaacgaaatttatggataccgtaatctttaccctatataactacgcctcaaaccaacgcgaggagtatctgctcctgaagctcttcaagacagctttggaagaggagattaagagtaaggtggaccaagtgcaggacatcgtcactggtaatccgaccgtcattaaaatggtcgttagtttcaaccgcggagctagaggccagaacacgttgagacagttgttagccccagtcgtaaaggaaatcatcgacgataagtctctcattatcaacaccaaccctgtggaggtgtacaaagcgtgggtgaaccagctggaaacgcaaaccggcgaagctagtaaactgccctatgacgtaaccacagagcaggcactcacttatcctgaggtcaaaaacaagctagaggctagtatcgagaatctgaggcgggtcacagacaaagtcttgaactctattatctcaagcctcgaccttctcccatacggtttgaggtatatagcgaaagtcctgaaaaattccatccacgagaaatttcccgatgccactgaagacgagctgttaaaaattgtcggtaacctcctatactatagatacatgaatcccgcaatagtggctccagacggctttgacattatcgacatgacggctggtggccaaataaattccgaccaaaggaggaatctgggatcagtcgcgaaggtgcttcaacacgccgcatctaacaagctctttgagggagagaatgaacacttatcatcaatgaacaattacctctctgagacttaccaggagtttagaaagtacttcaaggaggcctgtaacgtgcctgagcccgaagaaaaattcaacatggataaatatactgatctcgtgacagtgtctaaacctgtgatctacatcagcatcgaggaaatcatttccacccatagtctcctgctcgagcaccaggacgctatagccccagaaaagaacgacctattgtccgaactcctgggaagtctgggggaagtgcctacagttgaatcctttctcggcgaaggcgcagtagaccccaatgaccccaacaaagccaacaccctgtcgcagctgtccaagacagagatctccctcgtgcttacgtcaaaatatgatatcgaggatggtgaggccattgatagtcggagtctgatgattaagacgaagaagctgatcatcgatgttattcgcaatcagcccggaaacacattgaccgagatcttggaaaccccagccaccgcccagcaggaggtagaccacgcaactgacatggtgagtcgggcaatgattgactcaagaacgcccgaggaaatgaagcactctcagtctatgatcgaggacgctcaactacctcttgagcagaaaaagaggaaaattcaacgtaatctaagaaccctggagcagaccggccacgtgagttcagaaaataagtatcaagatatcctgaatgagattgccaaagatattaggaatcagaggatttatcggaaactccgcaaggcagaattggctaagctccagcagaccctcaatgccctgaataagaaggccgctttttatgaggaacaaatcaactattacgacacttacatcaaaacctgcctcgacaatctcaagagaaagaacacgagaagatccataaagcttgacgggaaaggcgaaccgaagggcgcaaagcgagccaagccagtgaagtacactgccgctaaactgcatgagaagggcgtgctgctagatattgatgacctccagaccaaccagtttaaaaacgtgacattcgacataatcgccaccgaggatgtgggcatttttgatgtccgatctaaattcttgggggtggagatggagaaggttcagctaaacattcaggaccttctgcagatgcagtatgaaggggttgctgtgatgaagatgtttgataaagttaaggtaaacgttaatctccttatttatctgctcaacaagaagttttatggtaaatag

SEQ ID NO: 227376 - DNA, 3234 bp, synthetic construct
  misc_feature 1..3234: note = Description of Artificial Sequence: Synthetic coding sequence
  source 1..3234: mol_type = other DNA
atggtcaatgcgcaaatccaggaggagaacgacagggttgtggctgtcggctacatcaatgaagccatcgacgagggaaaccccctcaggacactggaaactttacttctgcccaccgctaacatctccgacgtggacccagctcacgctcagcactatcaagacgtgctttaccacgccaaatcacagaaactcggggattccgagagtgtgagcaaggtgctgtggctggacgagatccaacaggcagtcgacgacgctaacgtggacaaagaccgagctaagcagtgggtcaccctcgtggttgatgtcaaccaatgcctcgagggtaaaaaatccagtgacatcctgagcgtcctgaaatctagtactagcaacgcaaatgatatcatcccagaatgcgctgacaaatattacgatgcgttggtgaaggcaaaagagctaaagtccgagagggtctctagcgacgggtcttggttaaagttgaatctgcacaagaagtatgactactactataacacggattcaaaggagtcaagctgggttacccccgagtcatgtctctacaaggagtcttggctgacagggaaagaaattgaagccttttggaaagggtacaagcagcggaaggagtacatgcacagacggcaaacgtttattgacaataccgacagtattgtgaagattcagtcatggtttcggatggccaccgctcgcaaaagttacctctcacgcttgcagtatttccgggaccacaacaatgagattgtgaagatccaatctctgctaagagctaataaagctagggatgactacaaaaccctggtcggctccgagaatccgcctctgacagtaatcagaaagttcgtctacctactcgaccagtcagatctggattttcaggaggagcttgaagttgctagattacgggaggaggtggttactaagattcgagcaaaccaacagcttgagaaggatctgaacttaatggacatcaagatcgggctgctggtgaaaaaccgcataactttggaggacgtgattagtcactcaaaaaagctaaacaaaaaaaagggcggagaaatggagattctcaacaatacggataaccagggcatcaagtcactgagtaaggagcgtcggaaaaccctggaaacataccagcagctgttctatctgctccagaccaatccactgtacctggccaaactgatctttcagatgccccagaataaatctaccaagttcatggacaccgtgatctttacactgtacaactatgcttctaatcagagggaggagtacctactactgaagctgtttaagacagcacttgaagaggagatcaaatccaaagtcgatcaggttcaggacatcgtcaccgggaacccaaccgtgataaagatggtggtgtcattcaataggggggctcgaggccagaatacactgcgacagctcctcgccccagttgtgaaggagatcatcgacgataaaagtctcattatcaataccaatcctgttgaggtctacaaggcatgggtgaaccaacttgagacacagactggcgaagccagtaaattaccatatgacgtgacgaccgagcaggcgcttacctatccagaggtgaagaataaactggaggcatccatcgagaacctaaggagggtaaccgacaaagtgctaaatagcatcatctcaagtctggatctgcttccctacggactgagatatattgccaaggtgctgaagaactccattcacgagaaattcccagatgcgactgaggacgaactcctgaagatcgtgggaaacctgctgtactatagatatatgaaccccgcaatcgttgcgccagatggatttgacattattgacatgactgccggtggccagataaatagcgatcagcggagaaatcttggtagtgtggcgaaagtgcttcaacatgcagcatccaacaagctgtttgagggtgagaatgagcacctcagctctatgaacaattacctgtctgagacctaccaggagtttagaaagtatttcaaggaagcctgcaatgtaccagagccggaggagaagtttaatatggacaaatataccgaccttgtgacggttagtaagcccgtgatttatatctcaatcgaggaaatcatcagtactcacagcctgttgctggaacaccaggatgccattgcccctgagaaaaacgacctcttatctgagcttctcggttcccttggcgaggtgcctaccgtagagagctttctgggcgagggggctgtcgacccaaacgaccctaacaaagccaataccttgtctcaattatctaaaacagagatctccctggtgcttacttcgaaatatgacatcgaggacggcgaggcgattgattccaggtctctcatgatcaagacgaaaaaactaattatcgatgtaattcggaatcagcccggaaacacgctgacagagatcctggaaactcctgccacggctcaacaggaagttgatcatgccactgatatggtgagtcgcgctatgattgactcccgcactccggaggagatgaagcatagccagagcatgatcgaggacgcacagttgccactggagcagaagaaaagaaaaattcaaagaaacctgcgcactctcgagcagacggggcatgtctctagcgaaaataagtatcaagacatcctgaacgagatcgcaaaagacatccgtaaccaacggatttatcggaaattgcggaaggcagaactggcgaagctccagcaaaccttgaacgccttgaacaaaaaggctgccttttacgaagagcagattaactactatgatacctatataaagacctgcctcgacaatctgaaacgaaagaacacaagaagaagcatcaaattagatggcaagggcgaacccaaaggagccaagcgggcaaagccagtcaaatacactgcagccaagttacacgagaagggcgtccttctggatattgacgacttgcagaccaaccagttcaagaatgtgaccttcgacataattgccacagaggacgtgggtatcttcgacgtgcgcagcaagtttctcggtgtagagatggaaaaagtgcagctcaatattcaggatcttttacagatgcagtacgagggagtggccgtaatgaaaatgttcgacaaagtcaaagtgaacgtgaaccttctcatctacctactgaataagaagttctatggcaagtag

SEQ ID NO: 227377 - DNA, 3216 bp, synthetic construct
  misc_feature 1..3216: note = Description of Artificial Sequence: Synthetic coding sequence
  source 1..3216: mol_type = other DNA
atgcactcacttcctggcgtcgtggctgtgggatacattaatgaggccatcgacgaaggaaaccctttacgtacacttgaaacactgctgttgccaaccgcgaacattagtgacgtggatccagctcacgcccagcactaccaggacgtgctatatcacgctaagagccagaagcttggagactctgaatctgtttctaaggtgctttggctggacgaaattcagcaggccgtcgatgacgctaatgtggacaaagaccgtgcaaagcagtgggtgaccctcgtggtcgatgttaaccaatgtcttgagggaaaaaaatcctcagatatcctgtccgtcctgaagtcttcaaccagcaatgccaacgacataattccagagtgtgccgacaaatattacgacgctctggtgaaggccaaagagctgaaatcagaaagagtaagctcagacggtagctggctcaagctcaatctgcataaaaaatatgattactattataacacagatagcaaggagtccagttgggttaccccagaatcctgcctgtataaggagtcatggctaaccgggaaagagatcgaggccttttggaagggctataagcagcggaaagaatacatgcataggaggcaaacgttcatagacaacacagactctattgtcaagattcagtcatggtttcggatggccactgcaagaaagtcctacctgtctaggctgcagtacttcagagatcataacaatgaaatcgtgaaaatccagtctcttttgagggccaacaaggcacgggacgactacaaaacactggtgggcagcgagaaccctcctctgacagttattcgcaagttcgtctacctcctagaccagtcagacctcgactttcaagaagagctagaagtggccagactgagagaggaagtagtcaccaaaattcgggctaaccagcaactggagaaagaccttaatctaatggatattaaaattgggctgctcgtgaaaaaccgcattaccctggaggacgttatttcccacagcaaaaaactgaataagaaaaagggaggtgagatggaaattctcaacaacacagataaccagggaataaagtccctctctaaggaacgacggaagaccctagagacataccagcagttgttctatttgctgcaaaccaatcccctgtacttggccaagcttatttttcagatgccccagaataagtccactaagtttatggacaccgtcatcttcacgctatataactacgcctctaaccagcgcgaggaatacttgttgctaaaattattcaagactgccctcgaagaggaaataaaatccaaggtggaccaggtgcaagacattgtaactggtaaccccacggtgataaaaatggttgtgagctttaataggggcgctaggggtcagaatacactccggcagcttctcgcacctgtggtgaaagaaattattgatgacaaatcccttattattaacactaatccagtcgaggtgtataaggcctgggtaaaccagctggaaacccaaactggcgaagcctccaaactcccgtatgatgtgaccactgagcaagcactgacatatccggaggtcaagaataaacttgaagcctctatcgagaatctgcggagagtgacagacaaggtccttaatagcattatctccagcttagatctgttgccctacggtttgaggtacatcgctaaagttttgaagaatagcatccacgagaaattcccagacgctacggaggacgagctgctgaaaatcgttgggaacctactttattatcgatacatgaaccctgcaatcgtcgcacccgacgggtttgatatcattgacatgaccgcgggtggccagatcaattccgatcaacggaggaacctgggaagcgtcgctaaagtgcttcagcacgcagcttcaaataaactcttcgagggggagaacgaacacctgtcctccatgaataactatcttagtgaaacttaccaggaatttcgaaagtatttcaaagaggcttgcaacgtgcccgagccagaagagaagttcaacatggacaaatacaccgacttagtcaccgtgagcaaacccgttatctatatcagtatcgaggagatcatatcgactcatagcttgctcctggaacaccaggatgctattgcacccgaaaaaaacgacctgttgtctgagctgctcggatccctcggcgaggtaccaaccgtcgaatcatttcttggagaaggagctgttgacccaaatgaccctaacaaagccaacacgctgagtcagctaagcaagaccgagattagtctggtccttaccagcaagtacgacattgaagatggagaggcaatcgattcgcggtccttgatgatcaaaaccaaaaaactgattattgacgtcatacgcaatcagccaggcaacaccctcacagaaatcctggaaaccccagccacggctcagcaagaagtcgaccacgcgacggacatggtgtccagagcaatgatcgactccaggactcctgaagagatgaagcattcccagtcaatgattgaggacgcccagttgccgctagagcagaaaaaacgcaaaatacagcgcaacctgaggaccctggagcaaacaggtcacgtgtcatccgagaacaaataccaggacatattaaacgagatagcaaaagacatccgcaatcagcgtatctatcgtaaactcaggaaagccgaactcgccaaactccaacagaccttgaatgccctcaataaaaaagctgctttctatgaggagcagatcaactattatgatacctatattaagacctgcctcgacaacttaaagcggaaaaataccaggaggtccatcaaactggatggaaaaggtgaaccaaaaggagctaaacgcgcaaagcccgtcaaatatacagcagctaagctccacgagaagggggtgctactcgatatcgatgatctgcaaacgaaccagttcaaaaacgtcaccttcgatatcattgctaccgaagacgtgggtatcttcgacgtgagaagtaagttcctcggagtggagatggaaaaggtacagctgaatatccaggacctccttcagatgcagtacgagggggtggccgtcatgaagatgttcgataaggttaaagtcaatgttaaccttctgatttacctgctcaacaaaaagttctatggaaaatag

SEQ ID NO: 227378 - DNA, 1134 bp, synthetic construct
  misc_feature 1..1134: note = Description of Artificial Sequence: Synthetic coding sequence
  source 1..1134: mol_type = other DNA
atgggctgttttaagggtgtagtcgcagtcggctacattaacgaggccatagacgaaggcaatcccctgcggactttagaaaccctcctgctaccaaccgcaaatatatccgacgttgatccagcccatgcacagcattaccaggatgtcctctatcatgcgaagagtcagaagttgggggactccgagagcgtgagcaaggttctgtggctcgacgaaattcagcaagccgttgacgatgccaacgtagataaggaccgcgctaaacagtgggtcactttagttgtcgacgttaaccagtgtttggaagggaaaaaaagctcagatatcctgtccgtgctcaagagttccacctctaacgctaacgacatcattccggagtgcgctgataaatattatgatgcactggtaaaggcaaaggagctgaaatccgagcgtgtctccagtgacgggtcatggctgaaattaaacttacacaagaagtatgactactattataatacagattcaaaagagtcctcatgggtgacaccggaatcctgcctttataaggagagctggctcactggcaaggaaatcgaagacatcattgaggaggtgacagtgggctacattcgtgagaacatctggtccgcctccgaggaactgctgctgcgatttcaggctacctctagcggaccaatccttcgagaggagttcgaagcccgtaagtccttcttacatgaacaggaagaaaatgttgtcaaaatccaagcattctggaaggggtacaaacagcgcaaggagtatatgcacagaaggcaaaccttcatcgacaatactgacagcatagtgaaaatccaatcgtggtttcgaatggcgactgcgcgtaagtcctacctaagcaggttgcagtacttccgggatcacaataatgagattgttaaaatacagagcctcctgagagcaaacaaggccagagatgattataagaccctcgttgggtcggagaaccctcctctcactgtcattcgcaagttcgtgtatctgctagaccaatcagatctagactttcaagaggagttagaggttgctcgtcttcgtgaagaggtggtgacaaagatacgggctaaccagcagctagagaagacttag

SEQ ID NO: 227379 - DNA, 3084 bp, synthetic construct
  misc_feature 1..3084: note = Description of Artificial Sequence: Synthetic coding sequence
  source 1..3084: mol_type = other DNA
atggcgcaaaacaccgagaaccacgacccagtgggcagcatattgattcagatccatgaagacctttatcagttaaaagagaaacttactaaattttctcctgaagagaagggagagaccctggacatccaatctttggagactgccattaagagaacagaggtcgggctgcgtatccatatcgaaaagtatctgaacgtcgttaatcagaacgtgcttaccaccagcgtgaacgatgaaagtctgtatacacctcaagcctcgaagtggctgcttcctacagtcatcgaccaaaaatcttttatttttcctcaagaatcggaaggaactttctggcagccacaacgacagcatagttcatcccttccagtgtttccaagggccaagattaaagtgagtaaactcatcaaaggaagtaacatttcatccctgactgtcttacctagctctcactgtactgacccttacttcacaccaattccagtgttgcaggctgatgcgcataaaggcattctctccatgattgagagggggttgataccgccaactgcccgtatcacattccagaacccacctatcacgccgcgagctgctcccttacatagttttgacgaggctcgaaagatccccaccgtggccaccttcaccatccccagggagcctcccccttcgccagcggaggtcaaattcttccctaagaagcagcgttccaagggaaagagcaggcggagccgaggtcatcatgacagaaaggccatgaaggttaaaaccccgctcagggccctcaagtctctgtgggattacgacttccttatttatgacggcgtgattgataatactgccccagacttcctagctttcaaggaacacttttccctcgcctggggtggaatcttctccctgcttgaacacgtcgaaaagttcctacgcaactacgccattcccgaggtaaagattaagggaaataatctcgttgcgctcttaccagaatttgagcttacaaacaaattaacacgctatgaccttctgtctgtgctggaagatcccgctcatgtccagatgcttataaaccttccagggcagcgctacaagggacaagacggaaacagtgaggctgcaatgaagattcaggccacttggaagtgctacaaagctagaaagttttttttattttatcggcaacagaagtgggccagcggagtcattgcaattgcctggctgttgtattgtcacaagacacgcctcaagaaaatcctcaaggagagccggcagaggcatttagagaattttcgaatcagagctaagcacctggcagctaattggaatcgcattcgtacgtctagacgcacgattattcacataccatctcttggatattcacagcccgtgcgtgaacatatagccgatttcaacacccagcagaatatgcagctgggcagactttgtgatatccttgacgccaatgtgaatgtgatctacatctgtagtcaccacatgaatgacgaattagtgctctactataaaaagatactctcgctgcacgctgctgtgaaaagcggcaatctcgaggataggtcagatctccaagatcggtttaaaattatcactcccgaggctgtgaatatctttccgaagcatcatatgtgcctcgccacccacctgatgtacagccccaaggctattaaacggatcaagaatcttattagaggcaccgaagcatacatcgtgtccggtctactccatcgcgatgatttggccgtggccgatatgctggatattcccatccttgggtccgaacctgagctggcacatctgtattctacaaaatcaggcggaaagcgtgtctttgattccgccaatgtggcggtccctcctgggatctacgatatctacagtcaacaacaaatgattgagcaactgagccagctgattaccgatcatctccagatacagcggtggctgtttaagatggattcagagtttcgcggtaatggcacggcgttctgtgacattcccagctatctgaagtgctacaagtgggtactcaaggagagctccagatacggccttgaggactggaggaagaaatgggcccaggagcccgctcttgttaagatctctgaggaactggctggtatacttgcccagcatgcccagcccgtaaatgaaaagcgtttccccacctggagaaagttcctccaaacattcctgtctcagggcggtgtcatcgaagccttcccgccagcggataatgtgaccaaccttaccgtggacatgctaatagagcccaatggcaaaataagcgtcctgagtacaggcgatcagttgcatgcggagagtccatttattagcagcgggacaacggtcccccaaacttcagtggatcctcaagtcctgacttatttatgcctacaaatcgggaaggcctgccggatgagggacgtcgttgggtacttttccatcgatctagtcacatttatcgaccccagcacactggaacagcaggtttgggctacaggactgaacttagcgtattcagaccagctcgcactcacccaactgactctgtacttgaccaacggccatctggattgttccttgagcacactggaggtcccccgatttgtgccgaaagagagaaaaaagactaaatgcatgagtgccctgagtatgcctatgttggcaaccagccggtatgccgtgatgacaacccagcttcgccacagcaatctctcgctcgtttttcattatgtttttcttcaaatatgccgcgctcacggtatcggctatgatgtggaggaacgccagggaacagtatttatcttgtacgaacacttgaaacgtcataagctggggatgctgacgatcggcgaggatttacagggagtgctgatgactttcgctcggcatcttttcatcatccatcaggagatctctgctcctaatatgcagggtgaaacaaacttcaaaactactattgccgacatcgaaactatcttgcgggtgactaaagaaaataagatgagatttgaagaggaacagcagtccaaagacgacaaaaacttgtctaaacccaagaaatag

SEQ ID NO: 227380 - DNA, 2091 bp, synthetic construct
  misc_feature 1..2091: note = Description of Artificial Sequence: Synthetic coding sequence
  source 1..2091: mol_type = other DNA
atgatagagcgcggactgattcccccaacggcaaggattacgttccagaaccctcccataacaccaagagcagctcctttacacagcttcgatgaagcacggaagattccgacggtggccacattcaccattccacgggaaccacccccatcgccagctgaagtgaaatttttcccaaaaaagcagcgcagcaagggaaaaagtcgcagatcccgcggacatcacgatcggaaggcaatgaaggtgaagacccccctgcgggcattaaaatcactgtgggactacgatttcctcatctatgacggggtgatcgataacacagctccagatttcctcgcctttaaggagcacttctccttggcttggggtggaattttttctctactggagcatgtggaaaaattccttagaaactacgccatacctgaagtaaagatcaaaggcaataacctggtagctctcctgcctgagtttgaactgaccaataaactcacgcgctacgacttactctctgttcttgaggacccagcccacgtacagatgttgataaatctgccaggccagagatacaaggggcaagacggcaatagcgaagctgccatgaaaattcaggcgacctggaaatgctacaaggcccgtaagttcttccttttttacagacagcaaaaatgggcttctggggtgattgcaatcgcgtggcttctatattgccacaagacgcgccttaagaagattctgaaagagtcgagacagagacatctggagaatttccgcatccgcgcaaagcacctggcagccaactggaacagaatccgcaccagtaggagaaccataattcacatcccaagcttaggctacagccagccagtgagagagcatatcgcagacttcaacacgcagcagaacatgcaacttggcagattgtgcgatatactcgacgctaacgtgaatgtcatttacatctgctctcaccacatgaacgacgagcttgtgttgtattacaagaaaattctttccctgcacgccgcagtgaagtccggaaacctggaggacaggtccgatttgcaggacaggttcaagatcattacccccgaggccgtcaatattttcccaatgattgaacagctcagccaactcatcaccgaccacttgcagattcagaggtggctgttcaagatggactccgaattccggggtaacggcacagcattctgtgacatcccctcctatttgaagtgttataagtgggtattaaaggaatctagcagatacggactcgaagattggcgcaaaaagtgggctcaggagccggcactcgtcaaaatcagcgaagagttagctggcattctcgctcagcacgctcagccagtaaatgagaaacgcttccctacctggcgtaaatttcttcagacctttctgagccagggaggggtgattgaagcatttcccccagctgataacgttactaatcttacagtggacatgcttatcgagccaaatggcaaaatcagcgtactgtccacaggtgaccagctccatgccgagtcaccattcatctcttcaggcaccaccgtacctcagacatctgtggacccccaggtgttaacgtacctgtgcttacagatagggaaagcctgccgaatgcgggatgtggtcggctacttctccattgatttggttacctttatcgatccctccaccctggagcagcaggtctgggccaccggccttaatctcgcttacagtgatcagctggcgttaacccagctgactctgtatcttaccaatgggcaccttgattgctctctttccacacttgaagtgccgagatttgtccctaaggaaaggaaaaaaaccaaatgtatgagcgccctttccatgcctatgctggccaccagccgctacgccgtcatgactactcaactacggcacagcaacctgtcactcgtgttccactacgtgtttctgcagatctgccgagcccatggcattgggtacgatgttgagaataaccgcaggggctcgcccggagggccacacgatctttgctcacccagcctgcatcatccatcccggaacattagtacctag

SEQ ID NO: 227381 - DNA, 1866 bp, synthetic construct
  misc_feature 1..1866: note = Description of Artificial Sequence: Synthetic coding sequence
  source 1..1866: mol_type = other DNA
atgaccaaagcaatgaaagtaaagacccccctaagggcactcaagtcgctgtgggattacgatttcctcatatatgatggggtcattgacaatacagcccctgattttctggccttcaaggagcatttttctcttgcctgggggggaattttctccttactggaacatgtggaaaagttcctacggaactacgctatccccgaagtaaaaattaaggggaacaacctggtggcattgttacctgaatttgaactgacaaacaagctgaccagatacgacctcctgagcgtcctggaggatcctgcccatgtacaaatgctcatcaatctgcccggtcagcgctacaaggggcaggacggcaattccgaggctgcaatgaagatccaggccacttggaaatgttacaaagcccgtaagttttttcttttttataggcagcagaagtgggcctccggagtgattgcgatagcatggctactctattgtcacaaaaccagattaaagaaaattctaaaggaatcacggcagcggcatctcgagaatttccgcattcgagcgaaacacttggcagctaattggaatcgaatccgaaccagccgacgcactattattcacataccatcgttgggatattcccagcccgtgcgggaacatattgcagacttcaatacccaacagaacatgcaactcggccgattgtgcgacatccttgacgctaacgtaaacgtcatatacatttgctctcaccatatgaatgatgagttggtgctctactacaagaagattttatctttacatgcggctgtcaagtccgggaacctcgaagaccggagcgacttacaagatcgcttcaaaatcattacgcccgaggctgtaaacatcttcccgatgatagaacagctctcacagctgattacagatcacctccagattcagagatggttgttcaaaatggactcggagtttcgcggaaacggaaccgccttttgcgacataccgagttacctcaagtgctacaagtgggttctgaaagaatcatcccgatatggactggaggattggaggaagaagtgggcacaggagcctgccctggtgaaaattagcgaggaactggcgggaattctggctcagcacgctcagccggttaacgaaaagcggttccccacctggcgaaagttcttgcagaccttcctctcgcaggggggtgttattgaggcctttcctcccgcagataacgtgacaaacttaaccgtagatatgctcattgagcccaatggcaaaattagtgtcctgtctactggcgatcaactacacgctgaatctcccttcatttccagcggaactactgttcctcagacgtcggttgacccacaggtgttaacctatctatgcctccaaataggcaaagcatgtcgcatgagggacgtggtcggttatttctctatcgatctggtaacctttatagacccgtcaaccctcgagcagcaggtttgggccaccggtttgaatctggcgtacagcgaccagctggccctgacacagttaacactatatctaacaaacggacacctcgattgttccttatctaccctagaggtgcccaggtttgttccgaaggaacggaagaagacaaaatgcatgtccgcactgagtatgccgatgttagcaaccagcaggtacgccgtgatgaccactcagctccgacattcaaaccttagcctggtgtttcactatgttttcctgcagatttgtcgcgctcacggcatcgggtacgatgtcgagaacaacaggcgcggttcgccagggggacctcacgacctctgttccccctctctccatcacccttcccggaatatctctacgtag

SEQ ID NO: 227382 - DNA, 2055 bp, synthetic construct
  misc_feature 1..2055: note = Description of Artificial Sequence: Synthetic coding sequence
  source 1..2055: mol_type = other DNA
atgaaggtgaaaacaccactgcgggctttgaaatccttatgggactatgatttcttaatctatgacggcgttattgacaacaccgctcccgactttcttgcctttaaagaacacttttctctagcctggggcggaattttcagcctgctggagcatgtggagaagtttctgagaaattatgcaatccccgaagtgaaaatcaagggcaacaacctagtggccctactacctgagttcgaactcacaaacaaactcactcggtatgacctgctctccgtgctggaggatcctgctcatgttcaaatgctgatcaatctgccaggacagcggtataagggacaggacgggaattcagaggctgccatgaaaatccaggcaacctggaaatgctataaggcacgcaagttctttctattttaccggcagcagaaatgggcgagcggagttatagctatcgcatggctgctctattgccataagacgagactaaaaaagatcctcaaagaaagcagacagagacacctggaaaatttcagaatcagggctaaacaccttgccgctaactggaacagaatccggacgagcaggaggactattattcatatcccctcgctgggatatagccagcctgttcgtgagcacattgctgattttaatactcagcaaaacatgcaattgggcaggttgtgcgacattctcgacgccaacgtgaatgtgatttacatttgtagccaccacatgaatgatgagctggtgctttactataagaaaatactttcactccatgctgcggtgaaatcaggaaatttggaggatagaagtgatctccaggacagatttaaaatcatcacccctgaggcagtcaatatattcccgatgattgagcagctttcccaactgattaccgaccacctgcagatccaacgttggctgttcaagatggacagcgagtttcggggaaacggtacagccttttgcgatatccctagttacctcaagtgttacaagtgggtactgaaggagtcttcaaggtatggccttgaagattggcgtaaaaaatgggctcaggaacccgcactagtgaagatttcagaagagttggcgggtattctggcccagcacgcgcagcccgttaacgagaaacggttcccgacctggagaaaattcctccagactttcctcagccagggcggagttatcgaagcttttccaccagctgacaatgttacgaacttgaccgtggatatgctcatcgagcccaatgggaagatctccgtgctttctacgggagatcagctgcacgccgagtccccatttataagctctggcacgacggtgccacagacttcagtggatcctcaggtcctaacttacctgtgtttacaaattggcaaggcctgtcgcatgagagatgtggttggctacttctccattgacctggttacatttatcgatccttccaccctcgagcagcaggtttgggcaactggcctgaaccttgcctacagtgaccagttagccctgactcaactgacgttatatcttaccaacggccacttagactgctccctcagcacactcgaggtcccaagattcgttcccaaggagagaaagaagaccaagtgtatgagtgcactctctatgcccatgctggccacttctcggtatgcagtgatgacaacccagttgagacactccaatctatccctggttttccactacgtgttcctccagatatgcagggcccatggaataggttatgacgtggaagaacggcagggtaccgtgttcatcctctacgagcacctaaaaaggcacaagctgggtatgctgactatcggcgaagatctccaaggggtgcttatgacttttgccagacatctgttcattattcatcaggagatcagtgccccaaacatgcagggggaaacaaactttaagactaccattgccgacatcgaaacaattttgagggtcaccaaggagaataagatgcggtttgaggaggaacaacaaagcaaagatgacaaaaatctgagcaaacctaagaagtag

SEQ ID NO: 227383 - DNA, 507 bp, synthetic construct
  misc_feature 1..507: note = Description of Artificial Sequence: Synthetic coding sequence
  source 1..507: mol_type = other DNA
atggctcagaacaccgagaaccatgatccagtgggatccatcctaatccagattcacgaggacctttatcaactgaaggagaagctgacaaaattttcccccgaggagaaaggtgagactctggatatccaatccctcgaaacagcgattaaaagaaccgaagttgggttgaggattcatatcgagaaatatcttaacgtcgttaatcagaacgtgctgacaactagcgtcaatgatgaaagtctgtatacaccacaggcctctaaatggctgttaccaaccgttatagatcagaagagcttcatcttcccacaggagtcagaagggacgttctggcagcctcaacggcaacactcttcttctctgcctgttttccctcgtgctaagcggaagatcggcctaaacgtgaagattctgcaggaccccgagaatattcatcacagagccgctgttaatgcaaattatggaatatccctcccatatattaatcagaggaaggcatgctag

SEQ ID NO: 227384 - DNA, 339 bp, synthetic construct
  misc_feature 1..339: note = Description of Artificial Sequence: Synthetic coding sequence
  source 1..339: mol_type = other DNA
atgcgcctggaggagttaaaaaggctgcaaaatcccttagagcaggtaaatgacggtaagtactcttttgaaaatcaccagctggcgatggatgctgagaacaatatagaaaagtatcctctcaacctgcagccattggagtccaaagtgaaaataatacaacgggcttggcgggagtatctccaaagacaggaaccgctgggaaaaagaagtccaagccccccaagcgtttcctcagagaaacttagctctagtgtgagcatgaatacgttttcggacagcagcacccccgtgagtgtcatgttcctattcctgtgtcccgacctcacttttaattag

SEQ ID NO: 227385 - DNA, 480 bp, synthetic construct
  misc_feature 1..480: note = Description of Artificial Sequence: Synthetic coding sequence
  source 1..480: mol_type = other DNA
atgcggctggaggagcttaaacggttgcagaatccgttggagcaagtaaacgatggaaagtactcatttgagaaccaccaactggcaatggacgctgaaaacaatatagagaagtaccccctgaacctgcagccccttgaaagcaaggtgaagatcattcagagggcctggcgggagtatttgcaaagacaggagccgttaggtaagcggtctccatctccacctagcgtcagctcggaaaagctgagcagttccgttagtatgaatactttttccgattccagtaccccattcgctcgtgcacccgtggggaagatccatccctatatttcgtggcgtctgcagtccccaggagacaaactcccgggaggccgaaaagtgatattgctatacctcgaccaactcgcacgacccaccggattcattcacaccctgaaggagccccagattgagaggctggggtttctgacactgcagtag

SEQ ID NO: 227386 - DNA, 399 bp, synthetic construct
  misc_feature 1..399: note = Description of Artificial Sequence: Synthetic coding sequence
  source 1..399: mol_type = other DNA
atgaggctagaggagctgaaaagactgcagaatcccctggagcaagttaatgacggtaagtacagcttcgaaaatatccagagggcctggcgcgagtaccttcaaagacaagagccgctgggtaaacggagtccttcaccaccatccgttagcagtgaaaagttgtcctcctccgtaagcatgaatacgtttagcgatagctcaaccccctttgcaagggctcccgtggggaaaatacatccctacatttcatggagattgcagtcacctggcgacaaactgcccggaggccgaaaggtgatcttgctttacctggaccagctggcacggcctaccggcttcatccataccctgaaggaaccccagatcgagcgcctgggcttcttgaccttgcagtag

SEQ ID NO: 227387 - DNA, 2892 bp, synthetic construct
  misc_feature 1..2892: note = Description of Artificial Sequence: Synthetic coding sequence
  source 1..2892: mol_type = other DNA
atggacgctccaaaagctggatatgcattcgagtatctgatcgagaccctaaacgacagcagccacaagaaatttttcgacgtctctaaactaggaaccaagtatgacgttcttccttacagcattagagttctgctcgaggcggctgtgcgtaattgcgacggtttcctgatgaagaaggaggacgtgatgaacattctagactggaaaacgaaacagtccaacgtcgaggttccctttttccccgcacgagttctcctgcaagattttacagggatccctgctatggtggattttgccgcaatgagagaagccgtcaaaaccctgggcggtgacccagaaaaggtccaccccgcatgcccaacagacctgacagtggaccactccctgcagatcgatttttccaagtgcgcgatccaaaacgcaccaaacccgggtggcggagatctgcagaaagcaggaaagttgtctccagtcaaagtgcagccaaagaagctaccttgtagaggtcagactacatgtcggggaagttgtgactctggagaactgggcaggaacagtggcacattttcttctcagatcgagaacacaccgatcctgtgtcctttccatctccagcccgttccagaacccgaaaccgtgcttaaaaatcaggaggtagaattcgggcgaaatagagagcgcttacagtttttcaaatggagcagccgtgtctttaaaaacgtcgccgtcatccctcctgggactggtatggctcaccaaataaatctcgagtaccttagcagagtggtgttcgaagagaaagatttattgttcccagactcggtcgtcggcacagatagtcacattaccatggttaacggactgggaattctgggatggggagtgggagggatcgagaccgaagccgtgatgcttggtctgcctgtcagcctgaccttacccgaagttgttgggtgcgaactcaccggctcatcgaatccttttgtgactagcattgatgtggtgctcggtatcacaaagcacttgcgccaggttggcgtggccggaaaattcgtggaattttttggttccggcgtcagtcaactctctattgtggaccgcacaactattgccaatatgtgtcctgagtatggagcgatcctatctttcttcccagtggataacgtcaccctcaaacacctggagcatacgggtttcagcaaggctaagctggagagcatggagacataccttaaggccgtcaaactgttccgcaatgatcaaaattcaagcggcgagccagagtatagccaagttatacagattaacctgaattctatcgtgcctagtgtgagtggaccaaagaggccccaggaccgggtggccgtgaccgatatgaagtccgactttcaggcctgtttgaacgaaaaggtggggtttaaaggctttcaaattgcagccgaaaaacagaaggatatagtaagcattcactatgagggctccgaatacaagctaagccacgggtctgtcgtgatcgcggcagtgatctcatgcacaaataattgcaacccctcagtgatgttagccgcaggactgttggctaagaaagctgttgaggctggactgagagttaagccttatatcagaaccagtctctctccgggatccggcatggtaacccattatttgagcagcagtggcgtcctgccctacctgagtaagttagggtttgaaatcgtgggttatggctgctccatttgtgtgggcaacaccgcgcctctaagtgacgcagttctaaacgccgtcaagcaaggcgacctggtcacatgcggaatcctaagcggcaacaagaattttgagggccgtctctgtgattgcgtgcgagcaaattacctggcaagccctcccctcgtggttgcttatgcaatcgccggtacagtcaacatagactttcagacagagcctctaggaaccgatcccaccggaaagaatatatatctgcacgacatatggccttctagggaagaggttcatagggtggaagaagaacacgttatcctgtccatgttcaaggccctgaaagataaaattgaaatgggaaacaaacgatggaatagtttggaagcacccgactcggtgctgtttccatgggaccttaagagtacatacatccggtgtccttctttcttcgataagcttactaaggaaccgatagcactacaggccatagaaaatgcccacgtcctactgtacctgggcgacagcgtgacaacagaccacatctcacctgctggatcgatcgccaggaacagcgccgcagcgaagtatctgaccaacagaggcctcacacctagagaattcaattcgtacggggcacgcaggggcaatgacgcagtgatgacacgcggtacgttcgccaatatcaagctgtttaataaattcatcggaaagccagccccaaagaccatccactttccctccggtcagacgctagacgtgttcgaagctgccgaactgtatcagaaggagggcattcctctcattattttggcaggaaaaaagtacggctccggtaacagtcgggactgggcagccaagggaccgtacctgctgggcgtgaaggcagtgctggcggagagctatgaaaagattcataaagatcatctcatcgggatcggtattgcccctctgcagttcctgccaggcgagaatgccgactccctgggcctcagcggccgagagacgttcagtctgacgttcccagaggaactttccccagggataacattaaacattcaaaccagtaccggcaaggttttctcggtcattgcatcatttgaagacgatgtggagattactctgtataaacacggcggactgctgaatttcgttgctcgaaagttctcctag

SEQ ID NO: 227388 - DNA, 96 bp, synthetic construct
  misc_feature 1..96: note = Description of Artificial Sequence: Synthetic coding sequence
  source 1..96: mol_type = other DNA
atggactacgttgaagacaagctgagtagtgagttcgtatttaataaccccaatataaaggggacctgtgggtgtggcgagtcttttaacatctag

SEQ ID NO: 227389 - DNA, 261 bp, synthetic construct
  misc_feature 1..261: note = Description of Artificial Sequence: Synthetic coding sequence
  source 1..261: mol_type = other DNA
atgagcgccagcttggtccgcgctacagttcgcgctgtgagtaaaagaaaactgcaaccaacccgggctgccctgacactgacgccatctgcggtaaataagataaagcagctacttaaggataagcctgaacacgtaggcgtgaaggtgggggtgaggacaagaggctgtaacgggcttagttatactctagaatacacaaaaactaagggcgacagcgacgaggaggtgatacaggatggctggtccgcagtggtgtag

SEQ ID NO: 227390 - DNA, 390 bp, synthetic construct
  misc_feature 1..390: note = Description of Artificial Sequence: Synthetic coding sequence
  source 1..390: mol_type = other DNA
atgagcgcctcattagttcgtgctacagttagagccgtgtcaaagaggaaactgcagccaactcgcgctgcattgaccctaacgccatccgccgtgaacaagattaagcagcttctgaaggataaacccgaacacgtgggcgtaaaggtcggggttagaacaagagggtgtaacggcctcagctataccctggagtatacaaagaccaagggagactcagatgaagaggtgatccaagatggcgtgagagtgtttatcgagaagaaagcgcagctcacacttctggggactgagatggattatgtggaggacaagctgagcagtgagttcgtatttaacaatccaaacatcaaggggacctgcggctgtggcgagtcattcaatatctag

SEQ ID NO: 227391 - DNA, 531 bp, synthetic construct
  misc_feature 1..531: note = Description of Artificial Sequence: Synthetic coding sequence
  source 1..531: mol_type = other DNA
atggtagctgcagggggaggcgcaagaaccgaaggagcggtgagacgctctctctggaggcagtgcgccagacgggtacacggggagaagctgagaagacctacttttgggccacggcaccggggagcagggactgccaagatgtccgcctctctcgtacgcgctacagtgagggcagtgtccaagcgcaaactccagcccacaagagcagctttgaccctcacccctagcgctgtaaataaaatcaaacagttattaaaagataaacctgagcacgtgggtgtcaaagtgggcgtccgcactcggggttgtaatggcctttcctacacgctggaatacacaaagacaaaaggtgattccgacgaagaggtcatccaggatggggtgcgcgtgttcatcgaaaagaaggcgcagctgaccctcctgggcactgagatggattatgtggaggacaaactcagcagtgagttcgtttttaacaaccccaatattaagggaacttgtggctgcggagaatcgtttaacatctag

SEQ ID NO: 227392 - DNA, 504 bp, synthetic construct
  misc_feature 1..504: note = Description of Artificial Sequence: Synthetic coding sequence
  source 1..504: mol_type = other DNA
atggcagctgccggtgcattcagactgcgaagagcagcatcagccctgcttttgagaagtccccgtctgccagctagggaactgagtgcccctgcgcgtctgtatcacaaaaaggtcgtcgaccattatgaaaaccccagaaacgtcgggtctcttgataagacatcaaaaaacgtcggcaccggacttgtgggcgctccagcatgtggcgatgtgatgaagttgcagatccaagtggacgaaaagggcaagatcgtggacgccagattcaagacgttcggttgtggtagcgccattgcatcgtccagcctggccaccgaatgggtgaagggtaaaaccgtggaggaggccttaacaataaagaacacagacatcgccaaagaactgtgtctgcctcctgttaagctccactgctcgatgctggccgaagacgcgatcaaggcggcacttgcggactacaaactgaaacaggagccgaagaagggcgaagccgagaagaagtag

SEQ ID NO: 227393 - DNA, 390 bp, synthetic construct
  misc_feature 1..390: note = Description of Artificial Sequence: Synthetic coding sequence
  source 1..390: mol_type = other DNA
atggtattaatcgacatgagtgtggacctgtcaacgcaggttgtagatcattatgaaaaccctcgtaatgtgggcagcctggataagacatcaaagaatgtcggcacgggtcttgtaggagcccctgcatgcggtgacgtgatgaaacttcagatccaggtggatgaaaaaggcaaaattgtcgacgcacgattcaagactttcggatgtgggagcgcaatcgcatctagcagcctggcgaccgagtgggtaaagggcaagaccgtagaggaagccctgaccatcaaaaatacagatattgcgaaagaactctgcctgccacctgtgaaactccactgtagcaagagtgtgctatttcctgccgaggaaaagacacagctgtcaccctag

SEQ ID NO: 227394 - DNA, 429 bp, synthetic construct
  misc_feature 1..429: note = Description of Artificial Sequence: Synthetic coding sequence
  source 1..429: mol_type = other DNA
atggtgctaattgatatgtcagtggacttgtcaacacaggttgttgaccactacgagaatcctagaaatgttggctctttggataaaaccagtaaaaacgtcgggaccgggttggtgggtgctcctgcttgtggtgatgtgatgaagcttcaaattcaggtcgatgaaaagggcaagatagtggatgcaaggttcaagacctttggctgcggatctgccattgcctcctccagcctggcgaccgagtgggtgaagggaaaaaccgtggaagaggctcttacaatcaaaaacactgacatcgccaaagagctttgtctcccacccgtgaaactccattgcagcatgttggcagaggatgccatcaaggccgcacttgccgactataaactgaaacaggagcctaaaaagggtgaagccgagaagaagtag

SEQ ID NO: 227395 - DNA, 1443 bp, synthetic construct
  misc_feature 1..1443: note = Description of Artificial Sequence: Synthetic coding sequence
  source 1..1443: mol_type = other DNA
atgagcttcccacaattaggatatcctcagtatctttcagcagccggtcctggtgcatatggtggtgaacgtccaggcgtattggccgctgctgcagcggctgccgctgcagcctctagcgggcgaccgggtgccgctgagctgggcggaggggctggggcagctgccgtaacgtcagtgctgggaatgtacgccgctgccggaccttatgctggcgcaccaaattacagcgccttcctcccgtacgcagcagacctcagcctgtttagccaaatgggtagccagtatgaattgaaagataaccctggggttcacccagcaactttcgccgcacacacagcgccagcgtactatccatatggacagtttcaatatggggaccctgggaggccaaagaacgcaacgagagagagtactagtactctcaaagcctggctgaatgaacatcggaagaatccctatcccacaaagggcgaaaagatcatgcttgcgatcattactaaaatgacactaacgcaagtgagcacctggttcgcaaacgcacggagaagactgaaaaaagaaaacaaggttacctggggcgcacggtccaaggaccaggaagacggtgctttatttggcagcgacactgaaggcgatcctgagaaggccgaggacgacgaagagattgacctcgaatccatagatattgacaaaatcgatgagcacgatggggaccagtccaacgaggatgacgaagacaaggccgaggcgcctcatgcaccagctgctccctcagccctggcaagagaccaggggtcccccctagccgctgccgatgtactgaaaccccaggactcacctctgggcctcgcgaaagaggcacctgagccaggcagcactagactcctttcacccggtgctgccgctggcggtctgcagggcgctccgcacggcaaaccaaaaatttggtccctggccgaaactgctacttctcctgatggtgcaccaaaggcctcaccaccccctccagctgggcaccctggcgctcacgggccaagtgcaggtgccccactccagcaccccgcattcttaccctcccacggcctgtacacctgtcacatcggtaagttctctaactggactaacagtgcatttctcgctcagggttctctgctgaacatgagaagcttcctcggggtgggagcacctcacgccgctccccatggccctcacttgcccgcaccaccgccacctcagccacccgttgctattgctcccggagctctgaacggagataaggcatctgttaggtcctcacccactcttcctgaacgagatttagtacccagacccgattcccccgcacagcagctgaagtccccatttcagcccgtgcgggataattcacttgctccccaagagggtacacccaggatattagcggcattgcctagcgcttag

SEQ ID NO: 227396 - DNA, 1416 bp, synthetic construct
  misc_feature 1..1416: note = Description of Artificial Sequence: Synthetic coding sequence
  source 1..1416: mol_type = other DNA
atgtcctaccctcagggatatctgtaccaggcccctggatcactggccctgtactcctgccctgcatacggagccagtgccttagcagcacctcggtccgaggagctagcaaggtccgcatcgggctctgccttctctccttatccagggagtgccgcttttacagcccaggcggctactggcttcggaagtcctctgcagtatagtgctgatgcagccgctgccgctgcgggatttccctcatacatgggggctccttacgacgctcacaccacaggaatgacaggcgctatctcctatcacccgtatggatccgccgcatacccctatcagttgaacgaccccgcttacaggaagaatgccacccgtgacgctacagcaacactgaaagcctggctaaacgaacaccgtaaaaacccttatcctacgaagggcgaaaaaatcatgctggccatcatcactaaaatgacactgacccaggtgtccacctggtttgccaacgctagaaggcgcctgaagaaagaaaataaaatgacttgggcccctcggaataagagcgaggacgaagacgaggatgagggcgatgcgaccaggtccaaagacgagagtccggacaaagcgcaggagggaactgagacctctgcggaggacgaaggcatcagtctgcatgttgatagtttgactgaccattcatgcagtgccgagagcgatggcgagaagttgccctgccgtgccggagatccactgtgcgagtccggatccgagtgtaaggacaaatacgatgatctggaggatgacgaggatgacgacgaggaaggcgagaggggcctggcaccacctaagcctgtcacatcaagccccctgaccggtctggaagcacctttgctctcccctcccccagaagccgctccacggggaggccgaaagactccccagggctcaagaacttctcctggtgccccaccacccgcatccaagcctaagctgtggtccctcgctgaaatcgcaacatcagatctgaaacagccatcacttggaccgggatgcgggccaccaggcctccccgctgctgctgccccagcctcgacgggcgctccgccaggcggatccccataccctgcctctcccctactcggcagacccttatactacacctcccccttttacgggaactacacaaattatggaaacctaaatgccgctctgcaaggtcagggattgctgagatacaattctgccgctgcagcccctggtgaggctctccacactgctcccaaggcagcttcagacgccggtaaggctggtgctcatcccctcgaaagccattacagaagtcccggaggtggctatgaacccaaaaaggacgcctcggaaggctgcacggtggtcggcggaggagtccagccctatctgtag

SEQ ID NO: 227397 - DNA, 1416 bp, synthetic construct
  misc_feature 1..1416: note = Description of Artificial Sequence: Synthetic coding sequence
  source 1..1416: mol_type = other DNA
atgagctacccacaggggtacctgtatcaagcgcctgggtcactagccctttactcctgcccagcatatggagccagcgctcttgccgctcccaggtcagaagaacttgccagaagcgcctcagggagtgcattcagcccctaccccggatcagccgctttcaccgcccaagctgccaccggtttcggctcccctttgcagtactctgcagacgcagctgctgcagctgcgggattcccatcctatatgggggctccctacgatgcccatacaactggcatgacaggggctatcagctatcacccatatggatcagccgcttacccgtaccagcttaacgatcccgcttaccggaaaaatgcaactcgggacgctactgccactctgaaggcatggcttaacgagcaccgcaagaatccataccccactaagggagaaaaaatcatgctggccataatcaccaagatgaccttgacccaggtttcaacttggttcgccaatgcgcgaaggcgccttaaaaaggagaacaaaatgacctgggcccctaggaacaaatctgaggatgaggacgaggatgaaggggacgcaaccagaagtaaagacgaaagccctgataaagcacaggagggcacggagacatccgctgaagacgagggcatttcactgcatgtggatagcctgacagaccattcctgcagcgctgagagtgacggggagaagcttccatgcagagctggcgacccactttgcgagtctggctccgagtgtaaagataagtacgacgacctggaggacgatgaagatgatgatgaggaaggcgagagaggcctggcaccccctaaaccagttacctccagcccactgaccggattagaggccccactcttgagcccaccacctgaagccgctcctcgcggagggcgaaaaactcctcaggggagccgcactagccccggagcccctcccccagccagcaagcccaagctgtggtctctggcagagatcgccacttctgacttgaagcagccctcactgggacccggatgtggcccacctgggcttcccgctgccgcagctcccgcaagcacgggagcccctccgggtggtagcccatatccagcttcccccctgctgggacgtccgctatactacacctctccattttacggcaattacacgaactatgggaatcttaacgccgcactccagggtcagggccttctgagatacaatagtgctgctgccgctcctggtgaagcattgcacactgcccctaaagctgccagcgatgcaggcaaggcaggtgcacacccccttgagagtcactatcgctcaccaggtggcggttacgagccgaaaaaagatgcctctgaagggtgtaccgtcgtcggcggaggtgtgcagccctacctgtag

SEQ ID NO: 227398 - DNA, 1506 bp, synthetic construct
  misc_feature 1..1506: note = Description of Artificial Sequence: Synthetic coding sequence
  source 1..1506: mol_type = other DNA
atgagtttccctcagctgggttaccagtacatccggccactctacccaagcgagcggcctggcgcagcaggcggatcaggtggctccgccggagcgagaggaggcctgggagcaggggcttccgagctcaatgcctcagggtccctgtctaatgttctgagttcagtctatggcgcaccttatgcggcagcggctgcagccgcagccgctcagggatacggcgcatttctcccctacgccgcagagctacccattttcccgcagctcggcgctcagtacgagctcaaggattctcccggtgtgcagcaccccgcagctgctgctgcattcccacatcctcacccggcattttacccatacgggcagtaccagtttggcgatccctccagacctaagaatgctaccagggaaagtactagcaccctgaaggcatggctgaatgaacaccgaaaaaatccctacccaactaagggcgagaagatcatgctcgccatcattaccaagatgacgctcacccaggtctccacatggttcgctaacgctagacggagattgaagaaagagaacaaaatgacatgggcccctcggtctagaaccgatgaggaggggaatgcttatggctccgaaagggaggaggaagacgaagaagaggatgaggaggacgggaagagagagctggagttggaggaagaggagcttgggggagaggaggaagataccggaggtgaaggactggctgacgatgacgaagacgaagaaatcgacctggagaatttagacggcgctgccacagaaccagagctttctttagcaggggcagcccgtcgggatggagacctggggttgggcccaatcagcgactctaagaacagtgactcagaagactcctcggagggcctggaagataggcctctacccgttctctcactggcccctgcccctcctccggtggcggtggctagtccctctctgccctctccccctgtgtccctagatccctgcgcgccagctcccgcaccggcatcagccctgcagaagccaaagatttggagtctagctgagactgccacctcaccagataatccaagaagatccccgccaggagccggagggagtccgccaggagcggctgtggccccatccgctcttcagttgagtccagcggcagctgctgcagcggctcatcggttggttagcgcacctctcggaaagtttccagcatggaccaatcgaccatttccaggacctcctcccggaccacggctgcaccccctttccctgctagggagcgcgccaccccacctgctcggcctgccaggtgcagccggtcacccagccgctgctgccgcattcgcacgccctgccgaaccggaaggaggaaccgaccgctgcagcgctctggaggtcgagaagaaactcctgaagaccgccttccagccagtcccaaggcgaccacagaatcacctagatgctgcactggtccttagtgcactgagttcatcatag

SEQ ID NO: 227399 - DNA, 741 bp, synthetic construct
  misc_feature 1..741: note = Description of Artificial Sequence: Synthetic coding sequence
  source 1..741: mol_type = other DNA
atgctgtggcgccagctgatttattggcaattgctggcccttttcttccttcccttttgtctttgccaggatgaatacatggagagccctcagactggcggtcttcctcccgattgtagcaaatgttgccacggcgattactcattccgtggataccagggcccacctggacctccgggacctccaggtatcccagggaatcacggtaataatgggaataatggcgctaccggacatgagggcgctaagggtgagaaaggagataagggcgacctcggaccccgaggagagagaggccagcacggcccaaaaggagagaaaggatatccagggatcccaccagagcttcaaattgcctttatggcgagtctcgccacacattttagtaatcagaactcagggattattttcagtagcgtggaaacaaatatcggtaactttttcgacgttatgaccggccgttttggcgctccagtttccggggtgtactttttcaccttctcaatgatgaagcatgaagatgtggaggaggtgtacgtgtacctcatgcataatgggaacactgtgttctcaatgtatagctacgaaatgaagggaaaatctgataccagctctaatcacgctgttctcaaattggctaaaggagacgaagtgtggttgcgtatgggtaacggtgccctgcatggagatcatcagcgcttcagcaccttcgccggattcctgttatttgaaactaagtag

SEQ ID NO: 227400 - DNA, 1560 bp, synthetic construct
  misc_feature 1..1560: note = Description of Artificial Sequence: Synthetic coding sequence
  source 1..1560: mol_type = other DNA
atgagttatccccaatttggctacccctatagcagcgcccctcaatttcttatggccaccaattctctctctacatgttgtgagtctggcggacggactctcgccgatagcggtcctgccgcttcagcacaggcccctgtgtactgccctgtgtatgaaagccgtttgctggcaacagcgcgtcatgaattgaatagtgccgctgctctcggagtatatggaggcccttatggtgggtctcaaggatacggcaactacgtaacatacgggagcgaggccagtgctttttactctctgaattcattcgattctaaagacggctctgggagcgcccacggcggactggcccctgcagctgctgcatactatccttacgagcctgccttgggtcagtacccctatgatagatacggcacgatggatagcggtactcgtcgaaaaaatgccacaagagagacgacaagtacactgaaagcatggctccaggagcacaggaagaacccctaccccacaaagggagagaaaataatgctggctatcatcacaaagatgacactgactcaggtcagcacctggttcgccaatgctcgacgcaggctgaagaaagagaataagatgacatggccacccagaaataaatgcgctgatgagaaacgaccctatgctgagggagaggaggaagaaggcggtgaggaggaagctagggaagagccactgaaatcttccaaaaatgcagagcctgttgggaaggaggaaaaggagctagagttgagcgacctggacgattttgatcccctcgaagcagaacctcccgcatgtgagctaaagccaccttttcatagcctcgacggtgggcttgagcgggtgccagccgctccggatggccctgtgaaagaggcctccggcgcacttaggatgtccctggctgcaggcggaggagctgctctggacgaggaccttgaacgagcgaggtcttgcttgaggtctgccgcagcaggtcctgaacctctccctggagcggagggcggaccacaagtgtgtgaggctaagctggggtttgtgccagcgggagcatccgctggcctggaagccaagcccaggatctggtcactggcccacactgcaaccgccgctgccgctgctgccacctccctcagtcagacagagttccccagctgtatgctcaagaggcagggccctgcagcgccagctgccgtgtcctctgcgcctgctacatccccaagcgttgcactgcctcactctggcgctttggaccgacaccaggattcgcctgtcacatctctcaggaattgggttgacggagttttccacgaccccatcctgagacattctacacttaaccaagcctgggccactgccaaaggcgctctcctggatcccggacccctgggacggagtttaggagctggggcaaacgtccttaccgccccactcgcccgtgcttttccacccgcagtgccccaggacgcgcctgctgctggagctgctagggagttgctggctctgcccaaggccggaggcaaacctttctgtgcctag

SEQ ID NO: 227401 - DNA, 1560 bp, synthetic construct
  misc_feature 1..1560: note = Description of Artificial Sequence: Synthetic coding sequence
  source 1..1560: mol_type = other DNA
atgtcctacccgcagtttggatatccatacagtagtgccccacaatttctcatggctacgaatagtctgtctacctgttgcgagagcgggggacggaccctcgcggactccgggccagcagcctcggcccaggcccctgtgtattgtcccgtctacgaaagtcggctgcttgctactgcccgacatgaactgaacagtgccgctgctctcggagtgtacggtgggccatatgggggttctcaagggtacggcaattacgtgacgtacggatcagaggctagcgccttttattccctcaacagcttcgactcaaaggacggcagcggcagtgcccacggaggccttgcccctgccgctgccgcttattacccctacgagccagcccttggccagtacccgtacgacaggtacgggactatggatagcggaacacgccgaaaaaacgccactcgtgagacaacctcaaccctgaaggcgtggctgcaagagcatagaaagaacccttatcctacaaagggggagaagattatgctggctatcatcaccaagatgacattgacacaggtaagcacctggtttgcaaacgcacgtcgccgactcaaaaaagaaaacaagatgacatggccaccccgaaataaatgcgcagacgaaaaacggccatacgcagaaggagaggaagaggaggggggtgaggaagaggccagagaggagcccctgaaatcctctaaaaatgccgaacctgttggtaaggaagaaaaggaactcgaactcagcgacttggacgacttcgacccgctggaagcggagccccctgcatgcgagctgaaacctccttttcacagtttggatggcggtcttgagcgggtgcccgcagcccctgacggaccggttaaggaggcatctggggctctccggatgtcactagccgctggcggaggtgccgcattggacgaagatctcgagcgcgctaggtcttgtcttcgctctgctgcagctggaccagagcctctcccaggcgctgaagggggtccccaggtgtgtgaagctaagctggggttcgtgcctgctggcgcttctgccggactcgaggccaagccccgaatttggtcactcgcccatacagctactgcagccgctgccgcagctacaagcttgagccagactgagttcccgagctgcatgctaaagaggcagggaccggcagcccctgcagctgtgtccagcgcccctgccacctctcctagcgtggccctccctcactcaggcgctctcgatcgtcaccaggacagccctgttaccagcctgcgtaattgggtggatggggtgtttcatgacccaatcctgcgccatagcacactcaatcaggcttgggctacagcaaagggagcccttttagaccccggacctttaggtagaagcctaggggctggcgctaacgtgctgacagcccctttggcacgggcatttcctcctgctgtacctcaggacgcccctgcagccggtgccgctcgagaactactcgcgcttcccaaagccggaggaaaacctttctgcgcgtag

SEQ ID NO: 227402 - DNA, 1452 bp, synthetic construct
  misc_feature 1..1452: note = Description of Artificial Sequence: Synthetic coding sequence
  source 1..1452: mol_type = other DNA
atgagctacccacaaggttatctgtatcagccaagcgctagtctggccctttactcatgtccagcatacagtacctctgtaataagtggccctagaacagatgaacttggcaggagttcgtcgggaagcgctttctcaccatacgctggatccacggcatttaccgccccatcccctggatataactctcacttgcagtacggtgctgaccccgcagccgcagcagctgctgcctttagtagttatgtgggcagtccctacgatcatactcctgggatggcagggagtctgggatatcatccctatgccgcacccttgggctcatacccttatggcgatccggcttaccgcaaaaacgccacccgtgacgctacggccacgctcaaggcctggctgaacgaacaccgcaagaatccctatcccaccaaaggtgagaagattatgttggccatcatcaccaagatgacactgacacaggtatctacctggtttgctaacgctcgcagaagactcaaaaaggagaataaaatgacctggaccccacggaaccgctctgaagatgaagaggaggaggaaaatatcgacctcgagaaaaatgacgaggacgagccacagaaaccagaggacaaaggagaccccgagggtccagaagctggcggtgctgagcagaaggccgcttcagggtgtgaacggttacaaggaccacccacgcccgctggtaaggaaacagagggatccctttccgactctgactttaaggagccaccatcggagggaagactggacgctcttcagggtcccccaagaaccggagggccttcgccagcagggccagcggcagcgcgattagccgaggacccagcccctcattatcccgctggcgcacctgctccaggtccacaccccgcagccggtgaggttcccccaggcccaggtggaccatctgtgatccacagcccccctcctcctcctcctcccgctgtattagccaaacctaaactgtggtccctcgcagaaatcgccactagttctgataaggtgaaggatggcggtggagggaatgaaggatccccctgcccaccttgtccaggacctatcgcgggtcaggcattaggaggatctcgagcctcaccagctccagccccttctcggtccccctccgctcagtgcccttttcctggcggaactgtgctgagccgcccactgtactacacggcaccattctaccctggatacacaaactacggctcgtttggtcacctccatggccacccgggtcccggtcccggacccaccacgggccctgggtcacacttcaacgggctgaaccagactgtcctaaatagggccgatgccttggccaaggatccaaagatgcttaggagtcagtcgcagttggatctttgtaaggactccccctatgaactgaagaaaggaatgagcgacatctag

SEQ ID NO: 227403 - DNA, 441 bp, synthetic construct
  misc_feature 1..441: note = Description of Artificial Sequence: Synthetic coding sequence
  source 1..441: mol_type = other DNA
atgtcgtaccctcagggctatctgtatcaaccctccgcctctctcgctctctactcctgtccagcgtacagtacttccgtcattagtggacccaggacggacgagctgggcaggagcagcagcggcagcgccttttcaccatacgcgggtagcactgccttcaccgctccaagccccggttacaattctcatctacagtacggcgcagatccagcggctgcggctgccgctgccttttcttcctatgtgctcttaaaaaaggaaaaaaaaagtcttgatttcccatgttttccaccgctgcgccctacttgcgtgagatcgcctgccgagaggggagtcgcttctgtggctcaggccagcatctgcatggaaggccgagccgctgtcgccagaagcgctcacggcggatcaccatacgctcatcgcgtgccgggaccgtag

SEQ ID NO: 227404 - DNA, 498 bp, synthetic construct
  misc_feature 1..498: note = Description of Artificial Sequence: Synthetic coding sequence
  source 1..498: mol_type = other DNA
atggggtgggacctcactgtaaaaatgttggccggaaatgagttccaagtcagcctttcttccagtatgagtgtcagcgagttaaaggcccaaataactcagaaaataggtgtacatgctttccaacagcgcctggctgtccacccttctggggtggccctgcaggatcgggttccgcttgccagccaggggttgggtccgggttccaccgtgctgttggttgtcgacaagtgtgacgaaccattgtccatactggtgcgaaataacaagggaaggagctccacttatgaggtaaggttaacccagaccgtggcacacctcaaacagcaggtgtcagggctggaaggcgtacaggatgacctcttttggcttacctttgaggggaaacccttggaggatcaactccccctaggggagtacggtctcaagcccctctccacagtgttcatgaacctacggctgcgtggaggcggtactgagcccggagggcgaagttag

SEQ ID NO: 227405 - DNA, 3129 bp, synthetic construct
  misc_feature 1..3129: note = Description of Artificial Sequence: Synthetic coding sequence
  source 1..3129: mol_type = other DNA
atggctgacgcattcggggacgaactattctctgtgttcgaaggagacagcactacggctgccggaacaaaaaaggacaaagaaaaggataagggaaaatggaaagggccaccaggcagtgctgacaaggccggaaaacggttcgacggaaaattgcaatctgaaagtaccaataacggaaagaataagcgcgacgtggactttgaaggtactgacgaaccaatattcggtaagaaaccaagaatcgaggaaagtataaccgaggacctttcattggctgacctcatgcccagagttaaggtgcagagcgtcgaaactgtcgaaggatgcacccacgaagtcgcactgccagcagaggaagattacctacctttgaagccaagggtgggaaaggcagccaaagagtaccccttcatactggatgcattccagcgggaagctatccaatgtgtagacaacaatcaaagcgtattggtgtctgcacataccagtgctggtaaaactgtttgcgctgaatacgcaatagccttagcgctcagagaaaagcagagagtcatattcacgagcccaatcaaggctctatcaaatcagaaatatcgggagatgtacgaggaatttcaggacgtcgggcttatgacgggggacgtgacaattaaccccaccgccagttgtcttgtgatgaccacagagattctgcggagcatgttgtatagaggaagtgaggtgatgcgcgaggttgcttgggttatcttcgacgaaatccactatatgcgcgactccgaaagaggcgtggtgtgggaagagacaattattcttttgcctgataatgttcactacgtgttcctctctgccacaattcctaacgcaaggcagttcgccgagtggatatgccaccttcacaaacagccgtgccatgtgatctacacagactacaggccaacccctctacagcattacattttccctgcgggtggcgacggcttgcacctggtggtcgacgaaaatggtgatttcagagaagacaacttcaacacagctatgcaagtgcttagagatgccggagacctcgctaaaggagaccagaaagggagaaaaggcggtacaaaggggccaagtaacgtatttaaaatagtgaagatgatcatggaacggaatttccagccagtgattatcttctcttttagcaagaaggattgtgaggcctacgctctgcagatgactaaactggactttaataccgacgaggagaaaaaaatggtggaagaggtcttctctaatgcaattgactgtctatctgacgaggacaaaaagctgccccaagtagagcacgttcttccactgcttaaaagaggcatcggtattcatcacggagggctcctgcctatcctgaaggaaactattgagattttgttcagcgagggtctcataaaagcactattcgccactgagaccttcgcgatgggaattaacatgcctgccagaaccgttttatttacaaatgcacgaaagtttgacggcaaggatttccgctggatcagtagcggtgagtatattcagatgagcggacgtgcagggcgacgaggcatggacgacaggggaatcgtcatactcatggtggacgagaagatgtcccctaccattgggaagcagctccttaaaggcagtgcagatcccctcaattctgccttccaccttacctacaatatggtactcaatcttctgcgggtagaagaaattaatcctgagtacatgctagaaaagagcttctaccaatttcagcattatagagcaattcctggcgtggtggaaaaggtcaaaaactcagaggaacaatacaataagattgttatcccgaatgaagagagcgtggttatatattacaagattagacaacaactggcaaaattaggcaaagagatcgaagaatatatccacaagcctaagtattgtctgcctttcctccagcccggaagactggtgaaagtgaagaacgagggagacgattttgggtggggagtggtcgtcaatttttcaaaaaagagcaatgtaaagcccaattctggggaactcgacccgttgtacgtggttgaggtcctgctcagatgttctaaggagtcactcaaaaacagtgctacggaggccgcaaagcccgcaaagcctgatgagaagggagagatgcaagtggtcccagttctagtgcaccttttatccgcaatatcgtccgtgcgtctatatatccctaaggatcttagacccgttgataatcggcagagcgtgctgaaatccattcaagaggtgcagaagaggttccctgacggtattcctctgctggatccaatcgacgacatgggcatacaagaccaaggacttaagaaagtaattcaaaaggtggaagccttcgagcataggatgtattcccatcctctccataatgaccccaacttggagaccgtctacaccctctgcgaaaagaaagcccagatagcgatcgacataaaaagtgccaagcgggaactcaagaaagcgaggaccgtcctgcagatggatgagctgaagtgccgtaaacgtgtgttacgcaggctgggcttcgcaaccagtagcgacgttatcgagatgaagggcagggtggcctgcgagataagttctgccgacgaactgttgttaaccgagatgatgttcaatggactctttaatgacctgagcgctgagcaagccacagctctcctctcgtgctttgtcttccaggagaactccagtgaaatgcctaaattgactgaacagctggccggtccactgaggcagatgcaagagtgcgcaaaaaggattgcgaaggtatcagccgaggccaagctagagatagacgaggaaacttatctcagctcgttcaagccacacttgatggatgtagtgtacacgtgggcaaccggcgcaacttttgcccatatctgtaaaatgaccgatgtctttgagggcagcataattagatgtatgagaagacttgaggaactactaaggcagatgtgccaggctgcgaaggctatcggaaacaccgaacttgagaataagtttgcagaaggaattaccaaaatcaaacgcgacattgtctttgccgctagcttatacctctag

SEQ ID NO: 227406 - DNA, 981 bp, synthetic construct
  misc_feature 1..981: note = Description of Artificial Sequence: Synthetic coding sequence
  source 1..981: mol_type = other DNA
atgggggatatgggggatcctccgaaaaaaaaacggctgattagcctctgcgtgggctgcggcaaccagattcacgatcaatatatcctgcgcgtgtcccccgatctcgaatggcacgccgcttgcctgaagtgcgcagagtgtaatcagtatctggacgagtcctgcacatgtttcgtgagagacggaaaaacgtattgcaaacgcgattacatccgactttacggcataaagtgcgcgaagtgtagcatcggctttagtaagaacgacttcgtgatgcgggctcgatctaaagtgtaccacatcgaatgcttcaggtgcgtcgcatgttctaggcaactgatccctggagatgaattcgcactacgcgaagacgggctgttttgccgagccgaccacgacgtggtggaaagagcaagtctaggcgcaggcgaccctctgtctcctctgcatcctgctcgacctcttcagatggcggcagagcccatcagtgctaggcagccagcacttcgcccacatgttcataagcagcctgagaaaacgacccgagtgcgcactgttctgaatgaaaaacagttgcatacacttcgcacgtgttacgccgctaatccacggcctgatgccctcatgaaagagcagctcgtggaaatgacgggcctgtccccaagagtcattagggtgtggttccaaaacaagcggtgcaaagataagaagcgctctataatgatgaagcagttgcagcaacagcagccgaacgacaagaccgccaacccagtggaagttcagagttaccagccaccgtggaaagtgttatccgattttgctctgcaaagcgatattgaccagcctgccttccagcagctcgtaaattttagcgagggcggacctgggagcaatagtacaggatccgaagtagcatccatgagctctcaactccctgatactcctaattccatggttgccagcccaattgaagcttag

SEQ ID NO: 227407 - DNA, 270 bp, synthetic construct
  misc_feature 1..270: note = Description of Artificial Sequence: Synthetic coding sequence
  source 1..270: mol_type = other DNA
atgggcattctcaagttacaagtattccttatcgttctgtcagtggctctgaatcatttaaaagccactcccatcgagagtcaccaggtggagaaacgtaagtgcaacactgctacttgcgccacacagagactcgcaaacttcctcgtccactctagcaataattttggcgctattttaagctcgacaaatgttggcagcaatacctacggaaagagaaacgcagtcgaagtactaaaacgcgagcctctcaactacctgccgctatag

SEQ ID NO: 227408 - DNA, 240 bp, synthetic construct
  misc_feature 1..240: note = Description of Artificial Sequence: Synthetic coding sequence
  source 1..240: mol_type = other DNA
atggggatcctcaagctgcaggtcttcctcattgtgctgagtgtggctttgaatcatctgaaagctaccccaatcgagtcccatcaggtcgaaaaaagaaagtgcaacactgccacatgtgccacgcaacggctggcgaactttctggttcattcttctaataacttcggggctattctatcgtccaccaacgtcggttccaatacctacgggaagcggaacgccgtggaggtgctgtag

SEQ ID NO: 227409 - DNA, 270 bp, synthetic construct
  misc_feature 1..270: note = Description of Artificial Sequence: Synthetic coding sequence
  source 1..270: mol_type = other DNA
atgggtatccttaaattgcaagtcttccttatcgtcctgtcagtggctttaaaccacctgaaggccacccccatcgagtctcaccaggtagaaaagcgcaaatgtaatactgcgacctgcgccacacaaaggctggcgaattttttagtgcactcgagtaataatttcggggctattctttcttcaaccaatgtgggaagtaacacttatggaaagaggaacgccgtagaggtcctgaagcgggagccattgaattacttacctttgtag

SEQ ID NO: 227410 - DNA, 1449 bp, synthetic construct
  misc_feature 1..1449: note = Description of Artificial Sequence: Synthetic coding sequence
  source 1..1449: mol_type = other DNA
atgagcggccacaagtgctatccctgggaccttcaggaccggtatgcgcaggacaagtcggttgtaaataaaatgcagcagaagtactgggagacaaaacaggctttcataaaggcaacaggaaaaaaggaagatgagcatgtggtcgcctctgacgcagacctcgacgccaagctggagctgttccatagcatccagcgaacttgtctcgatctgtctaaagcgattgtgttataccagaagaggatctgctttctcagccaggaggagaatgaactcggaaagttcctccggtcacagggctttcaggataagacccgggcagggaagatgatgcaggctactgggaaggctctgtgctttagctcgcagcagaggctggctcttcgaaaccccctgtgcagattccaccaggaggttgaaacattccgacatcgtgcgatctctgacacatggttaacagtgaaccgcatggagcaatgtcgtaccgagtatcgcggagcactgttgtggatgaaggatgttagccaggagctggacccagacctctacaagcagatggaaaaattccggaaggttcagacgcaggtccgactggctaagaaaaatttcgataaactcaagatggatgtgtgtcagaaagtagaccttctgggcgcaagtcgctgtaacctcttgagtcatatgttggcaacataccagacaaccttgttacacttctgggaaaagaccagtcacaccatggcagccattcatgagagtttcaagggctatcaaccctacgagttcacaaccctaaagagcctccaggacccgatgaagaaactagttgaaaaggaagagaaaaagaagatcaatcagcaggagtctaccgacgccgctgtccaggagcctagccaacttataagcctggaagaagagaatcagaggaaggaatcatcttctttcaagactgaggatggtaagagtatcctgtcagcactggataagggttctacccatactgcatgctcgggaccgatcgatgaattgctcgacatgaagtccgaagagggcgcatgtctaggccctgtcgcaggaactcccgaaccagagggcgcagataaggacgatctgttgctgctgtcagagatcttcaacgcctcttcactcgaggaaggagaattctcgaaagagtgggcagcagttttcggggacggccaggttaaggagcccgttcctacaatggccctgggcgaacctgatcctaaggctcagaccgggagcggtttcttaccgagccagctcctggatcagaatatgaaggacttgcaggcaagtcttcaggaacctgccaaggctgcctcggacctgactgcctggtttagtctttttgccgacctcgaccccctctcaaatccagatgctgtaggaaagaccgacaaagaacatgaactcctgaatgcatag

SEQ ID NO: 227411 - DNA, 774 bp, synthetic construct
  misc_feature 1..774: note = Description of Artificial Sequence: Synthetic coding sequence
  source 1..774: mol_type = other DNA
atgtctggacacaaatgctcctacccttgggacttgcaagaccggtacgcgcaggataaaagcgtcgtaaacaagatgcaacagaaatactgggaaactaagcaggccttcattaaagctaccggtaagaaagaggatgagcatgttgtagcgtcggatgctgatctggatgctaaattggagcttttccacagtattcagaggacatgtctcgatctgtcaaaagcaatagttctgtaccagaagagaatctgcttcttgtcgcaggaggaaaatgagctgggaaaatttctaagatcacagggtttccaggataagactagggccggaaagatgatgcaagccacaggcaaagcattatgtttttctagccaacagagacttgcacttcggaatccgctctgtcgttttcaccaggaggtggagactttcagacatcgggctattagcgatacctggctgaccgtcaatcgcatggaacagtgtcggacagaatatcgtggggctctgctgtggatgaaggacgtaagccaagaacttgatccagacctgtacaagcaaatggagaagtttcgcaaggtacagacgcaggtgagactcgctaagaagaacttcgataaattaaaaatggatgtatgccagaaggtagacttgctaggagcttccaggtgtaaccttctgtctcatatgctagctacataccaattagcctgggatcagtggcagggacccaggaatttaaaagtgctcacgaagatgacttgctgctgctag

SEQ ID NO: 227412 - DNA, 1452 bp, synthetic construct
  misc_feature 1..1452: note = Description of Artificial Sequence: Synthetic coding sequence
  source 1..1452: mol_type = other DNA
atgtcagggcacaaatgttcctacccttgggatttgcaggatcgatacgcgcaagataaatccgtggttaacaagatgcaacagaaatattgggagacaaagcaagccttcattaaggcaacaggaaaaaaagaggacgagcatgtcgtggcctccgacgccgatctagatgccaagcttgagctgtttcatagtattcaaagaacctgtctcgacctgtcaaaggcaattgttctctatcagaaacggatttgttttctgagtcaggaggagaatgagctgggtaagtttctgcgatcccaggggttccaggacaaaacacgggctggaaaaatgatgcaggccaccggaaaggcactctgctttagcagccagcagcggctagcactcagaaaccctttatgccgattccatcaggaagtcgaaacctttcgtcaccgggctatttccgatacatggttaaccgtgaaccggatggaacagtgccgcacagaatataggggggcattgctgtggatgaaagatgttagccaagagctagaccccgacctctataagcaaatggaaaagttccgcaaggtgcagacgcaggtccggctcgcaaagaagaactttgataaactaaagatggacgtgtgccagaaggtagatctgcttggagccagcaggtgtaatctcttgtcacacatgctcgccacttaccagaccacattgctgcatttctgggagaagacttcccataccatggcagctattcacgagtcgtttaaaggataccaaccttacgaattcaccacacttaagagtctgcaagacccaatgaaaaaattagtggaaaaggaggagaagaagaagatcaaccaacaggagtccacagacgccgctgttcaggaacccagccagctcattagcctggaggaggagaaccagcgcaaagagagcagttcatttaaaaccgaggacgggaagagcattctgtcagcgctagacaaggggtctacacatactgcctgcagtggccctatagacgagctcttagacatgaagtccgaagaaggagcctgccttgggcctgtcgcgggaacaccagagcccgaaggggctgacaaggatgatttgctgctcctgtccgagattttcaatgcatcttcgctcgaagaaggcgaattcagtaaagaatgggcggcagtattcggcgacggccaggtgaaggaacctgtgccaaccatggctttgggcgagcccgaccctaaggctcaaacgggttcagggttccttccctctcagctgctggaccaaaatatgaaggacctgcaggcctctcttcaggaacctgccaaggccgcttccgaccttacggcttggtttagcctgtttgcggatttggatcccttgagtaacccagacgctgtgggcaagacagacaaggaacatgagctattaaacgcctag

SEQ ID NO: 227413 - DNA, 1452 bp, synthetic construct
  misc_feature 1..1452: note = Description of Artificial Sequence: Synthetic coding sequence
  source 1..1452: mol_type = other DNA
atgtccggtcacaaatgcagctatccctgggacctgcaggaccgatatgcccaggataaatcagttgtgaacaaaatgcagcaaaaatactgggaaaccaaacaagccttcattaaggctactggtaaaaaggaagacgagcacgtggtcgcctccgatgcagacctggatgctaagctagaactcttccatagcattcagcgaacctgcctggatctctctaaagctatcgtcctgtaccagaagagaatatgctttctttctcaagaagaaaacgaactcggcaagttcctgcggtcgcaaggtttccaggataaaacccgtgcgggtaagatgatgcaggcaacaggcaaagctctgtgttttagctctcagcaacggctagcgctgaggaaccccctgtgcagattccaccaagaagtggagacgttcagacacagggcaatcagcgatacttggcttacggtgaataggatggagcagtgcagaacagagtatagaggagccctgctatggatgaaagatgtttctcaggaactggatccagacctgtacaagcagatggagaagtttcgaaaggttcaaacgcaggtgcggcttgccaagaagaatttcgataagctgaagatggatgtgtgccagaaggtcgatctcctgggtgctagtagatgcaaccttctgtcacatatgctggccacctaccagacgactctactacacttctgggaaaagacatcccatacgatggcagccatacacgagagctttaagggctatcagccctacgagttcaccacattgaaatctctccaggaccccatgaagaagttggtcgagaaggaggagaaaaagaagattaaccagcaggaatccaccgacgccgctgtgcaagagccgtctcaactgatctccctggaggaagagaatcaacgaaaagaatcttctagcttcaagaccgaggacggaaaatcaatcttgtctgctctggacaaaggcagtacacacacagcctgctcaggacccattgacgaattactagatatgaagagtgaggagggtgcctgcctgggcccagtcgccggtacgccggaaccagagggggctgataaagacgacctgctgctgttgtcagaaattttcaatgcatcgagccttgaggaaggcgagtttagcaaggaatgggccgcagtcttcggggatggccaagtgaaggaaccagtgcctacaatggcacttggagagcctgatcccaaggcacagaccggaagcggatttctgccctcccagctcctcgaccaaaatatgaaagacctgcaagcttctctccaagagcccgctaaagcagcatccgaccttaccgcgtggttttcactgtttgcagaccttgacccgctttccaatcctgatgctgttggaaagaccgacaaagaacacgagctccttaacgcctag

SEQ ID NO: 227414 - DNA, 1452 bp, synthetic construct
  misc_feature 1..1452: note = Description of Artificial Sequence: Synthetic coding sequence
  source 1..1452: mol_type = other DNA
atgagcggacacaagtgttcctacccttgggaccttcaggacaggtatgcacaggacaagagcgtcgttaataagatgcaacaaaagtactgggaaacgaagcaggcatttatcaaagcaacaggaaagaaggaagacgaacacgtggtcgccagcgatgcagacctggatgccaaactggagctcttccactcaatccaacgcacatgcctggacctcagcaaggcaattgtgctgtatcagaaaaggatatgctttctttcacaggaggagaacgaattggggaaattccttcggtcgcagggatttcaggacaagacaagggctggcaagatgatgcaagcaactggtaaggcactttgtttctctagccaacagcgcctcgcattacgcaaccccctctgtcggttccaccaggaggtagagacctttcgtcatcgcgctatcagcgacacctggctgaccgtgaaccggatggaacagtgccgcaccgagtacagaggtgcactactgtggatgaaagacgtgtctcaggagctggacccagatctgtataagcagatggaaaagtttaggaaggtgcagactcaggtgaggttggcaaagaaaaacttcgacaagctgaaaatggacgtgtgtcagaaagtcgacctgctcggggcttccaggtgcaaccttctgtcgcacatgctcgccacgtatcagactaccctgcttcatttctgggagaaaacatcacatacaatggcggcaatccatgaatcctttaaaggctatcagccctatgaattcacaactctgaagagtctgcaagatccaatgaagaagctggtggagaaggaggagaagaagaaaattaatcagcaagagtcgactgatgctgctgtccaggagcctagtcaactcatcagcctggaagaggaaaatcaacggaaagagagcagctctttcaagacagaggacggcaaatcaatcctctccgcgctggacaagggatcaacccacacagcgtgcagcgggcctattgatgagttgttggatatgaagagtgaggagggcgcatgtctgggcccagtggctggcacaccagaacccgagggcgcagataaagacgacctcctgctcctgtcagaaatttttaacgcaagttctctcgaggaaggggagttttctaaagagtgggcagcagtgtttggggatggccaggttaaggagcccgtcccaactatggcacttggcgagcccgaccccaaggcccagacagggagcggattcctcccttcacaattattagaccaaaacatgaaggatcttcaggcttcactgcaagagccggctaaagcggcttcggatctgacggcctggttttccctattcgctgacctggacccactcagtaacccggacgccgtgggaaaaactgataaagagcacgaactcttgaatgcctag

SEQ ID NO: 227415 - DNA, 1539 bp, synthetic construct
  misc_feature 1..1539: note = Description of Artificial Sequence: Synthetic coding sequence
  source 1..1539: mol_type = other DNA
atgagtggacataaatgctcatacccctgggacctccaggataggtacgcccaagacaagtccgtggttaacaagatgcaacagaagtactgggagacgaagcaagcatttattaaggccacgggcaaaaaggaagacgagcatgttgtcgcatccgatgcggatctggatgccaagctcgagctcttccactcaatacagcgcacttgcctggatctgtcaaaggcaattgtgctgtatcagaagcgaatctgctttctaagtcaggaagaaaacgagctgggcaagttcttgagaagccaggggtttcaggacaagactagagccggtaaaatgatgcaggctactggtaaggctttgtgtttcagcagtcagcagcgcctcgccctgcgcaaccccctttgtcgttttcaccaggaagtggagacctttcgccatagagctatcagcgatacatggctaaccgtgaaccggatggaacagtgtagaaccgaataccgcggagcgctgctgtggatgaaagatgtctcccaggagttggatcctgacttgtacaagcagatggagaagttccggaaagtccagactcaagttagattggccaagaagaatttcgacaaattgaaaatggatgtctgtcagaaagtggatctcctgggtgcttcccggtgtaatctgctgtcacacatgcttgccacctaccagacgaccctgctgcatttctgggagaagacatcccacactatggcagctattcatgagtcctttaagggatatcagccttatgagttcactaccctcaaaagtctgcaggacccaatgaagaaattggttgagaaggaggaaaaaaaaaaaattaatcagcaggaatcaaccgacgccgctgtccaggagccaagtcaatatcttcagaacatatgcctggagatgaaagctaattcagatatcaagatgcttcagaagggtaaagaggggcaacagatcggcatactaattagtctggaggaagaaaaccagcggaaggaaagctccagcttcaagacggaagatggcaaatccattttatcagctctcgacaaaggctccacgcacacggcttgttctggcccaatcgacgagttgttagatatgaagtcagaagagggcgcttgtctgggtcctgtagcgggaacacctgagccggaaggagcggataaggacgacctcctgctgttgtcagagatattcaacgcctctagtctagaggaaggagagttctcaaaagagtgggcagctgtctttggggatggccaggttaaggaaccagttcccaccatggcactgggggagcctgacccaaaggctcagactgggtctggcttcctcccgtctcagctgttggaccaaaatatgaaggatttgcaggcatctctgcaagaaccagccaaagcggcttccgaccttaccgcatggtttagtctctttgctgacctcgaccctctgtccaatcccgacgccgtgggtaaaaccgataaggaacacgagctccttaatgcctag

SEQ ID NO: 227416 - DNA, 405 bp, synthetic construct
  misc_feature 1..405: note = Description of Artificial Sequence: Synthetic coding sequence
  source 1..405: mol_type = other DNA
atgagcgggcataagtgctatccctgggatttgcaggataggtacgctcaagacaaatctgtcgtaaacaagatgcagcaaaaatactgggaaaccaagcaagctttcataaaagctaccggcaaaaaggaggatgagcacgttgtcgcatccgatgctgacctggacgccaagttggagctctttcacagcattcagcgcacctgtctcgatctgtccaaagccattgttctgtatcagaaaaggatttgcttcctgagccaggaagagaacgaactgggcaaatttctgcgatctcaaggcttccaggataagactcgggctgggaagatgatgcaagcaactggcaaggccctgtgtttttcatctcagcagagactcgccctgaggaaccccctatgctag

SEQ ID NO: 227417 - DNA, 489 bp, synthetic construct
  misc_feature 1..489: note = Description of Artificial Sequence: Synthetic coding sequence
  source 1..489: mol_type = other DNA
atgagcgggcataaatgttcttatccttgggatctacaggataggtatgctcaggataagtcggttgtcaataagatgcagcagaagtactgggagacaaaacaggccttcattaaagcaacaggcaaaaaagaggatgaacacgtggtggcttccgacgccgacctcgacgcaaagctggaactcttccattctattcagaggacgtgtctggacttaagcaaagctatcgtgctctaccagaagagaatatgcttcctgtcacaggaggaaaacgagctgggtaaattccttaggagtcaggggttccaggacaaaacccgtgccggaaaaatgatgcaggctaccgggaaagccctgtgttttagttcgcagcagaggctggctctgcggaacccgctgtgcagattccaccaagaagtggagacttttagacatagagccatatctgatacttggctcaccgtgaataggatggaacagtgttag

SEQ ID NO: 227418 - DNA, 666 bp, synthetic construct
  misc_feature 1..666: note = Description of Artificial Sequence: Synthetic coding sequence
  source 1..666: mol_type = other DNA
atggctgcagccaggccgtctctcgggagggttctgccaggctcctcagtcctgtttctctgcgatatgcaagagaagttccgtcacaacattgcatatttcccacaaattgtttcagttgctgcacgcatgctaaaggttgccagattgcttgaagtaccagtcatgctcactgaacagtatccccagggactcgggcctactgtgcctgaactgggaacagaaggcttgagacctctggctaagacatgtttctccatggttcccgctcttcaacaggagctagacagccgcccacagttgagatctgtcctcctctgcggcatagaagcacaggcttgtatcttagaccccagaagctaccctgggctcgcactcactagtctttatccacagaacacaaccttagacctgctggaccggggtctgcaggtgcatgttgtagtggacgcctgttcctctaggtcacaggtggaccggctggttgctctggcccgtatgaggcagagcggcgcttttcttagtacaagtgagggcctcatactgcaattagtaggcgatgcagtccatccacagtttaaagaaatccaaaaactgattaaagagccagcccctgactcggggctgcttgggctcttccaggggcagaattctctgctccactag

SEQ ID NO: 227419 - DNA, 618 bp, synthetic construct
  misc_feature 1..618: note = Description of Artificial Sequence: Synthetic coding sequence
  source 1..618: mol_type = other DNA
atggctgcggctcggccaagtctcggtagagtactgccgggttcctccgtgctgttcttatgtgacatgcaagaaaagttcagacataatatcgcctatttcccccaaatcgttagcgtggcagccagaatgctgaaggtcgccagacttctcgaagtccctgtgatgctcaccgagcagtatccccagggattgggccctactgtcccagaactcggtactgagggacttcggccactggccaagacgtgtttctctatggtccccgcactgcagcaggagctggattcacgaccccaacttcgatccgttctgctgtgcgggatcgaggcacaggcctgcatcctcaacacaacactcgacctcctggaccgtggtctgcaagtgcacgtggtggtcgacgcttgctcatccagatcacaggtcgataggctcgtcgccctggcccgaatgaggcagagcggtgcttttctgagcacaagtgagggtctaattctacagctggtcggagacgccgtgcaccctcagtttaaagagattcaaaaactcataaaagagcctgccccagattcaggccttcttggccttttccagggtcagaacagccttctgcactag

SEQ ID NO: 227420 - DNA, 408 bp, synthetic construct
  misc_feature 1..408: note = Description of Artificial Sequence: Synthetic coding sequence
  source 1..408: mol_type = other DNA
atggccgctgccaggccatctctaggtcgagttttaccaggctcctcggtgctgttcttgtgcgatatgcaagagaaatttcgccacaatatcgcatacttcccacagattgtgtccgtggctgccaggatgctaaaaaatactacactcgatttgctggatcgcggtctgcaggtccacgtggtggttgacgcatgcagctccaggtctcaggtagaccggctggttgctcttgcccgtatgcggcagtctggggcattcctgagtacgtccgagggtttaatcctgcagctggtgggagacgcagtccacccacaattcaaagagattcagaagctaattaaggaacccgctcctgattccggtttactgggcctgtttcagggccagaattccttgctccactag

SEQ ID NO: 227421 - DNA, 1101 bp, synthetic construct
  misc_feature 1..1101: note = Description of Artificial Sequence: Synthetic coding sequence
  source 1..1101: mol_type = other DNA
atggccggaccagcctggatatcaaaggtcagtcgcttgctgggagccttccacaaccccaagcaagttacacggggttttaccggcggagtacagaccgtgaccctaatccctggagatggcatcggccctgaaataagtgcagcagtgatgaagatcttcgatgccgctaaagcccctatccagtgggaggagaggaatgtgacagctattcaaggcccagggggaaaatggatgattccctctgaggctaaggaatcaatggataagaataaaatggggctcaaggggcctctgaagaccccaatcgcagctggccatccctccatgaacctgctgctgaggaagacttttgatctctacgccaacgttcggccatgcgtatcaatcgaggggtacaaaacaccttatacagacgtcaacatagtgactatcagagagaatacagagggagaatactccgggattgagcatgtcattgtggacggagtggtgcaatccatcaagctgatcacagagggcgcttcaaaacggatcgcggagttcgctttcgaatacgctaggaataaccataggtctaatgtcaccgcagtgcataaagcaaatattatgcgaatgtctgacggtctttttctgcagaagtgccgggaggtggctgaaagctgtaaggatatcaagttcaatgagatgtacctggacactgtgtgtctcaatatggtccaagatccatctcaatttgacgtcctcgttatgcctaatctctatggagatattctgtccgacctctgtgccggtctcatcggaggcttgggtgtgacgccaagtggcaacatcggtgccaatggcgtagccattttcgaaagcgttcacggtacagcgcctgacatcgccggaaaagacatggctaatcccacggccctactgctgtccgccgtgatgatgctgcgtcatatgggactgttcgatcacgccgctcgcatcgaggctgcctgttttgcgaccattaaggatggtaagtccctgaccaaggacttaggcggaaatgctaagtgttcagactttacggaggaaatttgtcgaagagtcaaggatctagattag

SEQ ID NO: 227422 - DNA, 774 bp, synthetic construct
  misc_feature 1..774: note = Description of Artificial Sequence: Synthetic coding sequence
  source 1..774: mol_type = other DNA
atgaacttgctgttgcgaaagacctttgacctgtatgcaaacgtgaggccctgtgtctctatcgaaggctataaaaccccatacactgatgtgaacatcgtgaccattagagaaaacaccgagggtgaatatagcggcattgagcatgtgatcgttgatggagttgtgcagtcaattaaacttattacagaaggcgcatcgaaacggatcgccgaatttgcatttgagtacgcgcgtaataaccataggagcaacgttacagctgtccacaaggccaacattatgaggatgtctgatgggctgttcttgcaaaagtgccgagaggtcgcggaatcctgcaaggacatcaaattcaacgaaatgtatcttgacacagtctgcttgaacatggtccaggatccttcccagttcgatgtgctggtgatgccaaacctctatggcgatattctttctgacctatgcgctggtctaattggcggactgggagtgaccccctctggcaacatcggcgcaaacggcgtggctatctttgaatccgtgcatggtaccgccccagatatcgcaggaaaagacatggccaatccaacggcgctgttgctgagtgccgtgatgatgctgaggcatatggggctgtttgaccacgccgcaaggattgaggctgcctgctttgcaaccatcaaagatgggaagtccctgaccaaggacctggggggaaatgccaaatgctccgacttcaccgaagaaatttgccggagagtgaaagatctggattag

SEQ ID NO: 227423 - DNA, 495 bp, synthetic construct
  misc_feature 1..495: note = Description of Artificial Sequence: Synthetic coding sequence
  source 1..495: mol_type = other DNA
atggctgccctttccggagtccggtggctcacgagggctctggtgtcagccggtaacccaggcgcttggagaggcctctccactagcgccgctgctcacgctgcgagtcgctctcaggcggaggatgtgcgagtcgaaggatcgttccccgtgaccatgctccccggagacggtgtgggacccgagctcatgcatgctgtgaaggaggtgttcaaagcagctgcagtccctgttgagttccaagagcatcacctcagcgaagtccagaacatggcctctgaggaaaaactggagcaggtcctctcttcaatgaaggaaaataaggtggctattattggcaaaattcacacaccgatggagtataagggagaactggcctcatacgacatgaggctcagaaggaaacttgacctgtttgcaaatgtagttcacgttaaatcactcccgggatatgacagtgctcaacagagtcgccctggtgaccacagtaggtag

SEQ ID NO: 227424 - DNA, 1158 bp, synthetic construct
  misc_feature 1..1158: note = Description of Artificial Sequence: Synthetic coding sequence
  source 1..1158: mol_type = other DNA
atggctgccttaagcggcgttagatggctaacgcgtgcacttgtgtccgccggaaaccccggtgcatggagaggactgtctactagtgccgctgctcacgccgcatcccggtcccaggctgaagatgttagagtcgagggcagttttcccgtcactatgcttcccggagacggagtgggcccagagctcatgcacgctgttaaagaagtcttcaaggcagcggctgtcccagtggaatttcaggagcaccacctgagcgaagttcaaaacatggcctctgaggagaagcttgaacaagtgctatcaagtatgaaggaaaacaaggtcgcgatcattggcaaaatccacaccccaatggaatacaaaggcgagctcgcttcatatgacatgagactcagaagaaaactggatctgttcgccaacgtagtgcacgtaaaatcactcccaggttatatgactcgccacaacaatcttgatctggtaatcataagggagcagacagagggcgagtactcctctctggagcatgagtctgccaggggcgtaatcgaatgcctgaagatcgtaacaagggccaagtctcagcgcatagccaaatttgccttcgattatgctactaaaaaaggtcgtggaaaagtgacagccgttcacaaggcaaatatcatgaagctgggagatggcctctttttacagtgctgcgaggaagtggccgaactctatccgaaaatcaaattcgagacaatgataatcgacaactgctgtatgcagctcgtgcagaacccctatcagttcgatgttttagtcatgccaaacctctacggaaacatcattgataacttagccgcaggcttggtgggcggagccggagtagttcctggggaatcatacagcgctgaatacgccgtgttcgaaaccggtgccagacacccattcgcacaggcagttgggcgaaacattgctaacccgacggccatgctcctttccgctagtaacatgctgagacatctgaatctcgaatatcacagctctatgattgcagatgccgtgaaaaaggttatcaaagtgggcaaggtcagaacccgcgatatgggaggttacagtactacaacggatttcattaaatcagtgattggccacctccagaccaagggctcttag

SEQ ID NO: 227425 - DNA, 1152 bp, synthetic construct
  misc_feature 1..1152: note = Description of Artificial Sequence: Synthetic coding sequence
  source 1..1152: mol_type = other DNA
atggccgctctttccggcgttcggtggttaactcgagcactagtgagcgctggcaacccaggagcctggcggggtttatcgactagtgcagccgcacacgctgcctcacgtagccaggctgaggatgtgcgtgtggaagggagcttccctgtgaccatgcttcctggggacggagtgggccctgagcttatgcatgctgtaaaggaggtttttaaggctgccgcagttcctgtggaattccaggagcaccacctctctgaggtgcagaacatggcgtcggaagagaagcttgaacaggtcttaagttctatgaaagagaacaaggtcgcaatcattggaaagattcatacacccatggagtacaagggagaactcgctagctacgacatgcgtcttcgcaggaagcttgacctatttgcaaatgttgtgcatgttaaatccctgccaggatacatgactagacacaataaccttgatctagtgattatccgcgagcagacagaaggtgaatattccagtctcgagcacgagagcgctcgaggggtgatcgagtgccttaagatcgtgactcgggcaaagtcacagaggattgctaagttcgccttcgattacgctaccaagaagggaagagggaaggtaaccgcggtccacaaggctaatatcatgaaacttggcgatggactgtttctccagtgctgcgaagaggtcgcggaactttatcccaagatcaaatttgaaacaatgatcatagataactgctgcatgcagttagtgcagaacccttaccagttcgatgtactggttatgcctaacctgtatggtaatataatcgataacctggctgccggactggtgggtggcgctggcgtagtgcccggtgaaagctatagcgccgaatatgctgtcttcgagaccggagcccgacatccatttgcccaggcagttggcaggaatattgcaaatcctacagccatgctcttgtcagccagtaatatgctcaggcatttgaacttagaatatcactcaagcatgatcgctgacgccgttaaaaaggtgatcaaagtgggaaaagtccggactagcgatatgggcggatacgccacatgtcacgacttcacagaggccgtgattgcggctctgccacacccatag

SEQ ID NO: 227426 - DNA, 702 bp, synthetic construct
  misc_feature 1..702: note = Description of Artificial Sequence: Synthetic coding sequence
  source 1..702: mol_type = other DNA
atgaaaatgggggagagatggagctctctattccccttccccgtcagcccatcgtgttgctttttactgacccagtctgccaggggtgtgattgagtgcctgaagatcgtgactcgtgccaagtcacagcggatcgcaaaatttgcatttgactatgccactaaaaaggggagggggaaagtgacagccgtgcataaggccaacatcatgaagctgggagacggattattcttgcagtgttgcgaggaggtggctgagctttaccccaaaattaaattcgagaccatgattatcgacaactgttgtatgcaattagttcagaatccatatcagttcgacgttctggtgatgccaaatctgtacggcaatattattgataaccttgctgcagggctggtaggcggtgcaggggtagtgccaggggagtcgtattctgccgagtatgccgtcttcgaaacaggcgctaggcacccttttgcccaagcagttggacgaaacatcgccaatcccactgctatgctcctttcagccagtaatatgctgaggcatctgaacctggagtaccactctagcatgatcgccgacgccgtcaaaaaggtgatcaaagtaggcaaggttaggactagggatatgggtggatacagcaccactacagactttattaagtctgtgattgggcatcttcagactaagggttcatag

SEQ ID NO: 227427 - DNA, 795 bp, synthetic construct
  misc_feature 1..795: note = Description of Artificial Sequence: Synthetic coding sequence
  source 1..795: mol_type = other DNA
atggaaagtggaaagacggcaagtccaaagtctatgcccaaagatgcgcagatgatggctcagattctcaaagatatgggaattacagaatacgaacctagggtcatcaatcagatgctggagttcgccttcagatacgtgaccactattctggacgacgctaaaatctattccagccatgccaagaaggcaactgttgacgcagacgacgtgaggttagcaatccagtgccgcgctgaccagagtttcacctcgcctccacccagggatttcctccttgacatagctcggcagagaaaccagaccccactgccattgataaaaccatacagcggtcccaggctgcctccggataggtattgtctgacagccccaaactaccgccttaagagtttgcagaagaaagcaagtactagcgcaggtagaattacggtgcctcgactgtctgtgggcagcgtcacaagcaggcccagtacaccaacactggggaccccaactccccagactatgtccgtctcaaccaaggtggggacccctatgtcccttactgggcagcgattcactgtgcagatgcccacctcacagtctccagccgtcaaagcgagcatccctgctacttctgccgtgcagaacgtcctgatcaaccccagcctgataggcagtaagaacatcctcattaccactaatatgatgtctagtcagaataccgctaatgagtccagcaacgccttaaagcgaaaaagagaggacgatgacgatgacgatgatgatgacgatgattacgacaacttatag

SEQ ID NO: 227428 - DNA, 906 bp, synthetic construct
  misc_feature 1..906: note = Description of Artificial Sequence: Synthetic coding sequence
  source 1..906: mol_type = other DNA
atggccatcagacggaaccgtgtggccttaaaggggaacatagaaaccaatcacaacttacccccatctcacaagtctagaaacaacatactgcgaacatccctggacctgtacgcaaatgtaattcattgcaaaagcctgccaggtgtggtcactcgccataaggatattgacattttgatcgtgagggaaaacactgaaggagaatactcgtcacttgagcatgaaagcgtggccggagtagtggaaagtcttaaaatcattaccaaggccaagtccctgcggattgctgagtacgcgttcaagttagcgcaggagagcggtagaaaaaaggtgacagccgtgcataaggccaatatcatgaaactgggcgatggacttttcctgcagtgctgtcgcgaagtcgccgcaagataccctcagattacctttgagaatatgatagtggacaacacaaccatgcagcttgtatcccgaccccaacagttcgatgtgatggtgatgccaaacttgtatggaaacatagtcaataatgtgtgcgccggtctggtgggtggaccaggcttggtggcaggggctaactatggccacgtctatgcagtctttgagacagccacgcggaacacaggcaagtccatagcaaacaagaacatagccaaccctaccgctaccttgctggcatcgtgtatgatgcttgaccatttaaagctgcactcgtacgcgacctcaatccgcaaagccgtcctagctagcatggacaacgagaatggtttagtgtgtgccgagccggcttgcgtccttcagatgcacactccagacattgggggacagggcaccaccagcgaagctatccaggacgtaatccgccatatccgcgtcattaatggcagagcggtcgaggcttag

SEQ ID NO: 227429 - DNA, 1143 bp, synthetic construct
  misc_feature 1..1143: note = Description of Artificial Sequence: Synthetic coding sequence
  source 1..1143: mol_type = other DNA
atggcgctaaaggtggccactgttgctgggagcgccgctaaagctgtgctaggcccagcactcctgtgccgaccgtgggaggtactgggggcacacgaggtgccgagtcgcaacatcttctctgagcaaacgatccctccttctgcaaaatacggcggtagacacaccgttacaatgattcctggggacgggattggcccagagttgatgttgcacgttaagagcgtttttcgtcacgcctgcgttccagtggactttgaggaagtacatgttagctcaaatgctgacgaagaggacataagaaacgcaattatggccattcgccgaaatagggtcgccctaaaaggaaacattgaaacaaatcataatctgccgccatctcacaaatccaggaataatatactgagaacttctctcgatctctacgcaaatgtgattcattgtaaatcactccccggagtggtgacccgtcacaaagacatagacatcctcatcgtgagagaaaacactgaaggcgaatactcttccctggaacatgagtcagtggctggggtagtggaatcactcaagatcattactaaggcaaaatccttgagaatagccgaatatgccttcaagttagcgcaagagtccgggcgaaagaaagtgactgccgtccataaggctaatattatgaagctgggcgatggcttatttttgcaatgctgtagggaggtggcagccaggtatccccagatcacatttgagaatatgatcgtcgacaataccacaatgcagcttgtatcacgtcctcagcagtttgacgtaatggtgatgcccaacctgtacggcaatattgtgaacaacgtatgtgccggtctcgtcgggggaccgggactcgttgccggtgcgaattatgggcacgtctacgcagtctttgagaccgcaactaggaataccggcaaaagtattgcaaacaaaaacattgctaacccaacagccacgctgctcgcgtcttgcatgatgcttgaccatctgaaactgcacagttacgcaacaagcatccgaaaggctgttctggcttccatggataatgaaaatgtacggttcccttcgcatccaaccctgctgcccaggcctgtttcgccttgttctctgctgtag

SEQ ID NO: 227430 - DNA, 525 bp, synthetic construct
  misc_feature 1..525: note = Description of Artificial Sequence: Synthetic coding sequence
  source 1..525: mol_type = other DNA
atgtatactttcgaccaggccaccggcggaaccgctcagtttgaagcgcatagtgatgcccaggctctggtactgctcgatgtgacccccgaccagagtatggtcgacgaaggcatggcacgtgaggtgatcaaccggatccagaagctgcggaagaagtgcaatctggtgccaactgatgaaataactgtgtattataaagccaagagcgaaggcacctaccttaactctgtgatcgaatcgcacactgagttcatctttaccaccatcaaggcacccttgaagccatatcccgtcagtccgtcagacaaggtgctcatacaggaaaaaactcagttgaagggtagtgaactcgagatcacgttgacgcggggatctagcttgcccggacccgcatgcgcgtatgttaatctgaatatctgtgctaatggctccgaacagggcgaaatgcagtggataattcccgagatttaccacttctggaaacctcgatggagtatcgctcccggtaagagcaagcgatag

SEQ ID NO: 227431 - DNA, 525 bp, synthetic construct
  misc_feature 1..525: note = Description of Artificial Sequence: Synthetic coding sequence
  source 1..525: mol_type = other DNA
atgtacacgttcgaccaagctactggcggaactgcacagttcgaggcccactctgacgcgcaggctctggtgttactggatgtaaccccagaccaaagcatggtcgatgagggcatggcaagagaagttattaatcgaattcagaagctgcgcaagaaatgtaaccttgtccccaccgatgagataactgtttactacaaggccaaatctgaaggcacatacttaaactccgtgatcgagagtcacaccgaattcatttttactactatcaaagcaccactgaagccctaccctgtctcgccatcagataaggtcctgattcaggaaaagactcagctgaagggctcagaattggaaattactctgacgcggggatctagtctgcccggacccgcatgtgcctacgttaacctcaacatctgcgccaacggcagtgaacagggggaaatgcagtggatcatacccgagatataccacttctggaagcccagatggtctatcgcacctggcaaatctaagaggtag

SEQ ID NO: 227432 - DNA, 3789 bp, synthetic construct
  misc_feature 1..3789: note = Description of Artificial Sequence: Synthetic coding sequence
  source 1..3789: mol_type = other DNA
atgttgcaacaggtcccggagaatataaattttcccgctgaggaggagaagatcttggagttctggacggaattcaattgctttcaagaatgcctcaaacagagtaagcacaaacctaagttcacattctatgacggtcccccattcgccaccggcttgccccactacggccacatactggccggtaccatcaaggacattgtgaccaggtacgcccaccaatctggattccacgtggatcgcaggtttggatgggattgccatggactgcccgtggagtatgagattgacaagaccctgggaattcgcggtccagaagacgtggccaaaatgggcatcaccgagtacaacaaccagtgtcgggctatcgtcatgcgctattcagccgaatggaaatccacagtcagtcgcctggggagatggatcgatttcgataatgattataagacactctatccccagttcatggagtccgtgtggtgggtatttaagcagttatacgacaagggactcgtgtatcgtggggttaaggtgatgcctttctctacggcatgtaatacacccctgagcaatttcgagagccaccagaattataaagacgtgcaagacccctctgtcttcgtaacttttccactggaagaggatgaaaccgtctccctggtagcttggacaacgacgccctggactctgccgagtaatttggccgtttgcgtgaacccggagatgcaatatgtaaaaataaaggacgtggctagggggcgtctcctgattctgatggaagctaggcttagcgcactctataaactcgagtccgattacgaaatcctggaacggttcccaggagcctaccttaaggggaagaaatacaggcccttatttgattactttctgaagtgcaaagaaaacggcgcttttacggtgctggtggacaactatgtgaaagaagaagagggaacaggcgtcgtgcaccaagcaccatactttggagccgaagattaccgagtctgcatggactttaatattatcagaaaggactctctgccggtatgtcccgtcgacgcttctgggtgttttacaacggaagttaccgatttcgccggacagtatgtcaaagacgctgacaagagcattatccgcacactgaaagagcagggcagattgctagtggcaacaactttcacacacagctatcccttttgttggaggtccgacactccactgatttacaaggcagtcccgtcttggtttgtgagagtcgagaatatggtcgaccagttattgagaaataacgatctgtgctattgggtaccagagctggttagggagaagagattcggaaattggctgaaagatgcacgcgattggacgatttccaggaatcgatactggggaacacctattccgctgtgggtatccgatgacttcgaggaggttgtgtgtattggcagtgtggcagaactcgaggaattatctggagctaaaatatctgaccttcatcgagaatctgtcgaccatttgacaattcccagtagatgtggaaaaggctctttacaccgcattagtgaagtgttcgactgttggttcgagtcgggatctatgccctacgcacaggtgcattatcctttcgagaataagcgcgagttcgaggacgcctttcccgctgatttcatagctgaaggtatcgaccagacacgcggatggttttatactctgttggttctggcgaccgcactgttcggacagcctccttttaaaaatgtcatcgtgaacggcctcgtgcttgctagcgatggtcagaaaatgagcaaacgtaagaagaactatcccgacccagtgtccataatccagaaatacggcgctgatgcactgaggctgtatctcatcaattctcccgtggttcgcgctgagaacctgaggttcaaagaagaaggggtacgcgacgtccttaaagatgttctgctcccgtggtacaacgcttacaggttcctgatccagaacgtcctgcggctgcagaaagaggaggaaatcgaatttctgtataacgaaaacaccgtccgcgagagcccaaatattacagatcgctggatccttagtttcatgcagagcttgattggatttttcgagactgagatggcagcttacagactgtatactgtcgtgcccaggttggtgaagtttgtggacattcttaccaactggtacgtccgcatgaatcgacgaaggctgaagggcgagaacgggatggaagactgcgtgatggccttggaaacgctgttttccgtattactgagcttgtgtagattaatggccccatacaccccctttttgaccgagcttatgtaccagaacctaaaagtactcatagaccccgtttctgttcaggataaagacacactgtcaattcactacctgatgctgcccagagtccgggaggagttgattgataagaaaacagaatctgccgtgtcgcagatgcagagcgtgatcgagctaggcagggtcatccgggatcgtaagactattcccataaaatatccacttaaagaaatcgtggtgattcaccaggaccccgaggcactgaaggacatcaagagcctggagaagtacatcattgaagagctaaacgtgcgtaaggtcaccctctccaccgataaaaacaagtatggtattagactcagagcagagccagaccacatggtgctagggaagaggctgaagggggctttcaaagcagtgatgacgagtattaaacagctgtctagcgaggagttggagcagttccaaaaaactggtactattgtggtcgaggggcacgaactacatgacgaggacatccgactgatgtatacctttgaccaggccacgggcggtacagcgcagtttgaggctcattcggatgctcaggccctggtgttgttggatgtgacgcccgatcaaagcatggtcgatgagggaatggcacgagaggtaataaatagaatacaaaagctccggaagaaatgcaacttggtgcccactgacgagataaccgtatattacaaggccaaatctgaggggacttacctgaactctgtaatagagtcgcacaccgaatttatctttacgaccatcaaggcccctctgaagccataccctgtttccccctccgataaagtgctcatacaggaaaagacccagcttaaggggagcgaactggaaattaccctcaccagagggagcagtctacccggtccagcgtgtgcgtacgtgaaccttaatatatgtgcaaatggttctgaacagggtggagtactgcttcttgaaaaccccaaaggcgacaatagactggatctgctaaaacttaagtcagtcgtgacgtccatttttggcgtgaaaaataccgagttagccgtgttccacgatgagacagaaattcaaaatcaaacagacttactcagcctctccggcaagactctgtgtgtgacagcaggatcggccccttctctaattaattcctctagcaccctgctttgccagtacatcaatctgcagctgttgaacgccaaaccgcaggagtgcttgatgggcactgtggggacgctgctcctcgagaatcctctgggccaaaatgggctaacgcatcagggcctgctctacgaggcggcaaaggtgttcgggttgagaagccgcaaactcaaactctttctcaacgagacccaaactcaggaaataaccgaggacataccggtcaagacacttaacatgaagacggtttacgtgagtgtcttgccaaccaccgcggacttctag

SEQ ID NO: 227433 - DNA, 3729 bp, synthetic construct
  misc_feature 1..3729: note = Description of Artificial Sequence: Synthetic coding sequence
  source 1..3729: mol_type = other DNA
atgctgcaacaggtgccagagaatatcaatttcccagcagaggaggaaaagatactcgagttctggacggaatttaactgcttccaagagtgcctcaagcagtcgaagcacaagccaaagtttacattctatgacggccctccttttgctactggcctgccccattatgggcatattctggccggaactataaaggacatcgtgacgcgatatgctcaccaatccggatttcatgtggaccggcgtttcggatgggactgccacggcctgcccgtggagtatgagatagacaaaaccctggggatccggggaccagaagacgtagcaaaaatgggcattacggaatacaataatcagtgtcgggctatcgtcatgcggtacagcgcggaatggaagagcaccgtcagccgacttggtaggtggatcgacttcgacaatgattataaaactctttaccctcaattcatggaaagcgtgtggtgggtcttcaagcagctgtacgacaagggcctggtatataggggcgtgaaggttatgcccttcagtactgcgtgtaataccccactcagtaacttcgaatcgcaccagaactacaaggatgtgcaggacccatccgtgtttgtgactttccccctggaagaggacgagacggtttccttggtggcttggaccactacaccctggaccctgccttctaatctggccgtgtgcgtgaaccccgaaatgcaatacgtcaagatcaaggatgttgccagaggacgactgttgattttaatggaagccaggctgagcgccctgtataaactagagtctgactacgaaatcttagaacgctttcccggagcctacctgaagggcaagaaatataggcccctctttgactacttcctcaaatgtaaggagaacggggcttttaccgttcttgtggataactatgtgaaggaagaggaaggaaccggtgtggttcatcaggcgccttacttcggagccgaggactatcgggtgtgcatggatttcaacattatccgtaaagattctctgccggtctgcccagtcgatgcgtctggctgcttcaccaccgaggtgactgattttgctggtcaatatgtcaaggatgccgacaagtccataattcgaacattaaaggaacaaggtcgattgttggtcgccaccacttttacccattcttacccattctgctggcgtagtgatacacctctcatctacaaagccgtcccttcctggtttgtccgcgtcgagaatatggttgaccagcttttgaggaataacgatctgtgttattgggtccccgagctggttcgggagaaaagattcggaaattggttgaaggatgcacgcgattggactatatctaggaaccggtactggggaactcccatccctttgtgggtgtccgacgacttcgaagaggtggtgtgtatcggttccgtggccgaactggaggaactctctggggctaaaataagcgatctgcatagggagtctgtcgatcatctgacaatccccagccggtgcggcaaagggtccttgcatagaatatctgaggtgtttgattgttggtttgagagcgggtcaatgccttatgctcaggttcactacccattcgagaacaaacgggagttcgaagatgcctttcccgcagactttatcgcagaaggcatcgaccagactcgcggttggttctacacactactcgtgttggcaaccgcgctattcggccaaccccctttcaaaaatgtcatcgtcaacgggcttgtattggctagcgatgggcaaaagatgtctaagagaaagaaaaactatcccgatccagtctccatcattcagaaatatggggctgacgccctgcgactgtatctgattaattctccggtggttagggccgaaaacttgcggttcaaagaggaaggcgttagggacgtgttgaaggacgtgctcctcccttggtacaacgcttatcgttttctcatccagaacgtgctgcgcctgcagaaggaggaggagatagagttcctctacaatgaaaataccgtgagagagtccccaaatattacagaccggtggattctgtcatttatgcagtctctgatcggattcttcgaaaccgaaatggctgcctaccggctttacaccgtggtccctcgcttagtaaagtttgtggacattctcaccaactggtacgttcgaatgaataggcgtcggctgaaaggagaaaacggtatggaggactgtgtgatggcattagaaacactgtttagtgtactcctctcactgtgtagactgatggccccatatacacctttcctcaccgagctcatgtaccagaacttgaaggtgctcatcgatcccgtgagtgtgcaagataaagatacactgtcaatccactatctgatgctgcccagagttcgagaagaactgatcgataagaagacggagtctgcagtttcccagatgcagagtgttatcgagctgggccgtgtgattagggacaggaaaacgattccaatcaagtaccctttaaaggagattgtggtgattcaccaggatcctgaggcactcaaagatatcaagagtctggaaaagtacattatagaagaactgaatgtaaggaaggtgaccctgtcgacagacaagaacaaatacgggatcagactgcgagccgaacctgaccatatggtgctagggaagcggcttaagggcgctttcaaggcggtgatgaccagtattaaacagctcagtagcgaggaattggagcagttccagaagacagggacaatcgtggtggagggccacgagctgcatgacgaggacattagactaatgtacacattcgatcaggccacaggtggtactgcccagtttgaagctcatagcgacgcgcaggccctagtgcttcttgatgtgacccccgaccagagcatggtggacgaaggaatggcgagggaggtaattaatcggatacaaaaactgcgcaagaagtgcaacctggtgcccacagacgagatcaccgtgtactataaggccaagtcagagggtacctaccttaactcggtgatcgaaagccacacagaatttattttcaccacaatcaaggcaccgttgaagccatatcccgtttctccgtctgacaaagtccttatccaggaaaagacacaacttaaggggtccgaactcgaaatcacactgacccggggaagctctcttccagggccagcgtgcgcttacgttaatcttaatatatgcgcaaatggctccgagcaaggcggtgtcctgctgctggaaaaccctaagggggacaatcggcttgatttgctcaaactgaaatcagtggtgacctctatttttggtgttaagaatacagagctggccgtgtttcacgatgagacggagattcagaatcagacagacctcctttctctgagtggtaagaccctatgtgtaaccgcaggctcagctccttctttgatcaattcctccagcacccttctgtgccagtacatcaacttacaactgcttaatgctaaaccacaagaatgcttaatgggcactgtgggcacgcttttgctggaaaatcccctcggacagaatgggctgactcatcagggtctcctgtacgaggccgctaaggtcttcggcttacgcagcaggaagctgaaattattcctgaatgaaacacagacacaggaaatcactgaagatatcccctag

SEQ ID NO: 227434 - DNA, 993 bp, synthetic construct
  misc_feature 1..993: note = Description of Artificial Sequence: Synthetic coding sequence
  source 1..993: mol_type = other DNA
atgctccagcaggtgcccgagaacatcaactttcccgctgaggaggagaagatccttgagttctggaccgagtttaattgttttcaggagtgcctgaaacaaagcaagcacaagccaaaatttactttctacgatggaccaccctttgcaaccggcttgcctcattacggtcatattttggccggaaccattaaggacattgtcactaggtacgctcaccagagcggcttccacgtggaccggcgattcggttgggattgtcacggtctaccagtcgaatacgagatcgacaaaaccttgggtatccgcggtcctgaggatgttgcgaagatggggatcactgaatataataaccagtgtcgcgctattgtcatgcgctactcggccgagtggaagtcgaccgtgagcaggctaggacgctggatagacttcgataacgattacaagactttataccctcagttcatggagtctgtgtggtgggttttcaagcagctatacgacaaaggcttggtatacaggggagtgaaagtaatgcctttctccaccgcctgtaataccccgctgagcaattttgagagtcatcagaactataaagacgtccaggatccttccgtgtttgtaacgttccccctcgaggaagacgaaacggtgtcgctggttgcctggacaacaacaccttggaccctgccatcaaacctggccgtgtgcgtgaacccagagatgcagtacgtgaagattaaggacgtggctaggggcaggctacttatactgatggaggctaggttatcagcactgtacaagttggagtctgattatgaaatactcgagcgtttccctggggcttacctgaaaggaaagaagtaccgccctctatttgattactttctgaagtgtaaggaaaatggggcttttacagtcctggtggacaattatgtgaaagaggaagagggcacaggtgtggttcatcaggcgccatatttcggggcatag

SEQ ID NO: 227435 - DNA, 513 bp, synthetic construct
  misc_feature 1..513: note = Description of Artificial Sequence: Synthetic coding sequence
  source 1..513: mol_type = other DNA
atggcaccctatacaccattcctcactgaactgatgtaccagaacttaaaagtcttaattgacccggtctccgtacaggacaaagacaccctgtctatacactatctaatgttgcctagagtgcgtgaagaactcatagataagaagacggagagcgctgtgagtcagatgcagtctgtcattgaactgggaagggtaatccgcgatagaaaaactatcccaatcaaactcaaagggagtgagctggagattaccttgacccgcggaagcagccttccaggccctgcctgcgcctatgtaaatctcaacatctgcgcaaatggaagtgagcagggcggagttctgctcctggagaaccccaagggagacaataggcttgatctcctgaaactcaagtctgtcgtcacatccatctttggcgtgaagaatactgagctcgccgtgttccacgacgagactgagatccaaaaccagacggatctgctgagcttatccggcaaaaccctttgctag

SEQ ID NO: 227436 - DNA, 3789 bp, synthetic construct
  misc_feature 1..3789: note = Description of Artificial Sequence: Synthetic coding sequence
  source 1..3789: mol_type = other DNA
atgctgcagcaggtccctgaaaatatcaatttccccgcagaagaggaaaaaatcctggagttttggacagaatttaattgtttccaagagtgcttaaagcagagcaagcataagcccaaattcaccttctatgatgggcctccatttgcgactggcctcccgcactatgggcacatacttgcaggaaccattaaagatatcgtgaccaggtatgcccaccagtccggattccacgtggacaggaggtttggctgggattgccacgggcttccagttgagtatgaaatcgacaagacattaggaatacggggacctgaagacgtggccaaaatgggaataacagaatataataatcaatgcagagccattgtgatgcggtattcggccgagtggaagagtaccgtaagccgactcggaaggtggattgatttcgataacgattacaaaaccctgtaccctcaattcatggagtcggtctggtgggtgttcaagcagctatatgacaagggtctggtctacagaggagtgaaagtgatgccgttttcaacagcgtgcaatacccccctttccaacttcgagagccaccagaactataaggatgtgcaggatcccagcgtcttcgttacttttcccctcgaggaggacgaaacagtctctcttgttgcgtggacaaccacgccttggaccctgccgtccaacttagcggtctgcgtcaaccctgagatgcaatacgtgaaaatcaaggacgtcgctagaggcaggttgttgattttaatggaagctagactttccgctttgtacaagctcgagtctgactatgagattctggagcgatttcctggtgcgtatctgaagggaaaaaagtaccggccactgtttgattatttcctgaagtgcaaagagaacggagccttcaccgtgctggtggataattatgtgaaggaggaggaggggaccggggtggttcatcaggctccgtactttggagctgaggattatagagtgtgcatggattttaatattatccgcaaggactcccttcctgtgtgcccagtagatgcctccggctgtttcaccacagaagtcactgacttcgctggacaatatgttaaagacgccgacaaatctatcatcaggacattgaaggagcagggcaggctgttagtagcaacaaccttcacacactcctacccattctgttggcgctccgacactccactcatctacaaagccgtccccagttggtttgtgcgagttgaaaacatggtggatcaattgctcagaaataacgacctgtgctactgggttcccgagctggtgcgagagaaacggtttggcaattggttgaaagatgcaagagattggacgatctctagaaacagatactggggtacgcccattcctctttgggtcagcgatgacttcgaagaagttgtttgtatcggcagtgtcgccgagctggaagagctgtctggtgcaaagatttcagacctccatagggagtctgtggaccacctcacaatcccttcacgatgtggcaaaggaagcttgcaccgaataagtgaggtgtttgactgctggtttgagtccgggtctatgccctatgcccaggttcactatcccttcgagaacaaaagagagtttgaagacgcttttccagccgactttatcgccgaaggcattgaccaaactcgaggatggttttacactttgctggtgcttgccacagccctgttcgggcagccacccttcaagaacgtcattgtgaatggccttgttctggcttccgacggtcagaaaatgtccaagaggaaaaagaattatccggacccagtgtctattatccagaaatatggcgctgatgctctcaggctttatctgattaattcccccgtggtgcgcgctgagaatctaagattcaaagaggaaggagtgagggatgtcctcaaggatgtgctgctgccgtggtataatgcctaccggttcttgattcagaatgtgctaagactgcagaaagaggaggaaatcgagtttttgtataacgagaatactgtccgcgaaagcccgaacattacggatcggtggatcctctctttcatgcagagccttataggattttttgaaactgagatggcagcctatcgattgtacacggttgtccccaggctagttaagttcgtggatatcttgaccaattggtacgtcaggatgaatcgtcgcaggttgaagggtgagaacggcatggaagactgcgtaatggctctcgagacactcttctccgtcctgctgtcattgtgtcgtctgatggctccttacacaccctttctgaccgaactgatgtaccagaacttgaaggtcctaatagatccggtgtctgtccaagacaaggatacacttagtattcattacctgatgttgccgagagtccgggaagaactgatcgacaagaagacagaatcggcagtgtctcagatgcaatccgtgatcgagctgggcagagtgatccgggatcggaaaacaattccaattaagtatcctctaaaggaaattgtggtaatccaccaggacccagaagcactgaaggacatcaagtcccttgaaaaatatattatagaagagttgaacgtcaggaaggtgactctatccacagacaagaacaaatacgggatcagactgagagccgagcctgatcacatggttcttggaaaacggctcaaaggggctttcaaggctgttatgacatctatcaagcagctttcatccgaagaattagagcaattccagaagaccggcaccattgttgtggagggtcatgaactgcacgatgaggatattagactgatgtacacattcgaccaagcaacagggggaacagcccaatttgaagcacattctgacgctcaggcgctggtacttctggatgtcacccctgaccagtccatggttgatgagggaatggcccgtgaggtgattaaccggatccagaaactgagaaaaaaatgtaacctggtgcccaccgatgaaattaccgtctattacaaggccaagagcgaggggacctacctcaactctgtaatcgaatcccacactgaattcatcttcaccaccatcaaagcaccgctgaagccatacccggtgtctccgtctgataaggtgctgatccaggaaaaaacccagcttaagggttcggagttggagatcaccttaacaagagggagctccctgccaggccctgcttgcgcttatgtcaatttaaatatttgtgccaacgggtctgagcagggcggtgtactactgcttgagaatcccaagggcgataaccggctggacctgctcaagctaaaatcagtcgtgactagcatattcggagtgaagaacactgagctcgcggtgttccatgacgaaactgaaatccagaatcagacagacctcctttccttgtctggtaagacactgtgtgttactgctggatccgcccctagcctgatcaattcctcctcaaccctgttgtgccagtacatcaacctccaactgctcaatgccaaaccccaggagtgcctgatgggcaccgtggggacactccttctggagaatcccctcggccaaaatggactgacacatcaaggactgctctacgaagctgcaaaagtgttcgggctgaggagtcgcaaactgaagctattcctgaacgagacccaaacccaagagatcacagaagatattcctgtcaagacacttaatatgaagacagtctacgtctccgtgctcccgaccactgccgatttctag

SEQ ID NO: 227437 - DNA, 3459 bp, synthetic construct
  misc_feature 1..3459: note = Description of Artificial Sequence: Synthetic coding sequence
  source 1..3459: mol_type = other DNA
atggggatcactgagtataacaaccaatgccgggcaatagtgatgcgatactctgctgagtggaaaagtaccgtcagcagactggggaggtggatcgacttcgacaatgattacaagacattgtacccgcaattcatggaatctgtgtggtgggtgtttaagcagttatatgataaagggctcgtctaccgcggagtgaaagtcatgcccttcagtacagcctgtaacacccctctgagcaactttgagtcccatcagaattacaaggatgtgcaggacccgagtgtctttgtcactttcccccttgaggaagacgagaccgtgtcactcgtggcttggaccacaacaccttggacactgccgagcaatctggccgtttgtgtcaacccagaaatgcagtatgtgaagatcaaggacgtggctaggggaagactcctcatcctcatggaggctcgactatcggccctgtataagttggagtctgattatgaaatcctggaaaggttcccaggagcctatttgaaaggcaaaaaatacaggcctctgtttgactactttttaaagtgtaaggaaaacggggcatttaccgtgttagtagataactacgtgaaagaagaggaaggcactggagtagttcaccaagcgccatacttcggcgcagaggattacagagtttgcatggattttaatatcatccgaaaggactctcttcccgtatgccctgtggacgcaagcgggtgctttactaccgaagttaccgacttcgccggacaatacgtaaaagatgctgacaagtccataattcgcacactgaaagagcagggcaggctgctcgttgccacgacctttacacattcttacccgttttgctggcgcagcgacactcctctgatatacaaagcagtgccctcctggttcgtgcgtgtggagaacatggtggaccagctgctgaggaataatgacctttgctactgggtacccgagctggtgcgggagaagcgatttggaaactggcttaaggatgctcgagattggactatctctcggaacagatactggggaactcctatcccgctctgggtgagtgacgacttcgaggaggtcgtttgtatcggtagcgtggcggaactcgaggagctgtcgggcgcaaagatctccgatcttcatagagagagtgtcgaccacttgacgattccatcgcgctgcgggaagggatctttacatcgaataagcgaggtgttcgactgctggtttgaaagtggctccatgccctacgcccaggtgcactatcctttcgagaacaaaagggagttcgaggatgcttttccagcagatttcatcgccgagggcatcgaccagacacgcggatggttctacaccctcttagtcttagccaccgccttgttcggacaaccacccttcaagaatgtgatcgtcaatggcctggtcctggcatccgacggccagaaaatgtcaaagcgcaaaaagaactaccccgaccctgtatcgatcattcagaaatacggcgctgacgcgctgagactatatttaatcaacagtccagtggtgcgggctgaaaacctcagattcaaggaggagggggtgagggatgttctgaaagatgttctgttaccatggtataatgcgtacaggttcctgatccagaacgtcttgcggcttcagaaggaggaggagatagaattcctgtataatgaaaacaccgtccgggaatcacctaacatcaccgaccggtggattctctctttcatgcaatccctaatcgggttcttcgagacagaaatggcggcttaccgtttgtacactgtagttccaagattagtcaaattcgttgacatcctgacaaactggtacgtgcggatgaaccgcaggaggctgaaaggagagaacggtatggaggattgtgttatggccctggaaactctgttctctgtactcctgagcctgtgccgcctgatggccccatatacccccttcctgactgagctgatgtatcagaacctgaaagtgttgatcgatcccgtctcagtccaggataaggacacccttagcatccactaccttatgctgcctcgagttcgtgaagagctcatcgacaagaagacagagtctgcggtgtcacaaatgcagagcgtcatcgaactaggcagggtcatacgagataggaaaactatccccattaaatatccactgaaggagatcgtggtcattcaccaggatcctgaagcactcaaagatatcaagagcttagagaagtatatcatcgaggagctgaatgttaggaaagtcacactttcaaccgataaaaataaatatgggatcaggctgagagcagagcctgaccacatggtgctcgggaaaaggcttaagggcgcttttaaggcagtgatgacgtcaatcaagcagttgagctccgaagagctagagcagttccagaagactgggaccattgtggtagaggggcatgagctgcacgacgaggacattcgcttaatgtatacattcgaccaggccactggtgggaccgcacagtttgaggctcacagcgatgcccaggccttggtcctcctggacgtaacacccgatcagtccatggtggacgaaggcatggccagggaggtgataaatcggatccagaagctgcgtaagaaatgcaacctcgtccctactgatgagatcacagtgtactacaaagcaaagagcgagggaacttacctaaattccgtgattgaatcccatactgaattcatctttactacgataaaagcaccactaaagccctacccagtgtccccttccgataaggttctgatccaggaaaagactcagctcaaagggtctgaattagaaatcacgctgactcgcggaagcagtctgcctgggccagcttgcgcctacgtgaacctcaacatctgcgcaaatggatcagaacagggcggagtgctcttgctggagaaccccaaaggcgacaataggctcgacctgttgaagctgaagagcgttgtgacctcaatttttggggtgaaaaacaccgagttggcggtatttcatgacgagactgaaattcagaatcagacagacctgctttctcttagcggcaagactctgtgcgtgacagcagggagcgccccatcacttatcaatagttctagcacactcttatgtcagtatatcaacctgcaacttttgaatgcgaaaccacaggaatgtctgatgggcactgtgggtacattgctgctggaaaaccccttaggccagaacgggctgacccaccaaggccttttatatgaagccgcaaaagtgttcgggctgcggtctcggaaacttaagcttttcctaaacgagacgcagacccaggaaataaccgaagacatcccagtcaaaaccctcaacatgaagactgtgtacgtttcagtgttacctacaaccgccgacttttag

SEQ ID NO: 227438 - DNA, 750 bp, synthetic construct
  misc_feature 1..750: note = Description of Artificial Sequence: Synthetic coding sequence
  source 1..750: mol_type = other DNA
atggccccttataccccattcctgactgagttgatgtaccagaatctgaaggtgctcatagaccctgtgtccgtgcaggacaaagacacactaagcatccactacctcatgcttcctagggtgcgagaggaactaattgataagaaaaccgagagtgctgtgtcccagatgcagtcagtgatcgaactgggacgcgtgatcagggaccgcaaaactattcctattaaatacccactgaaagagatcgtggtcatccaccaggaccccgaagcattgaaagacattaagagcctggagaagtatataatcgaggaacttaacgttcgcaaagttacgctgagcaccgacaagaataagtacggaattagacttcgagccgaacctgaccacatggtgttggggaagcggctcaaaggtgcctttaaagcagtcatgacaagtatcaagcaacttagttccgaagagttggaacagtttcaaaagactggaactattgttgttgaggggcacgagttacatgacgaggacattaggctcatgtatacattcgaccaggccactggaggaacagctcaattcgaagcacacagcgatgcccaggctcttgtgctcctggacgtgacacccgaccagagtatggtagacgagggtatggccagggaggtgataaatcgaattcagaagctaagaaaaaagtgtaacctcgtccccactgacgaaattactgtatattataaggctaagtcgtag

SEQ ID NO: 227439 - DNA, 513 bp, synthetic construct
  misc_feature 1..513: note = Description of Artificial Sequence: Synthetic coding sequence
  source 1..513: mol_type = other DNA
atggcaccctacacgccctttctgactgagctgatgtatcaaaacctgaaggtactgatcgaccctgtatctgtgcaagacaaggatacactgtcgatccattatctaatgttgccaagagtgagggaagagcttatagataaaaagaccgaaagtgcagtcagccaaatgcaatccgtgatcgagctgggcagagtgatcagggaccggaagacaatacccatcaagttgaaaggttcagagcttgaaatcacccttacaagggggagcagtctccctggccctgcctgcgcttatgtcaatctgaacatctgtgctaatggcagcgagcagggcggtgttctgcttctcgagaaccctaagggtgacaatcgactggatctacttaagctaaagagtgtagtgacctctatcttcggcgtcaaaaacactgagcttgccgtgtttcacgacgagactgagattcagaaccagaccgacctgctatctctgtctggcaagacactgtgttag

SEQ ID NO: 227440 - DNA, 816 bp, synthetic construct
  misc_feature 1..816: note = Description of Artificial Sequence: Synthetic coding sequence
  source 1..816: mol_type = other DNA
atgatggtacttctgctccagctggattgcctcactatggacatttacctccgcgacaaggataccctgtccattcattatctcatgcttccacgagtgagggaagagctgatcgacaagaaaacagagagcgccgtttctcagatgcagtcagttatcgagttaggacgcgtgattcgcgataggaaaacaatccccattaagctgaaagggtcggaattggagatcacactgactagaggcagcagccttcccggaccagcttgcgcgtatgtaaacctcaacatctgtgccaatggctccgaacaggggggagtactgttactagagaatcctaagggagataacaggctcgacctcctcaagctgaaaagcgtcgtgacctccatatttggggttaagaatacggaactcgcagtgttccacgacgagaccgagatccagaaccagaccgatctactcagtttaagtgggaagactctctgcgtcaccgcgggttcagctccctctctcatcaacagcagctcaactcttctctgtcagtacatcaacctgcagctactcaatgccaagccgcaggagtgtctgatgggaacagtggggactcttttgttggaaaaccctctgggtcaaaacgggttgactcatcagggcctcctgtacgaggccgctaaagtgtttggcctacgtagccgcaagcttaaacttttcctgaatgaaacccagacacaagagatcacagaggacattcctgtgaagaccttgaatatgaaaactgtctacgttagcgtcctccccactactgcagatttctag

SEQ ID NO: 227441 - DNA, 3039 bp, synthetic construct
  misc_feature 1..3039: note = Description of Artificial Sequence: Synthetic coding sequence
  source 1..3039: mol_type = other DNA
atgcgttgggggctgcggccacgcggacctggtgcagccgctctcgccactgcacgttctctgtgggggactcctaggcttccctgcagcccgggatggcaaggtgcaaccaagaggctccttgttcggtcagtgtccggagcatccaaccatcaacctaattccaatagcggtagatatagggataccgtccttttgccgcagacgtctttccccatgaagttgctggggaggcagcaaccagacacagagttggaaattcagcagaagtgcggcttctccgagctgtattcttggcagcgcgagagaaaagttaagactgagttttgtttgcacgacgggccaccatatgcaaatggagacccacacgtcggccacgcccttaacaagattctgaaggatattgcgaacaggtttcatatgatgaatggcagtaagattcattttgttcccggatgggactgccacggattgcccattgagataaaggtgttgtctgagttaggcagagaagcacagaatctgtctgcaatggagatacggaaaaaggcgagatctttcgctaaggctgctattgagaagcagaaatctgcctttatcaggtggggcatcatggcggattggaacaactgttattacacattcgatggaaagtacgaggctaaacaactcaggaccttctatcagatgtacgataaagggctggtttatcgaagctataaacccgtgttttggagtccgtcgtctcgcactgccctggccgaagctgagctggagtacaatccagagcatgtgagccgctccatctatgtgaagttcccgctgcttaagccaagcccgaaactggcatctctgattgacggtagttcccccgtgtctattctagtgtggacaactcaaccgtggactattcccgctaatgaggccgtttgttatatgcccgagagcaaatatgcggttgtcaaatgttcaaagtccggggacctctacgtcctagctgcagacaaggtcgcatcagttgcttccacactggagaccacattcgagaccatcagcactctgagcggcgttgacctggaaaatggcacatgttcccatccactaataccagataaggcttcaccattgctacctgccaaccatgtcaccatggctaagggaactggactcgtccacaccgccccagcacacggcatggaggattatggtgtggcctctcaacataatctacccatggactgcctggtcgacgaagacggcgtcttcaccgatgtcgctggtccagaactccagaacaaggccgtgctcgaggaagggaccgatgttgtgattaagatgctgcagactgctaaaaatctcctgaaggaggagaagcttgtgcatagctatccttacgattggagaacgaaaaaaccagtggttatccgcgcatccaagcagtggttcatcaacataaccgatattaagaccgccgctaaagaactattaaagaaagtgaagttcattcccggatccgcactcaacggtatggtggagatgatggacagaagaccgtattggtgtatttcaaggcaacgggtatggggtgtcccaattccagtcttccaccacaaaacaaaggatgagtacttgattaattctcagacaaccgagcacatagtgaagttggtggagcaacacgggtcggatatctggtggacattgccaccagagcagctcttgcctaaggaggtattaagtgaagtcggcggtccagatgccctggaatatgtgcctgggcaagatatactcgacatctggtttgattcaggaacctcctggagctacgtgctcccaggtcccgaccagcgggctgatctgtatctggaggggaaggatcagctgggcggttggtttcaaagtagcctgcttacatccgttgctgctcggaagcgagcaccttacaaaacagtaatagtacacgggtttactctcggcgagaagggcgaaaaaatgagcaaatccctggggaatgttattcatcccgatgtggtcgttaacggaggccaggatcagagcaaagaacccccttatggtgcagacgtgctcaggtggtgggtggcagactctaacgtgttcacggaggttgcgattggacccagtgttctcaacgctgcaagggatgacatttcgaaactgagaaatacactgcgatttctgctcgggaacgtcgcagatttcaaccctgagacagactccatccctgtcaacgacatgtacgtaatcgaccagtacatgctgcacctcctgcaggacctggctaacaaaatcacagagctgtataagcagtatgatttcggcaaggtcgttaggttgctgagaacgttttacactcgcgagctttctaacttttacttttcaatcattaaggatcgcctgtattgtgaaaaagaaaatgatcctaaaagacgtagctgccagaccgccctggtggagattctggacgtcatcgtgcgctcattcgcaccaatcctgcctcacctggcagaagaggtgttccagcatataccctacatcaaagagccaaagagcgtgttcagaacgggttggatttcaacttcttccatttggaagaagccaggcctcgaagaagccgtggaaagtgcttgcgctatgagagattcgttcctgggttccatacccggtaaaaatgctgcggagtataaagtcattacagtgatagaacctggtctcctcttcgagatcatcgagatgctccagtcagaagagacttcaagtactagtcagctgaacgagcttatgatggcctcagagagcactcttctcgcacaggagccacgtgaaatgacggccgatgttatcgaacttaaggggaaattcctcatcaatctggagggaggagatattcgcgaagaatcttcatataaggtgatcgtgatgccaactacgaaagaaaagtgtccacgctgttggaaatatacagccgagagcagtgacacattgtgccctcggtgtgcggaggtggtttcagggaagtag

SEQ ID NO: 227442 - DNA, 2823 bp, synthetic construct
  misc_feature 1..2823: note = Description of Artificial Sequence: Synthetic coding sequence
  source 1..2823: mol_type = other DNA
atgaagttacttggtaggcagcagccagacaccgaactggagatccagcagaaatgcggctttagcgaactttatagctggcagagggagcgcaaagtgaagaccgagttttgtctgcacgatggcccaccatacgctaacggggacccacatgtggggcatgctttaaataagatattaaaagacatcgcgaaccgatttcacatgatgaacggctccaagatacacttcgtgcccggatgggattgccacggtctgcctattgagatcaaggtgctcagcgagctcggaagggaagcccagaatttatcggctatggagataaggaaaaaggcaagaagctttgccaaggcggctattgaaaagcaaaagtctgctttcattaggtggggaataatggcggattggaacaattgttactatacttttgacggaaagtacgaggcgaagcagttaagaactttctaccagatgtatgataagggcctggtgtatcgcagttacaagcctgtgttctggtctccatcaagcaggacagctctggctgaggcagaactggagtacaaccctgagcatgtgtcccgtagtatctatgttaagtttcccctgctcaaaccatccccaaagctggctagtctgatcgacggaagtagccctgtgtccattttagtgtggaccacccaaccttggaccatcccagcgaacgaagccgtatgctatatgcctgaaagcaagtatgccgttgttaagtgtagcaaatccggggacctgtacgtccttgctgcagataaagttgcctcagtggctagcactttagaaaccacttttgagacaatcagcactttgagtggcgtagatctggagaatgggacatgcagtcaccccttgatcccggacaaggcctcccctctgctgcccgctaaccacgtgacaatggcgaagggcaccgggttagtccacactgccccagctcatggcatggaggactatggcgtggctagccaacacaacctcccaatggattgcctggtcgatgaagatggtgtttttaccgatgttgcgggacctgaactgcagaacaaagcagttcttgaggaaggcaccgatgtcgtgataaagatgctccagaccgcaaaaaaccttctgaaggaggagaaattggtgcactcctatccctacgactggcgcaccaaaaagcctgtggttattcgggctagcaaacagtggttcatcaacattactgacatcaaaacagccgctaaagaactgctgaagaaggttaagtttatccccggatccgctctcaacggcatggtggaaatgatggatcgcaggccttattggtgcataagtagacagcgagtgtggggtgttcctatccccgtctttcatcataagactaaagacgagtacctgattaactctcaaacaactgagcatattgttaagcttgtagagcagcatggttcagacatatggtggactctccccccagagcaactattacctaaagaagtactgagcgaagtggggggtcctgatgccttagagtatgtaccaggacaggacatcctggacatctggttcgattctggcacgagctggtcgtacgtgctccccggacccgatcagcgcgcagacctctacctggaaggaaaggatcagctcggcggatggtttcagagcagtctcctgaccagcgtggctgctagaaaacgggctccgtacaagaccgttatcgtccacgggttcacgctgggcgagaaaggcgagaagatgagcaaatccctgggtaatgtgatacatcctgacgtagtggtcaacggtggtcaggaccaatctaaggagcctccatacggggcagacgtcttacgctggtgggtcgccgactcaaacgtctttacagaggtcgctataggacccagcgttctgaacgccgctcgcgacgacatctccaaacttaggaatacactccggtttctcctgggcaatgtcgcagactttaaccctgaaactgacagcatacctgtcaacgacatgtatgtgatcgaccagtacatgctgcatctcctgcaagacctggccaataaaatcaccgaactctacaaacagtacgatttcggcaaggtcgtccggctgctgagaaccttctacactagagagttatcaaacttctacttctccataatcaaggacaggttgtattgcgagaaagagaatgatcctaaacggagatcctgccagacggccctggtcgaaattctcgacgtgatagttaggtcgtttgctccaatccttccacacttggcagaggaggtttttcaacacatcccttatataaaagaacctaagagcgtctttaggacaggatggatctccactagtagcatctggaagaagcccggacttgaagaggccgtagagtcagcctgtgcgatgagagacagcttcctggggagcattcctggcaagaatgcagccgagtacaaggtgatcaccgtgatcgagcccggactgctgtttgagatcattgaaatgctccagtctgaagagactagtagtacctcccagttaaacgagctgatgatggcatcagagagcactctgctggcccaggagcctagggaaatgacagcagacgtgatcgagttaaagggtaaattcctcatcaaccttgagggcggtgacatccgcgaagagagctcttacaaggtcatcgtgatgcctactactaaagaaaaatgccctagatgttggaaatacacagccgagagcagcgacaccctgtgtccgcgatgtgcggaggtagtgtccgggaagtag

SEQ ID NO: 227443 - DNA, 855 bp, synthetic construct
  misc_feature 1..855: note = Description of Artificial Sequence: Synthetic coding sequence
  source 1..855: mol_type = other DNA
atggctggctgcgccgctcgagcacccccaggctctgaggctcgcctatctctggcgacctttctgctgggcgcttcggtgctcgccctccccttattgacccgtgctgggttacagggtcgcactggcctggctctatatgtggcaggactgaacgccttactcctgctgctctaccgccctccccgttaccagatcgctatccgggcttgctttctggggttcgtcttcggatgcggaacactgcttagcttctcccagtccagttggagtcacttcggatggtacatgtgctctttatctctctttcattacagcgaatatctagtaacggctgtgaacaatccgaagagtctgtctctggactctttcctgctgaaccattcactggaatatactgtagctgcgttgtcgtcctggctggagtttactttagaaaacatcttctggcctgaactgaagcaaattacatggttgagtgtcacgggcctgctcatggtcgtgttcggagagtgtttgagaaaggccgcaatgttcaccgcaggaagcaactttaatcacgtggtccagaacgagaagagcgatacacatacactggtgacatccggagtgtacgcttggtttagacacccttcctacgtcggatggttctactggagcatcggtacccaagtaatgctgtgcaatcctatttgtggcgtgagttatgctctgactgtctggcggttctttcgtgacaggaccgaagaggaagagatctcactaatccactttttcggtgaagaatatctggaatataaaaagagagtccctactggcttacctttcataaagggcgttaaggtggacctctag

SEQ ID NO: 227444 - DNA, 351 bp, synthetic construct
  misc_feature 1..351: note = Description of Artificial Sequence: Synthetic coding sequence
  source 1..351: mol_type = other DNA
atggctgggtgcgccgcaagggcacctccaggctccgaagcacggctcagcttggcgactttcctcttgggggctagtgtgctagctctacccttactaacacgcgctggactgcagggacgaaccggccttgcactgtacgtcgcgggactgaatgccttgctacttctgctttataggccacctaggtaccagatcgccataagggcttgcttcctaggcttcgtttttgggtgtgggactctcctcagtttctcacaaagcagttggtcccacttcggttggtcccatttggttcatccacatagccattgccggatttttccctataccatgatctctgtgccatag

SEQ ID NO: 227445 - DNA, 567 bp, synthetic construct
  misc_feature 1..567: note = Description of Artificial Sequence: Synthetic coding sequence
  source 1..567: mol_type = other DNA
atgtgttctttgtcgttattccactattccgaatacttggttactgctgtcaataacccaaagtctctcagcctggactccttcttgctgaaccacagtctggagtacaccgtggcagccttatcctcctggttggaattcacactcgagaatatcttttggcccgaactgaagcagattacatggctctctgtgactgggctcctaatggtggtttttggcgaatgcctcaggaaggctgccatgttcactgcaggatccaacttcaaccacgtcgtccagaatgaaaaaagcgacactcacaccctggtgacttcaggagtctatgcctggttcaggcacccttcctatgtgggctggttctattggagtatagggacccaggtgatgctctgcaatcctatttgcggcgtttcctatgcactaactgtgtggcggttttttagagacaggactgaggaggaagagatcagcctcatccacttcttcggcgaggagtaccttgaatataagaaacgcgtccctactggcctgccattcatcaagggcgtgaaggttgacctctag

SEQ ID NO: 227446 - DNA, 1272 bp, synthetic construct
  misc_feature 1..1272: note = Description of Artificial Sequence: Synthetic coding sequence
  source 1..1272: mol_type = other DNA
atggcaacagctacacgcctgttggggtggagagtcgcttcatggagactacgcccacctttggctggctttgtgtctcagcgtgcacacagccttcttcccgtggacgacgcgattaatggcttgtcagaagaacagcggcaactgagacagaccatggctaagttcctgcaggagcatctagctccgaaggctcaggaaatcgatcgatccaacgagtttaaaaatctgagggagttctggaaacagctcggtaatcttggagtgctgggaataacagctcccgtacaatatggcggttctggattagggtatctggaacacgtcttggtcatggaggaaatttcccgagcgagtggagcggttgggttgtcctacggtgcccatagcaatttgtgcatcaatcagctggtccggaacgggaatgaagcccagaaggagaaatacctaccaaaactgattagtggcgagtacataggcgcattagctatgtccgagcctaatgctggttccgatgttgtgagcatgaagttgaaagcagagaaaaaaggaaaccactacatcttgaacggcaataagttctggatcacaaacggtccagacgctgacgtgttgattgtttacgcaaaaacagacctcgcggctgtaccggcaagccgcggtatcacagcttttatagtggagaagggaatgcccggatttagcactagcaaaaaactggataagttaggtatgaggggatcgaacacatgcgagttgatttttgaagactgcaagatcccagcagctaatatccttgggcatgagaataagggagtttacgtgttaatgtccggtctggacctagagagattggtgttggctggtggcccactggggctgatgcaggcagtgttagaccacacgataccctatttgcacgtcagagaggcattcggacagaaaatcggtcactttcagctgatgcaggggaaaatggccgatatgtataccaggctcatggcctgccgccaatatgtctataacgttgctaaggcttgtgatgaggggcactgtaccgctaaagattgtgccggtgtaatattatacagcgccgaatgcgccacacaagtggccctagatggaatccagtgcttcggaggaaacggctacattaacgacttcccaatgggacgcttcctgcgcgacgccaagctatatgaaatcggagccggtacttcggaagtgcggaggcttgtgataggacgtgctttcaacgctgactttcattag

SEQ ID NO: 227447 - DNA, 1191 bp, synthetic construct
  misc_feature 1..1191: note = Description of Artificial Sequence: Synthetic coding sequence
  source 1..1191: mol_type = other DNA
atggctgagatggctaccgctaccaggctgctgggatggcgggttgcttcgtggcgccttcgtccaccactcgccggatttgtgagccagcgggctcactctctgctgccggtagatgacgccattaacggtctgagcgaggagcagcgacaggagttctggaagcagctgggcaaccttggtgttctgggaatcactgcacccgtgcagtatggaggtagcggcctgggctatcttgagcacgtcctggtgatggaagagatcagcagagcctcgggtgccgtgggcctgtcatacggcgctcacagtaatctgtgtattaatcagctggtgcgaaatgggaacgaggctcagaaagaaaagtatctgccaaaactcatctccggggagtatattggcgctctggccatgtccgaacccaacgcaggcagcgatgtggtttctatgaaactgaaagccgagaagaagggcaatcattatatcctgaatggtaataagttttggataacaaacgggccagacgccgacgttctgatcgtgtatgctaagacggacctggcagccgtaccagcctcccgtggcatcactgcatttatagtggagaagggtatgccgggattctccacaagcaagaaactcgataagcttggcatgaggggctcaaatacgtgcgagttgatctttgaggactgcaagatcccagccgctaatatcctaggacatgagaataaaggcgtgtacgtcttaatgtcaggtctggatttggaacgacttgttctggccggagggccactgggtctgatgcaggcagtcctggatcatacgataccttatttgcacgtgagagaagcattcggtcagaagatcggacatttccaactaatgcaaggaaagatggccgatatgtatactaggctcatggcctgtcgtcagtacgtatataatgtggcgaaggcttgcgacgaaggtcattgcactgctaaggactgtgccggtgttatcctatatagcgccgaatgtgctactcaggtggccctagacggaatacagtgttttggaggcaacggatacattaatgattttcccatggggaggtttctgagagatgctaagctctatgagatcggggctggtacctctgaggtgcggcgactggtgattggacgcgctttcaacgctgattttcattag

SEQ ID NO: 227448 - DNA, 1281 bp, synthetic construct
  misc_feature 1..1281: note = Description of Artificial Sequence: Synthetic coding sequence
  source 1..1281: mol_type = other DNA
atggcagagatggcaactgctacaagacttcttggatggagagtggccagttggagactgagacctcctcttgcaggtttcgtgagccagcgagctcatagtctcctccctgtagacgacgctataaatgggttgagtgaggaacagcggcagctgcgccagaccatggctaaattcctacaagaacacctggctccaaaagcccaggagatcgaccggagcaatgaattcaagaaccttagagagttttggaaacagcttgggaatctcggtgtgcttggcatcaccgcacctgtgcagtacggaggaagcggtctcggatacctggagcacgttctcgtgatggaggagatcagcagagcttccggggctgttggactatcttacggcgctcatagtaacttgtgcataaaccagctggtgaggaacggcaacgaggcccagaaagagaagtacctgccaaagttgatttcaggtgagtacataggcgcactcgccatgagtgaacctaacgccggaagcgatgtcgtctcaatgaagctcaaggctgagaaaaagggcaaccactacattttgaacggcaataagttctggatcactaacggtccggacgccgatgtcctcatcgtatacgctaagacagacctggcagctgttccagctagtagagggattaccgcttttatcgtcgagaaaggaatgccaggcttttcaacatctaaaaaactggataagctggggatgcgtggcagcaatacttgtgagctgatatttgaggactgcaaaataccagccgcaaacatcttgggacacgagaataaaggggtctatgtgttaatgagcggcctcgacctggagagacttgtgcttgctggaggccctcttggactcatgcaggccgttctggatcacaccattccatatctgcatgtgcgcgaggctttcggacaaaaaatcggtcattttcagcttatgcaggggaagatggcagacatgtacacacgacttatggcatgcaggcagtacgtgtataatgtggcgaaagcctgtgacgagggtcactgtactgcaaaagactgtgcaggcgtcatactttacagtgcggagtgtgccactcaagtggcccttgacgggattcagtgttttgggggaaatggctatattaatgacttccctatggggaggttccttagagatgctaaattatacgagattggagctgggactagcgaggtgcgaaggttggtaatcggccgtgcctttaatgctgacttccactag

SEQ ID NO: 227449 - DNA, 1716 bp, synthetic construct
  misc_feature 1..1716: note = Description of Artificial Sequence: Synthetic coding sequence
  source 1..1716: mol_type = other DNA
atgagagccctgagggaccgagccggactgctcctgtgtgttctactgctggcggctctgctggaagccgctctcgggttgcccgtgaaaaagcctagactgagaggcccaagaccagggtccctcacaagactcgctgaagtttccgcaagtcctgatcctagacctttaaaggaggaggaagaggcaccacttctcccaaggacccatcttcaagctgaacctcaccaacacggctgttggaccgtaacagagccagccgctatgactcccggtaacgccaccccgcctaggactcctgaggtgactccactacgactagaactgcagaagctacccggactggctaacacaacactgagcacccctaatcctgatactcaggcatctgcatccccagatccgcgacctctcagggaagaagaagaagctcggctcctccccagaactcacttgcaagctgagcttcatcagcacggttgttggactgtcactgagcccgctgcgcttaccccaggcaacgcgactccaccgagaactcaggaagtgacaccattgctgctagagcttcaaaaactgcctgagctggtgcatgcgactctctcaaccccaaacccagacaaccaagtcacaattaaggtcgtcgaggacccccaagctgaggtatctatagacctcctggccgagccctctaatccaccccctcaggatactctgagttggcttccggcactgtggtcatttctgtggggcgactacaagggcgaggagaaagatcgggctccgggtgagaagggggaagaaaaagaggaggatgaggactacccttcagaagacatcgagggcgaggatcaggaggacaaggaggaggacgaagaagaacaagctctgtggtttaatggcactacagataactgggatcagggatggctggcacccggtgactgggtgttcaaagactctgtcagctacgactacgagccccagaaagaatggtctccctggagcccgtgttcgggcaattgctctactgggaagcagcagcggacaagaccctgtggttatggctgtacagccactgagacaagaacttgtgacttgccatcttgcccagggactgaggacaaggacaccctcggattgccctcagaagagtggaaactgttggccaggaacgctacagatatgcatgaccaagatgtggactcctgtgaaaagtggcttaactgcaaatccgattttctgatcaaatatttatctcagatgcttagagatctgcccagctgtccttgtgcgtacccactggaagctatggattctccagttagcctgcaggacgagcaccaagggcgaagcttccggtggcgagatgccagtggccctagagaaaggcttgatatctatcagcccacagctcgtttttgcctccgctccatgctctcgggagagtcaagcactcttgccgcacaacattgttgttacgacgaggactctcgccttctgactcggggaaaaggagccggtatgccaaacctaatttctacggatttttctcctaagttacattttaaattcgatactaccccgtggattctgtgtaagggcgactggtcgcgtctgcatgctgtcctcccaccgaacaatggcagggcgtgcacagataatcccctcgaggaggagtatttggctcagctacaagaggcaaaggaatactag

SEQ ID NO: 227450 - DNA, 1452 bp, synthetic construct
  misc_feature 1..1452: note = Description of Artificial Sequence: Synthetic coding sequence
  source 1..1452: mol_type = other DNA
atgactcctggtaacgcaacccctccccgaacaccagaagtaacccccttgcggctggaactgcaaaagctgccaggactggccaacactacgttgtccacccccaatcccgatacccaggcctcagcctcccctgacccaaggcccctcagagaggaggaagaggccagactgctaccccgtactcacctccaagctgagttgcaccagcatggatgctggaccgttactgagccagccgcacttaccccgggaaatgctacaccgccacgaacccaagaggttactcctttgctgctcgaattgcaaaagctgcctgaactcgtgcacgccacactcagcacacccaacccagataaccaggtcacaataaaggtggtggaggatcctcaggccgaggtttcaatagatttactggcagaaccctccaaccctcccccacaggacactcttagctggctgccggctctgtggagcttcctatggggtgactataagggggaagaaaaggatcgggcaccgggtgagaaaggtgaagaaaaagaggaggacgaagactatccatctgaggacatcgagggtgaagaccaggaggacaaggaagaagacgaggaagagcaggctctctggttcaatggcactaccgacaactgggatcagggctggctcgcacctggggattgggtattcaaggatagcgtatcctatgattacgagccacagaaggagtggagcccatggtccccttgcagcggaaattgtagcactggcaaacagcagagaacaaggccatgtgggtatgggtgcacagctaccgagacccggacctgcgacctgccctcctgccctggcaccgaggataaagacacactgggtctaccttcagaagagtggaagttgctggcccgaaatgctaccgatatgcatgaccaagatgtagattcatgtgaaaagtggctaaattgcaaatcggactttcttatcaaatatctgtcccagatgttgcgcgatctgccttcttgcccgtgcgcgtacccattagaagctatggattcgcctgtgtctttacaagacgaacatcagggcaggtcctttaggtggcgggatgcatcggggccacgtgaacgtctcgacatctaccaaccgactgctagattttgcctgcgatcaatgctgtccggggaatcctctacactcgcagcccaacactgttgctatgatgaagactcccgcctcctgacacgcggtaaaggggcagggatgcctaacttgatctccactgattttagccctaaactgcattttaagtttgatactactccctggatcctatgcaaaggggattggtcacgcctccacgcagtgctacctcctaataacggcagggcctgcactgacaaccctctggaagaagagtacttagctcaactgcaggaggctaaggagtattag

SEQ ID NO: 227451 - DNA, 1473 bp, synthetic construct
  misc_feature 1..1473: note = Description of Artificial Sequence: Synthetic coding sequence
  source 1..1473: mol_type = other DNA
atgagggctctgcgtgacagggctggcctgctcctttgtgtcctactgctcgctgctcttctggaggccgctctgggcctgcccgttaagaaacctcgccttcggggtccaagacccggttctctaaccagacttgccgaagtttctgcttcaccagaccccaggcctcttaaggaggaggaggaggctccactgctccccaggacccacctccaggccgagccccatcagcacggctgctggaccgtgacggagccagccgcaatgaccccagggaatgcgacaccacccagaacgccagaggtcacaccactacgccttgagctgcagaagctcccaggtctggccaatacaaccctatcaacgcccaaccccgatacgcaggtcaccataaaagtcgtggaggatccccaagccgaggtgtccatagaccttctggccgagccttctaaccccccacctcaggataccctgtcttggttgcccgctctctggagctttctatggggtgactataaaggagaggagaaggatagggctccaggcgagaaaggagaagagaaagaggaggacgaagactatccctccgaggatatagagggtgaggatcaagaggacaaagaagaagacgaagaggagcaagctctctggtttaacgggacgacggacaactgggatcaggggtggctcgcacctggagactgggtgttcaaggattctgtgtcatacgactacgagcctcagaaagagtggagcccatggagtccctgcagcgggaactgctctactggaaaacagcaacggaccaggccctgcggctacggttgtacggcaacggagacaagaacatgcgatttgccgtcatgccctggaactgaggataaagataccctgggcctgccttctgaagagtggaaattattggccaggaacgccaccgacatgcatgatcaggacgtagatagttgtgagaagtggctgaactgtaagtctgactttctcatcaaatatctatctcagatgttgagagaccttccatcttgtccgtgcgcctacccactggaagccatggactctccggtttccctccaagatgagcatcaggggaggagcttccgctggagggacgcatcaggcccacgcgaaaggttggatatctatcaaccaactgctcgattttgtctgagaagtatgctgtccggtgagagtagtacactcgccgctcaacattgctgctatgacgaagatagcagactgctgacgcgcggaaaaggagcaggcatgcccaatcttattagcacggacttttcccccaaactgcactttaaattcgatactaccccatggattctgtgtaaaggggattggagtcggctgcatgccgtcttaccacctaataacggcagggcttgtactgacaatcccctggaagaggagtatctcgcccagctgcaggaagccaaagagtattag

SEQ ID NO: 227452 - DNA, 1473 bp, synthetic construct
  misc_feature 1..1473: note = Description of Artificial Sequence: Synthetic coding sequence
  source 1..1473: mol_type = other DNA
atgagagcactccgtgatcgggctggacttctgctgtgcgttttgttgctggcagcactcctggaggctgcgttaggcctgcccgtgaaaaagcctcggctccgtggaccacgcccaggcagcctaacaagactggctgaagctagcgcctcaccagaccctagaccgctgcgagaagaagaggaagccaggctgttacctaggacacatcttcaagccgaattgcaccagcacgggtgttggaccgttaccgaacctgcagccctgactcctgggaatgctacacccccacggacacaggaggtcacccctctcctattagaactgcaaaaactacccgagttggtgcatgccacgctgagcactcccaatccggacaaccaggtgacaatcaaagtcgtggaagatccacaggccgaggtgtctatagatctgctcgccgagccgtccaaccctcccccacaggataccctgtcatggctgccggcactgtggtcattcctatggggcgattacaagggcgaagagaaggacagagcacctggcgagaagggagaagagaaagaggaggatgaagattatcctagcgaggatatagagggcgaagatcaggaagataaagaggaagatgaggaggagcaggccctttggttcaacggaacgacagacaattgggaccaaggctggctcgcacctggcgattgggttttcaaggattcagtcagctatgactatgaaccacagaaggagtggtcaccttggtcaccctgttccggcaactgttcaaccgggaaacaacagcggactcggccttgcgggtacggctgcaccgctaccgagacacgaacctgcgatctcccttcttgtccaggcacggaggacaaggatacccttggtctgccttcggaggaatggaaattgctcgccaggaacgcgacggatatgcatgaccaggacgtagattcctgcgagaaatggctgaactgcaagtctgattttctcatcaaatacctcagtcagatgctaagggacctgccctcctgcccatgcgcttaccctctcgaggcaatggactctcctgtgtccttacaagatgagcaccagggaagatcctttcgctggagggacgcgagcggccctcgagagagattagacatataccagcccaccgccaggttctgcctgcgctccatgcttagcggagaaagctcaactctcgccgctcagcactgttgctatgacgaggacagccgacttctgactcggggtaaaggcgcagggatgcctaacctcatatccactgatttcagcccaaagctgcacttcaagttcgacaccacaccatggattctttgcaaaggggactggagcagactgcatgccgtgctacctccgaacaacgggagggcctgcaccgacaaccccctggaagaagagtacttggcacaactccaggaagcgaaagagtattag

SEQ ID NO: 227453 - DNA, 879 bp, synthetic construct
  misc_feature 1..879: note = Description of Artificial Sequence: Synthetic coding sequence
  source 1..879: mol_type = other DNA
atgcgtgccctgagagatagggccggtctgctcctctgcgtgctgctcctcgcagcccttctcgaagcagccctggggcttccagttaagaagcccaggctacggggtcccaggcccggtagcctcactcggctggctgaggtcagcgccagtcccgacccaaggccgttaaaggaggaagaagaagccccactcctgccgaggacccatctgcaggctgagcctcatcagcacggctgctggactgttacagaaccagccgctatgactcccggtaacgcaacaccaccaagaacgcccgaggtgacacctctgcgtctagaactgcagaagctccctgggttagcgaatacgactttaagtacccctaacccagacacacaggcatcagcctctcctgatcctcgcccactgcgggaggaagaggaagcaagacttctgcctaggacccacctgcaggcggagctgcaccaacatggctgctggacggtgaccgagcccgcagcactgacccccggtaatgcaacgcccccacgcacacaggaggtcactcccctcctgctcgagctgcaaaaactgcctgagctggtgcatgccaccctcagcaccccaaaccctgacaatcagaccatgagccttaggcgttctggcgtgccaggactgccagcggtgggaacagctgctctggcttcctcacggggattagggcctgtcgctatggctgctctcccccctagacccgtccccgttacttgtcctcccgtcctggccctacgcacccgtaccccttgggcttccccagtgcggtcaggcagtagttggcccgcaatgcttagaacttgtatgattaagatgtggactgccgtgagaagtggatag

SEQ ID NO: 227454 - DNA, 924 bp, synthetic construct
  misc_feature 1..924: note = Description of Artificial Sequence: Synthetic coding sequence
  source 1..924: mol_type = other DNA
atggcccgaaacgcagagaaagcaatgacggcacttgcccgattccgacaagcacagctcgaagaagggaaggtcaaagagcgtaggcctttcctggcctctgagtgcaccgaattgcccaaggccgagaaatggaggcgacagattatcggcgaaattagcaagaaagtagctcagatacagaacgcaggcctgggggagtttagaatccgggatctgaatgacgagattaacaagcttttaagagagaaagggcattgggaggtccgtattaaggaactaggcggacccgattatggtaaagtcggtcctaagatgttggaccatgagggaaaggaagtccccggtaatcggggatacaagtatttcggtgcagcaaaagacctcccaggcgtgcgggagttgtttgaaaaagaaagacaagttaggtggttaatgccagtgatccccgctctttgggaggcagaggcaggcggttcccaggccctgccccctcccagaaaaacacgcgctgaactgatgaaagccatagacttcgaatactatggctacctggacgaggatgatggggttattgtgccactggaacaggaatacgaaaaaaagctgcgagccgagctagtagaaaagtggaaggccgagcgcgaggccaggctagcacggggagagaaagaggaggaagaagaggaggaggaagagattaacatctatgccgtgaccgaggaggaaagcgatgaggaaggatcacaggagaagggcggagatgatagccagcagaaatttattgcccacgtcccagtcccgtcccagcaggagattgaggaggcactggtgagacgtaaaaagatggaactattacagaaatatgctagcgagacccttcaggcacagtcagaggaagctaggcgcctgctcggttactag

SEQ ID NO: 227455 - DNA, 858 bp, synthetic construct
  misc_feature 1..858: note = Description of Artificial Sequence: Synthetic coding sequence
  source 1..858: mol_type = other DNA
atggcccgaaatgccgagaaagccatgacggccctggccagattcagacaagcacagctggaggaaggaaaggtgaaagaacgtagacctttcctcgcctcagagtgtactgaactgcccaaagcagagaagtggcggagacaaatcatcggcgagatctcaaaaaaagtagctcagatacagaacgctgggctgggcgagtttcgcatccgggatctgaacgacgaaatcaataagctcctcagggaaaagggacattgggaggtgcgcatcaaggagctggggggaccagactacggaaaagtggggccaaaaatgcttgaccacgagggcaaggaagttcccggaaatagagggtacaagtatttcggggctgcgaaagatctgcccggagtgagagagctctttgaaaaagagccactgcccccacccagaaaaacgagagcagagctaatgaaggccatcgatttcgaatattacgggtacttggacgaggatgacggggttatcgtaccactggagcaggagtatgaaaaaaaacttagggctgagctggtggagaaatggaaggccgagagagaagcaagacttgctcgcggtgagaaggaggaagaagaagaagaagaggaggagatcaatatttatgctgtaacagaggaagagagcgatgaggaagggtcccaggagaaagggggagacgatagccagcagaaatttattgcccacgttcctgtgccatcgcagcaagagattgaggaagcccttgtgcgtcgaaagaaaatggagctgcttcaaaagtatgccagtgaaacattacaggcacagagcgaggaggcccgacgactcctgggatactag

SEQ ID NO: 227456 - DNA, 2712 bp, synthetic construct
  misc_feature 1..2712: note = Description of Artificial Sequence: Synthetic coding sequence
  source 1..2712: mol_type = other DNA
atgagcgatagcggcagtcagcttgggtctatggggagtctgaccatgaaaagtcagctgcagattactgtaattagcgcaaagttgaaggagaacaagaagaactggtttggtccttccccatatgtagaggtgacagtcgacgggcagtccaaaaaaactgagaagtgcaataatacgaattctcccaaatggaagcagcctctgaccgtaatcgttacgcccgtgtccaagctgcatttccgcgtttggagtcatcagactctcaaatctgatgttctgcttggcactgcagccctcgatatctatgagaccctgaaaagcaacaatatgaagctggaagaggtagtggtgacactgcaattgggcggtgacaaagaacctaccgaaactatcggagacctcagtatttgtctggacggccttcagcttgagtctgaagtcgtcacaaacggcgaaacgacctgtagtgagaatggggtcagcctctgcctcccgcgtttagagtgcaacagtgcgatttcagcgcactgcaatctgtgtctacctggactctctgattcgcctatttctgcatcacgtgtggccggtttcaccggcgcttcccagaatgacgacggttctcgtagcaaggacgagactcgagtcagcaccaatggcagtgatgacccagaagatgcgggtgctggggaaaaccgccgagttagtggaaacaacagcccctcactgtctaacgggggattcaaaccctccagaccccctaggccaagccggccacccccaccgacaccacgccgtccggctagcgtgaacggaagccctagcgccaccagtgaatctgacggaagtagtactggatctctcccacccactaacaccaatacaaacactagcgaaggcgcaacctccggccttatcatccctttgacaattagcggcggatctgggcctagaccattaaatcccgtcactcaggctcccctgccccctggttgggagcagcgagtggatcagcatggccgagtatactatgtggaccacgtggagaagaggaccacctgggaccggccagagcctctgccccctgggtgggaacggagagtggacaacatgggccgtatctattacgtggaccactttactcgcactaccacctggcagcgccctaccttggagtcggtgaggaattacgaacagtggcagctccagcgctctcagttgcagggagcaatgcagcaattcaaccagcgctttatttatggcaaccaggatctctttgctacctcccagtcaaaagaattcgatcctctgggcccactgccaccgggatgggagaagaggaccgatagcaacgggagggtttattttgtgaaccacaacacgagaatcactcaatgggaagaccctcgctctcaaggacagttgaatgaaaagccccttccagagggatgggagatgcgttttacagtggacggcatcccgtatttcgtcgaccataacagaaggacaactacatacattgaccccaggacggggaaaagcgcccttgataatggaccgcagatcgcctatgttcgcgacttcaaagccaaggtgcagtattttagattttggtgtcagcaactagccatgcctcagcacatcaaaatcacggttactagaaaaactttgtttgaagatagtttccagcaaatcatgtctttcagccctcaggacctgagacgacgactgtgggtcatcttccccggtgaagagggactggattatggcggagttgccagggagtggtttttcctgctcagccatgaggtgctgaaccccatgtattgcctttttgaatacgcagggaaggacaactattgcttgcaaatcaatcctgctagctacatcaatcccgaccacctgaaatactttagattcatagggcgattcatcgccatggcactgtttcatggaaagttcatcgacaccggcttcagtttgcctttttataagcggatactcaacaaacccgtgggattaaaggacctggagtccatcgacccagaattctataattccctgatctgggtgaaggaaaataatattgaggagtgcgacctggagatgtatttttccgtggacaaggagatcctaggcgagatcaaatctcacgacctgaagccaaacggtggtaacatcttagtgactgaagagaacaaggaggaatatatccgtatggtggccgagtggcgactatccaggggcgttgaggagcagacacaagccttcttcgagggattcaacgaaattctcccccagcagtatctgcaatatttcgacgctaaggagttggaagttctcctgtgcggtatgcaggaaattgacctcaatgactggcagcgccacgcaatctacagacactacgccagaacctctaagcaaatcatgtggttttggcagttcgtcaaagaaatagataacgagaaacgcatgcgtctgcttcaatttgtgaccggaacctgtagactgcccgtcggagggttcgctgatttaatgggatcaaatggtccacagaagttctgcatcgaaaaagtcggtaaggagaattggcttccccgaagtcacacgtgcttcaacagactagacctgcccccttataaatcctatgagcagttgaaggagaagttacttttcgcaatagaggagaccgaagggttcgggcaggagtag

SEQ ID NO: 227457 - DNA, 2589 bp, synthetic construct
  misc_feature 1..2589: note = Description of Artificial Sequence: Synthetic coding sequence
  source 1..2589: mol_type = other DNA
atgagtgactccggcagtcagcttgggtctatgggatctctcacgatgaagtcccagttacaaataactgtgataagcgctaagttgaaggaaaataagaaaaactggttcggcccttcaccctatgtggaggtcaccgttgacggccagtccaagaaaactgaaaaatgtaacaacactaacagccccaaatggaagcaaccgttaaccgttatcgtgacacccgtaagtaaacttcactttcgggtctggtcccaccagaccctcaagtccgatgtgcttctggggaccgcggcactcgacatttatgagaccctcaagtccaacaacatgaaactagaggaggtcgtcgtcaccctgcagctgggtggtgataaagaacccaccgagaccattggtgacctaagcatctgcctcgatgggttgcagcttgagagcgaagtcgtcacgaatggagagactacgtgctccgagtccgcctcacagaatgatgacgggtcaaggagcaaggatgagactcgagtgtcaaccaatgggtcagacgatcctgaagatgctggcgcaggagaaaaccgccgtgtgtctgggaataattcccctagcctgagtaacggcggattcaaaccatcaaggccgcctcgccctagtcggcctccgccacccacaccacgacggcctgcaagcgtcaacggctcgcctagtgctaccagtgaaagcgatggtagttcaacggggtccttaccacccaccaacaccaacacgaatacttccgaaggtgctaccagcggccttataataccgcttacaatctctggcggatcgggaccccgaccattgaatcccgtgacccaggccccattgccgccaggatgggagcaacgggtagaccagcacggacgcgtctattacgttgatcatgttgagaaaaggacaacttgggatcggcctgagcccttacccccaggttgggaacggagagtggacaatatggggcgtatttactatgtggaccacttcactcgcacaaccacatggcaacgtccaactctcgaatccgtgcggaactacgaacagtggcagctccagcgctctcagcttcagggagccatgcagcagtttaatcagcgctttatttacggtaaccaggatctctttgctacttctcagagcaaggagtttgatccgctcggccctctccctcctgggtgggaaaagaggactgactctaacgggcgagtctacttcgtgaatcacaacacgcgcataacccagtgggaagaccctcggagtcagggacagctcaacgagaagcccctccctgagggctgggagatgaggtttacggtggatggcatcccttatttcgtcgaccacaatcggcgaactaccacctatattgacccgaggaccgggaagagcgctctggataacggacctcagatcgcctatgtgcgcgactttaaggccaaggttcagtatttcagattctggtgtcaacagttagctatgccacagcacattaagatcaccgtaacgaggaagaccctgtttgaagatagttttcagcaaatcatgtcattcagcccacaggacttgaggagacgtctgtgggtcattttccccggtgaagaaggtctcgactacggaggggtagctagggaatggttttttctgctctctcacgaggtcctgaacccaatgtattgcttgttcgaatatgcagggaaagacaactactgcttacaaattaacccggcaagctacatcaatcccgatcatctgaagtatttcaggttcattggacgcttcattgcgatggctctgtttcacggcaaatttatagataccggcttttccctgccattttacaagagaattttgaataagccagtggggctcaaggatctggagagcattgacccagagttttataattccctgatttgggtcaaagaaaacaatatcgaagaatgcgacctggaaatgtacttttccgtcgataaggagatcctgggtgagatcaagagtcacgacttgaaacccaacggcggaaacatactggtcactgaagagaacaaggaagagtatatccgaatggtagccgagtggcggctgagccggggagtggaagagcagacccaggctttttttgagggttttaacgagatcctgccccagcagtatctgcagtatttcgacgctaaggagctagaagtgctgctgtgcggaatgcaggaaattgatctgaatgactggcagcggcacgctatatatcgtcactatgctcggactagcaagcagatcatgtggttctggcaattcgtcaaagagattgacaatgagaagagaatgagactcttgcagtttgtgactggcacgtgccgcctccctgtcggtggattcgcagacctgatgggcagcaacggccctcagaagttctgcatcgaaaaagtcggcaaagaaaattggctgcctcgctcccacacgtgtttcaaccggttggatttgcctccctacaagtcctacgaacaactgaaggagaagctgctattcgcaattgaagagaccgagggcttcggccaggaatag

SEQ ID NO: 227458 - DNA, 2259 bp, synthetic construct
  misc_feature 1..2259: note = Description of Artificial Sequence: Synthetic coding sequence
  source 1..2259: mol_type = other DNA
atgaagctcgaggaagtggtagttaccttgcagctcggtggtgacaaggaaccgacagagacaattggcgatctgagtatatgcttggacggtctgcagctggagagcgaggtcgttacaaatggagagactacttgctccgagtcagcttctcagaacgatgatgggagccgctctaaagacgaaacgcgcgtttctaccaacggaagcgatgatccagaggacgcaggggctggagagaatagaagggtctcagggaataatagtccatccctgtccaatggaggatttaagcctagtcggccaccgaggccatcaagacctcctcctccaacccctaggagacctgcttccgtcaacggcagtccgtccgccaccagtgagtctgatggatcaagtaccggatcactccctcccacaaacacgaacaccaatacaagcgaaggcgctacaagcggactgattatccctctgacaatctctggcggtagcggccctaggcctttaaacccggtgacccaggcccctctgccgcctgggtgggagcaaagggtggaccagcacggccgtgtgtactacgtggaccacgtggagaaacgaactacatgggatcgcccagaacctcttcccccaggctgggaacggagagtggacaatatgggccgtatctactatgtggaccatttcaccaggacaactacgtggcagcggcctactctggagagcgtcaggaattacgaacagtggcaactacagagaagccagctacagggggcaatgcagcagtttaaccagcgttttatttacggaaatcaagatctgttcgccacatcccagagtaaggaatttgaccctctgggccctctgccacctggatgggaaaaacggacggatagcaatggtagagtctacttcgtgaaccataacacacgtatcacccagtgggaggacccgcgttcccagggacaacttaatgaaaagccactcccagaaggctgggagatgaggtttacagttgacggaattccgtacttcgttgaccacaacagacgaactaccacctacattgacccaagaacagggaagtctgcacttgataatgggccacagatcgcttatgttagggactttaaagcaaaagtccagtacttccggttctggtgtcagcagctagccatgccccagcacattaagatcacagtgactagaaaaaccctgttcgaggactcgttccagcaaatcatgtcattttccccccaggacctcagacggaggctgtgggtcatctttccaggagaggagggactcgattacggaggggtcgcgcgtgaatggttttttttgctgtcccacgaggtcctcaaccccatgtactgccttttcgagtacgctggcaaagataactactgcctccagatcaaccccgctagctacattaatcctgatcacctgaaatactttcgatttataggcaggtttattgcaatggctttatttcacggtaaatttatcgacaccggcttctccttgccattctacaagcgtattttgaataagccggtaggtctgaaagacctagagtctatcgacccggagttctacaattctctaatttgggtcaaggaaaacaacatcgaggagtgcgatctggagatgtattttagtgtagataaagagattctgggcgaaatcaagagccatgacctcaaaccgaatgggggaaacatcctggtcacagaggagaacaaggaggaatatatccgtatggtggcagagtggagactttcgcgcggtgttgaggagcaaacgcaagctttcttcgaaggcttcaacgaaatccttccccagcagtatctgcagtatttcgatgccaaggaactggaggtcctgttgtgcggcatgcaggagatcgacctcaatgattggcagcggcatgccatctaccggcactacgcaagaactagcaagcagatcatgtggttctggcagtttgtcaaggagattgataatgagaagcggatgcgcctgctccagttcgtcacggggacatgccgcctgccagtggggggattcgccgatctgatgggctcaaacggaccacaaaagttttgcatcgaaaaggttggtaaggagaattggctcccaaggagccatacttgtttcaatcgactagacctacctccgtacaagtcttacgagcagcttaaagagaaactgttattcgctatagaggagaccgagggatttggtcaggagtag

SEQ ID NO: 227459 - DNA, 3717 bp, synthetic construct
  misc_feature 1..3717: note = Description of Artificial Sequence: Synthetic coding sequence
  source 1..3717: mol_type = other DNA
atgcgggcacagggtcgcggtcgactgcccaggcgcctcctcctcctgttggcattgtgggttcaagccgcacggccaatgggttacttcgagttgcagttgagcgccctgcgcaatgtcaatggggaactattgagcggagcatgttgcgacggcgatggtaggacaacccgtgctggagggtgtgggcacgacgagtgcgatacatacgtgcgcgtctgcctgaaggaataccaagcgaaggtcacacccacgggcccttgtagttacggccacggcgcaacccctgtgctaggcggaaatagcttttatctgcctccagccggtgctgctggggatagagcacgggctagagccagggcaggaggagatcaggacccgggactggtcgtcataccttttcagtttgcatggcccaggagctttaccctcatagtggaagcgtgggattgggacaatgacacaacccccaacgaggaattgctcatcgaaagggtgtcccacgccggtatgataaacccagaagaccggtggaagagcctgcactttagcgggcacgtcgctcacctggagctgcagatccgagtcagatgcgacgaaaattattatagtgccacttgtaataagttctgtcggccaagaaatgatttttttggacattacacctgtgaccagtacggaaacaaggcttgtatggacggttggatgggaaaggaatgcaaagaggccgtttgcaagcagggctgcaacctgctccatgggggttgcacagtacccggagagtgccgctgctcgtacggttggcaggggaggttttgcgatgagtgcgtgccctaccctggctgtgtgcatgggtcatgcgtcgagccctggcagtgcaattgcgagactaattggggcggactcctgtgtgacaaagatctgaattactgcgggtctcaccatccgtgcaccaatggaggcacatgcatcaacgctgagcctgaccagtacagatgcacatgccccgatggctacagtggtagaaattgcgagaaagccgagcacgcctgtaccagtaacccttgcgccaatgggggaagctgccacgaagttccttctggcttcgaatgtcactgcccctcaggctggtccggccctacatgtgccctggacatagatgaatgcgcatccaatccttgtgcagcaggaggcacttgcgtggaccaggtcgatgggttcgagtgtatctgccccgaacagtgggtgggtgccacatgccagttggatgcaaatgagtgcgagggaaaaccctgtctgaacgctttttcctgtaagaacctgattggcggatactattgtgattgtatacccggttggaaaggcattaactgccacataaatgttaatgactgccgcggtcaatgtcagcacggtggaacctgcaaggatctcgtgaatgggtaccagtgtgtgtgccccagaggctttggtgggagacactgtgagctggagcgggacgagtgtgccagcagcccgtgccattccggaggtctgtgtgaagatctggccgatgggttccactgccactgtccgcagggcttttctggcccactctgcgaggtcgacgtagacctgtgcgagcctagcccctgccggaatggggctaggtgttacaacctggagggagactactattgcgcttgccctgacgatttcgggggtaaaaactgtagcgtgcctcgtgaaccatgtcctggcggagcatgtagagtcattgacgggtgtggtagcgatgctggcccagggatgcccggaacagccgcatcaggggtctgtggcccacatggtcgttgcgtatctcagccgggaggcaatttcagctgtatatgcgattcagggtttaccggcacatactgtcatgaaaacatagacgattgtctcggtcagccctgtaggaacgggggaacatgcatcgacgaggttgatgcgttcagatgtttttgccccagtggatgggaaggcgaactgtgtgacacaaaccccaacgactgcctcccagatccctgtcacagccgcggacgatgttacgatctggtcaatgacttctattgtgcatgcgatgacgggtggaagggcaagacctgtcacagtagggagttccagtgtgacgcttatacatgcagtaacggcggtacttgctacgactccggggacactttcaggtgtgcatgtccacccggatggaagggaagcacctgcgctgtggctaaaaactcaagctgcctccccaatccttgcgtgaatggtggaacatgcgtgggctccggtgcaagttttagttgcatttgtagagatggctgggaaggcaggacatgtactcacaacaccaacgactgtaacccactcccctgctacaacggcggtatctgtgtcgatggggtcaactggtttcggtgcgagtgcgcgccaggatttgccggtcccgactgtagaataaacatagacgaatgtcaatcaagtccctgcgcctacggcgcaacctgcgtggacgagattaacggctataggtgcagttgccctccaggcagggccggtcctagatgccaggaagtgatcggcttcgggaggtcatgctggagccgcggtacacccttcccgcacggtagctcatgggtggaagactgcaattcatgtcgttgcctagacgggaggcgggactgtagcaaggtgtggtgcgggtggaagccatgtctgctagcaggccagccagaagcactttctgcgcaatgccctttgggtcaaaggtgcctggaaaaagcgccaggacagtgcctgaggccaccttgcgaagcttggggggagtgtggagcagaagaacccccttctaccccctgcctgccaaggtccgggcatctggataacaattgcgcccgtctcaccctacattttaatcgggatcacgtgccccaagggaccaccgtcggtgccatttgcagtggaatccgctctcttcctgccacaagagcagtggccagagaccggttgttggttttactctgtgatagagctagctctggggctagcgcagtggaagtggcagtatccttcagtcccgctcgcgacctacctgactctagcctcatccagggcgctgctcacgcgattgttgcggcaatcacccagaggggcaacagtagcctactgttggccgttacggaagttaaggtcgagacagtggttactggaggctcctccacaggcctcctagtacctgtgctatgtggcgcatttagcgttctttggctggcgtgtgttgtcctgtgcgtgtggtggactagaaaaagacgaaaggagagagagagatcgcgcttgccccgagaagagtccgctaacaatcagtgggccccactgaatccgatccggaatccaatcgagcgtccgggagggcacaaggacgtgctgtatcagtgtaagaattttactcctccgcctcggagggcggatgaggctctaccaggacccgctggtcacgctgcagtccgagaggacgaggaggatgaagacttaggtcggggagaggaggactccctggaagctgagaagtttctgtcacataagttcactaaagatcccggtcggagcccgggaagacccgcacattgggcttcgggcccaaaggtcgataatcgcgcagtcagatccatcaacgaggctcggtatgcagggaaggaatag

SEQ ID NO: 227460 - DNA, 3603 bp, synthetic construct
  misc_feature 1..3603: note = Description of Artificial Sequence: Synthetic coding sequence
  source 1..3603: mol_type = other DNA
atgagggcccagggacggggaagactcccaagaaggctgctgttgcttctggctctctgggtgcaggcagcgagaccaatgggatattttgagcttcaactatccgcattgcgtaatgtcaatggagaactgctttctggggcttgttgcgatggcgatggacgaactactcgtgctggcggttgtggacatgacgagtgcgatacatacgtgcgggtatgcctgaaggagtatcaggcaaaagtgacgcctacagggccttgtagctacggacatggggctaccccagtactgggaggaaatagtttttacctgccccctgcaggagccgcaggcgatcgcgctagggctagggctagagcgggaggtgaccaggatcccggtttggtcgtaatcccttttcaattcgcctggccacggagcttcactctgattgtggaggcttgggattgggacaacgataccaccccaaacgaggagctgcttattgaacgggtttctcacgctggcatgatcaaccccgaggaccgatggaaatctttacatttctctgggcacgttgcccacttggagcttcagatcagggtccggtgtgatgagaattattattctgccacatgcaataagttctgtagacctcggaatgacttctttggacactacacgtgtgaccagtatgggaataaggcctgtatggacgggtggatgggtaaagaatgcaaggaagctgtgtgcaaacagggttgtaatcttctgcacggaggctgcaccgtgcctggtgaatgccggtgtagttatggctggcagggaaggttttgtgatgaatgtgtgccatatcccggatgcgtgcacggttcctgtgtggaaccatggcagtgcaattgtgaaacaaactggggcggactgctttgcgacaaagatctgaactactgcggaagccatcatccctgcaccaatggcggaacatgcatcaatgcagagcctgatcagtatcggtgtacctgcccagatggctacagcggaaggaactgtgagaaggctgaacatgcatgcacttctaacccttgcgcaaacggagggtcatgtcacgaagtcccctcaggctttgagtgtcattgcccctcggggtggtccggtcccacttgtgctctggacatcgatgagtgtgcctccaatccctgcgcagccggagggacatgcgtcgaccaggtggatgggtttgagtgcatttgcccagagcaatgggtcggtgccacgtgccagcttgatgtgaacgattgccgcggacaatgccagcatgggggaacttgtaaggatcttgtgaatggatatcaatgcgtgtgccctcgcggttttggcggacggcattgcgagcttgagcgggacgaatgcgcttcatccccttgtcattcgggcggattgtgtgaagacctggcagatggatttcactgtcactgcccccaaggatttagcggtcctttgtgtgaggtggatgtggatctctgtgagccgagcccttgcaggaatggggctaggtgctataacttggagggagactactactgcgcttgtcctgacgattttggcggtaagaattgttctgtgccgagagagccatgtcctggtggtgcctgtcgtgttatcgacggatgtgggagcgacgcaggcccagggatgcccggtaccgctgcttccggcgtttgcggcccacacggccgttgcgtgagccagccagggggaaatttcagctgtatctgtgacagcgggttcactggtacctattgccacgagaatatagatgattgtcttggccagccctgcagaaatggtggcacttgtatcgatgaagtcgatgcctttagatgcttttgccctagtggatgggagggcgagctgtgcgatactaacccaaacgactgtctaccagatccatgccattcgcggggacggtgttatgatctggtgaatgatttttattgtgcctgtgacgatggctggaaaggcaagacttgccacagccgggagttccaatgtgacgcatatacttgctccaatggcggaacatgttacgactctggagatacatttcgctgcgcctgcccgcctggctggaagggaagcacttgcgcagtagccaagaactcctcctgcctgcccaatccgtgtgtgaacggaggtacctgtgttggctccggcgcttcgttctcttgcatctgtcgcgacggctgggaagggaggacatgtacgcataacactaatgactgcaatcccctcccctgctacaacggtggcatctgcgtcgacggcgttaactggttcaggtgcgagtgtgcgccagggttcgctgggccagactgccggatcaacatcgatgaatgccaaagcagcccatgcgcctatggcgcaacctgcgttgacgagatcaatggctaccggtgtagttgcccaccaggacgggctggccctcgctgccaagaggtgattggctttggcaggtcttgctggtcacggggaactccttttccacacggcagtagctgggttgaggattgcaacagttgtcgttgcctggacggacggagggactgtagcaaggtttggtgcggttggaagccctgcttactggctggtcaaccggaagcactaagcgcccagtgccccttgggacagcggtgtctggagaaggcgcctgggcagtgcctgcgccctccttgtgaggcctggggggagtgtggtgccgaggagcctccaagtaccccctgtctccctcggagcgggcatctagataacaattgtgcaaggttgactctgcactttaacagggaccatgttcctcagggcactacagtcggtgctatctgttcaggcattcgctcacttcccgctaccagagcagttgctagagatcggctgcttgtcctgctttgcgatagagcctcctcaggggcttccgcagtggaagtggccgtgtccttctcacctgctagagatctgcccgatagctccttgatccagggcgcagcacatgccattgtggctgcaatcactcagcgaggaaatagttcgcttttactcgccgttaccgaggtgaaagtggagacagtggtgacaggagggagttcgacagggcttttagtacctgtgctttgtggggcattcagcgtcttatggctggcatgtgttgttttgtgcgtgtggtggacacgtaaacgacgcaaagaaagagagagatcgcgacttcctagggaagagagtgccaacaatcagtgggcacctttgaatcctattagaaaccccatcgaacgacccggaggccacaaggacgtcctgtaccagtgtaagaacttcacaccacctcctcgtagggccgacgaggcactgcccggacccgctggccatgctgctgtgagagaagatgaagaggatgaggacttaggacgcggagaagaagactctctcgaggccgaaaaattcctgagccacaagtttactaaagaccctggcagaagccctgggagacctgcacattgggcctccggcccaaaagtcgacaacagggcggtcaggtccatcaatgaagcaaggtatgccggaaaggagtag

SEQ ID NO: 227461 - DNA, 3465 bp, synthetic construct
  misc_feature 1..3465: note = Description of Artificial Sequence: Synthetic coding sequence
  source 1..3465: mol_type = other DNA
atgcaatacctcaacataaaagaggactgtaatgctatggctttctgtgcaaagatgaggagctcaaaaaaaactgaggtgaacctggaggctcccgagcctggtgtggaggttattttctatctctcggatagggagcccctgcggctcggaagcggagaatacaccgctgaggagctgtgtattcgcgcagctcaggcatgccgcatctcacccttatgtcacaacctctttgcgctgtatgatgaaaacacaaagctctggtacgctcctaacaggacaatcacggtggacgacaaaatgagcctgcgactccactaccgtatgcggttctactttacaaattggcacggtacaaatgacaatgaacagtccgtctggagacattcacctaaaaagcagaaaaatggttacgagaagaagaaaatccccgatgctacaccacttctggatgccagtagcctggagtatttattcgcacagggccagtatgacctcgtcaagtgtcttgcacctataagagaccctaaaactgaacaggacggacacgacatcgaaaacgaatgcttgggaatggctgtgttggccataagtcactacgccatgatgaagaagatgcagctccctgaactgccgaaagacattagctacaagagatacattccggaaactcttaataaatctatccggcagcgaaatctgcttacccgtatgagaattaataacgtgtttaaggacttcctcaaggagttcaacaacaagaccatctgcgactccagcgtctcaacacatgacctaaaagtgaagtaccttgccacattggaaacattgaccaagcactatggggctgaaatctttgaaacaagcatgttgctgatcagctcggaaaatgagatgaattggttccacagcaatgacggtgggaatgtcctgtactacgaggtgatggtaactgggaatttaggcattcaatggcggcacaaaccgaatgtggtttccgtggaaaaggagaaaaacaagctcaagcgcaagaagctcgagaacaaacacaaaaaggacgaagagaaaaacaagattcgggaagaatggaacaacttctcctattttcccgagatcactcatatagttattaaagagagcgtggtgtccattaataaacaggacaataaaaagatggagcttaagctctccagtcacgaggaggccctttcattcgtatccctggtggatggttacttcaggctgacagcagatgcccaccactacctgtgtaccgacgttgcacctccactcattgtgcataacatccagaatggatgtcacgggcctatttgtacagagtatgctatcaataaactgcggcaggaagggagtgaggaggggatgtatgtgttgaggtggtcctgcacagattttgacaacattctaatgacggtgacatgtttcgagaagtcagaacaggtccagggcgcacagaagcagtttaagaatttccagattgaagtacagaaagggcgatatagcctgcacggtagtgaccggtccttcccaagtctgggggatctgatgagccacctgaagaagcagatcttgcggacagacaatatctcattcatgcttaaacggtgctgccagccaaagcctagggagatatctaacttgctcgtggcaaccaagaaagcccaggagtggcagccagtttatccgatgtctcagctatctttcgacaggatactaaaaaaagacctggtccagggcgagcacttggggcgtggaaccagaacccatatttattctggaacactgatggattacaaggatgatgaagggacttcagaggagaaaaaaatcaaggttatcctcaaggttctggatccgagtcacagagacataagtcttgcattcttcgaagccgcttcaatgatgcgtcaagtgtctcacaagcatatcgtttacctgtacggtgtgtgtgtacgtgatgtggagaatatcatggtcgaagaattcgtcgaaggcggtccactggatctctttatgcacaggaaaagtgacgtcctcacgaccccatggaaatttaaggtggcaaaacagttagcgagtgctctgagctatctcgaggataaagatttagtgcatggaaacgtctgtaccaagaatcttctgctggctagggagggcatcgactcggaatgtgggccatttatcaaactgtctgatcctggcatcccaatcacagtgctttcaagacaggaatgtatagagagaatcccctggatagcacccgaatgcgtcgaagattcaaaaaacctcagtgtcgcagccgacaagtggtcattcggaaccactctgtgggagatctgctacaatggagaaattccactcaaagacaagaccctgattgagaaagaacggttttacgaatccaggtgcaggcctgtgacacccagctgcaaggagctggctgatctcatgactaggtgcatgaactatgacccaaatcagagaccttttttcagggcaatcatgcgcgatatcaacaaactcgaagaacagaatccagatatcgtgtctgagaaaaagccagctactgaagtagacccaacccatttcgagaagaggttcctgaagcgaatcagggatctgggcgaagggcatttcgggaaggtggagctttgccgatacgaccccgagggtgataataccggcgagcaggtggcggtgaaatccctcaagccagagagcggcggaaaccatattgccgacctcaagaaagaaattgaaatactaaggaatctgtaccatgagaatatcgtgaagtataagggaatctgcaccgaggacgggggaaatggcattaaactgattatggaatttttacctagcggaagccttaaggagtatctgccaaaaaacaaaaacaaaatcaacttaaagcaacaacttaaatacgctgtgcaaatctgcaaaggcatggactatcttggctctcgccagtacgtgcatagagatctggcggcacggaatgtactcgtggaaagcgagcaccaggtgaagatcggcgactttgggctgactaaagccatagagactgacaaggaatactatacagtaaaagatgatcgggatagtccagtcttctggtacgcacccgagtgcctgatgcagtccaagttctacatcgcctcggatgtgtggagcttcggagtcacattgcatgagctccttacttactgtgattccgactcatccccgatggcattgtttcttaagatgattgggccaacgcacgggcagatgaccgtgacccggttggtgaacaccctcaaggagggaaaacggctgccttgcccccctaattgccctgatgaggtgtaccagctgatgcggaagtgctgggaattccagccttccaataggaccagctttcagaacctcatcgaggggttcgaggccctcctgaagtag

SEQ ID NO: 227462 - DNA, 1860 bp, synthetic construct
  misc_feature 1..1860: note = Description of Artificial Sequence: Synthetic coding sequence
  source 1..1860: mol_type = other DNA
atggcaccaccgtctgaagagaccccgttgattcctcagagatcctgttcactgctgtccactgaggccggtgctttacacgtgttgcttccagcccgtgggcctggccctccacagagactgtctttcagctttggcgaccacttagcagaagacctctgcgttcaagccgcaaaggctagcggaattttgcctgtttaccactcactctttgcactcgcaactgaagatctctcctgttggtttcctccatcacacatattctctgtagaagatgcaagcactcaagtgctgctttacagaataagattctacttccctaactggttcggattagagaagtgtcatcgctttggcctcaggaaagacctggctagtgctattcttgacctgcccgtgctggaacatctgttcgcccaacacagatccgacttagtcagtgggagactgccagtgggtctctctctgaaagagcagggcgagtgtctttctctcgccgtcctggacctggccaggatggccagagaacaggctcaacgaccgggagaactgctcaagactgttagctacaaggcgtgtttaccaccatctctgcgtgacctcatccagggtctgtctttcgtcaccagacggcgtatccgccgaaccgtccgaagagctttgcgacgagttgctgcctgtcaggccgaccggcactcactgatggccaaatatatcatggaccttgagcgtctggaccctgccggagccgctgaaacattccatgtgggtttgccaggagccctcggaggccacgacggcttgggacttctgagggtggcaggggacggcggtattgcctggacacagggggagcaggaggtgctgcagcccttctgcgacttcccagagattgtcgacatctcaatcaagcaggccccacgggtgggccctgccggagagcaccgacttgtcactgttactcgtactgacaaccaaatcctagaggccgagtttccaggcctacccgaggccctgtctttcgtggctttagtggacggatactttcggctcaccactgactctcagcatttcttctgcaaagaggtagcaccccctaggctgctcgaggaggtcgccgagcagtgccatggacccattaccctcgatttcgctattaacaagctaaagactggaggtagtaggccaggcagttacgtgctgagacggtccccccaggatttcgattcttttttactgacagtttgtgttcagaatccactgggtcctgactataaaggctgcttaatccgccgaagtcctactgggaccttcctgctggtgggtctgagtcggccacactcctcccttagagaactgttagcaacttgttgggatgggggactgcacgtcgacggcgtagccgtgaccctcacttcttgctgtattcccagaccaaaggagaagagtaacctgatagtggttcagcgcggacactcccctcctacgtcctcactggtgcagccgcagagtcagtaccagttgtcacaaatgacattccacaagattccggcagattctttggagtggcacgagaatctgggtcacgggagtttcacaaaaatataccgaggttgccgtcatgaggttgtggacggagaggcgagaaaaactgaggtactgctcaaggtaatggacgcaaaacacaaaaattgcatggaaagttttttggaggctgctagccttatgtcccaggtaagctataggcacctagtcttactccacggagtatgcatggcaggcgattctgagtcaccacctcccacccatcctacgccggcttctccgaagagccgattattttttccccctctgttttag

SEQ ID NO: 227463 - DNA, 3375 bp, synthetic construct
  misc_feature 1..3375: note = Description of Artificial Sequence: Synthetic coding sequence
  source 1..3375: mol_type = other DNA
atggcccctcctagcgaggagacaccactcatacctcagaggtcatgtagtctgctttcaaccgaagcaggagctctccacgtgctgttgccagcacgcggtccaggccctccccagcggctcagtttctcttttggagatcatctagccgaagacctgtgcgtgcaggccgcaaaagcctctggaattctgcctgtctaccacagcctctttgcgctcgcaacagaggatctgagctgctggttcccacccagtcatattttctccgtcgaggacgcatccacacaagtgcttctgtacaggatacggttctactttcccaattggtttggactagaaaaatgtcataggttcggactgagaaaggacctggctagtgcgattctggacctgcccgtgttggagcacttgttcgctcaacacaggagtgacctagtctcaggcaggctcccggtcggcctgtcactaaaagaacagggggagtgtctgtctttagctgtactggacctcgctcgtatggcgagggaacaggctcagcgaccaggggaactcctgaaaacagtatcctacaaggcctgcctcccgccatccttgagagacttaatccagggactgtcctttgtgacgcgaagacgcatacgccgtactgtccggagggctcttaggagggtggctgcctgccaggctgatcgacactctcttatggcaaaatatatcatggacctggagagactggacccggctggtgccgcagagacctttcacgtcggcctgccaggcgcactcgggggacacgacggactcggattgctgcgcgtcgccggtgacggtggcatcgcctggacccagggtgagcaggaggttctgcagcccttttgtgattttccggagatcgtagatatcagcataaagcaagccccaagggtcggtcctgccggtgaacaccggcttgttacggtgactcgaactgataatcaaattctcgaggccgaatttcctggtcttcccgaagccctgtcattcgtggctctggtcgatgggtactttaggttgaccactgacagccagcacttcttctgcaaggaggtggcaccaccgcgactgctggaggaagtggccgaacagtgccacggtcccattactctggattttgctattaataaactgaagaccgggggttccaggcccggatcttatgttctgcggagatctccacaggacttcgacagcttcttgctgaccgtttgtgtccagaatcccctggggccagattacaagggatgcctcataaggaggagtcccactgggacatttctgctggtgggccttagtcgcccacattccagccttagggagcttcttgctacttgctgggacgggggactacacgtggacggtgtcgccgttaccctcaccagctgttgcatcccaaggccgaaagagaagagcaatttgatcgtggtgcaaaggggacactcaccgcctacctcttctctagttcagccccagagccagtaccagttgtctcaaatgacttttcataaaatcccggcagatagcctggagtggcacgagaacttggggcatggctcttttaccaagatctatcgaggctgcagacatgaggtggttgatggggaggccaggaagaccgaggtgctgctcaaggtgatggatgcaaagcacaagaactgcatggagagcttcctggaagccgctagcctaatgtctcaagtcagctatagacacctggtactgctccatggtgtatgcatggccggagactcaacaatggtgcaagagtttgtgcaccttggagcaattgatatgtaccttcgaaaaaggggtcacctggtaccagcaagctggaagctacaagtagtcaagcaactggcctacgccttgaattacctcgaagacaagggattaccacacggcaacgtgagtgcgagaaaagtattgttggcgagggaaggggctgacggctccccccctttcatcaagctttccgatcccggtgttagcccagctgtgctatcgctggaaatgttgactgatagaatcccctgggtggctcccgagtgtcttcgagaggctcaaaccctaagtctggaggcagacaagtggggttttggcgctaccgtctgggaggtgttctccggggtaacgatgcctatctccgctctggaccctgccaaaaagctgcagttttacgaagaccgtcagcaactacctgcacctaagtggactgagcttgctctcctgattcagcagtgcatggcatatgagccagtgcagaggccgtcattccgcgctgtgattcgagacctcaatagtttaatctcctcagactacgagttacttagcgaccctaccccaggcgctttagcaccccgagatggcctgtggaatggcgctcagttgtacgcgtgtcaagatccaaccatattcgaggaaagacaccttaagtatatctcccagctgggaaagggcaactttggctccgtggaactctgccgttacgaccccctgggggacaatactggggctctagttgcggtgaagcagttacagcattctggtcctgatcagcagcgcgatttccagagagagatccagattctcaaagcgctgcattcagacttcatcgttaagtacaggggggtgtcatatggcccaggacggcaatctctgcgtttagtcatggaatatcttccgtccggatgcttgagagatttcctgcagcggcatcgagctagactagatgctagcaggctgctgctttactcttcacagatatgtaagggcatggaatacctggggagccgacgttgcgtacaccgcgacctggccgcacggaatatccttgtggaatcagaagcccatgtgaagattgctgattttggactggccaaactgcttccactggacaaggactactatgtggtgcgagaaccaggtcaaagccccatcttctggtacgccccagagagtctctcagacaatatattttccagacagagcgatgtgtggagcttcggcgtggtgttgtatgaactttttacctactgtgataagtcctgttcgccctctgctgaatttctgagaatgatggggtgcgagagagatgtcccagctttatgtagactgcttgaactactcgaggaggggcagaggttaccagcgcctcctgcctgccctgccgaagtacacgagctaatgaagctgtgttgggcacccagtcctcaggatagacctagttttagcgccctgggccctcagctggacatgttatggagcgggtcaagaggctgcgaaactcacgccttcacagcccatcctgagggcaagcatcactcactgtccttctcatag

SEQ ID NO: 227464 - DNA, 3375 bp, synthetic construct
  misc_feature 1..3375: note = Description of Artificial Sequence: Synthetic coding sequence
  source 1..3375: mol_type = other DNA
atggctccaccctcggaggagacacctctgattccacagcgatcttgtagtctcttaagcactgaagctggggcactccacgtgctgctccccgctagaggccctggccctccacagaggttgagtttttcattcggcgatcatctcgctgaggacctctgcgtgcaggccgctaaggctagcggtattctcccagtgtatcactcattgtttgcactcgctactgaggatctctcctgctggtttcctccaagccatattttttctgttgaagacgcatctacgcaggtgctcttgtatagaattcggttttattttcccaactggtttggtctcgaaaagtgccacaggtttggccttagaaaagatttagccagcgccatcctggatttgccagttctagagcatttgtttgcgcaacatagaagcgacttagtgagtggcagactccctgttggcctcagccttaaagagcagggggaatgcctgtctttggctgtgctggatctcgccagaatggctagggaacaagcgcagcgaccgggagagctgttgaaaacagtttcatataaagcctgcttaccaccctcgttgagggatttgattcagggcttgtctttcgttaccagacgcagaatcaggagaactgtgcggagggccctgagaagagtagccgcatgccaggccgatagacactccctgatggcaaaatacatcatggacctggagcggttagatcctgcaggggctgccgagacgtttcacgtggggcttccaggcgctctgggcggtcacgatggtctggggcttcttcgggttgccggagacggagggatcgcgtggacccagggcgagcaggaagtactgcaaccattttgtgatttccctgaaatcgtggacattagtataaaacaggcgccacgggttggccctgctggagagcaccgcctggtgacagtcacacgtacagacaaccagattcttgaagctgagttccccggactgccagaagctttaagcttcgtggccctggtggacggctactttaggttgaccacggacagccagcattttttctgcaaggaagtggctcctccaaggctgctcgaggaggtcgcggagcagtgtcacggtcccattaccttagatttcgcgatcaataaattaaagacagggggatctagacccggaagttatgtcttgagaaggagcccccaagactttgattcctttctgctgacagtatgcgtgcagaacccgttgggcccagactataagggctgccttattcgacggagccccacaggcacgtttttgttagtgggactctccagaccacactcctccctccgagagcttctcgctacatgctgggatgggggactgcacgttgatggcgtggccgtcaccctgacatcatgctgcataccaagaccaaaagagaaaagtaatcttatagtggtccaacggggtcactcaccaccaacatcctcccttgtccagccccaatctcagtatcaactgagccagatgactttccataaaattcctgccgattcccttgagtggcatgagaaccttggccacggatcgtttacaaagatttacagggggtgccgccacgaggttgtggacggtgaggccagaaaaactgaggtgttgctcaaggtgatggatgctaaacacaagaattgtatggagagttttttggaagccgctagtctgatgtcccaagtaagttatcgtcatctggtactgctacacggcgtgtgtatggccggtgactctaccatggtgcaagaattcgtacacttgggcgctattgatatgtacttaagaaagaggggccatctggtgcccgcatcatggaagttacaggtggttaagcagctggcctacgcacttaattatctggaggacaagggccttccacatgggaatgtctcagctcggaaggtcctgctggcacgggaaggggcagatggtagcccgccttttatcaagttatctgacccgggagtctctcctgctgtgcttagcctggagatgctcaccgaccgcatcccctgggtagcacccgagtgcctgcgggaagcccagacgctgagcctcgaagcagacaaatggggcttcggggcaacagtatgggaagtattttctggggtgacaatgcctatctcggctctggatcctgcgaagaaactgcagttctacgaagacaggcaacaacttccggcacctaagtggaccgagctggcacttttgatacagcagtgcatggcgtacgagcctgtgcagaggcccagctttcgcgcagttatacgagacctgaactctctcatctcctccgactatgagcttctctccgaccccacaccgggagctctggcccctcgggacgggctgtggaatggtgcccagttatacgcatgtcaggaccccaccatcttcgaggagagacacttgaagtatatttcacaactcgggaaagggaatttcggttctgtagagctctgtcgttacgatccccttggggacaatacaggcgctcttgtggccgtgaagcagctgcagcacagcgggccagatcaacagcgcgatttccagcgcgagattcagatcttaaaagcgctccacagcgactttattgtgaagtatcgaggggtgtcatatggcccaggcaggcagagcctgcggctggtcatggagtatttaccttcgggttgcctgagggacttccttcagagacacagggcgcgactggatgcaagccgcctcttgctgtatagctctcaaatatgtaaaggaatggagtatttggggtctcggaggtgtgtgcaccgggacttagcagcacggaatatactggtggaatcagaagcccatgtcaagatcgccgactttggactggctaagttattgccattggacaaggactattatgtcgtacgggagccaggccaatctccaatcttctggtatgccccagagtccctcagtgataatatttttagtcgccagagcgatgtttggagctttggtgtggtgttatatgagctctttacatattgcgataaatcctgctcccccagcgccgagtttctgcgcatgatgggatgcgagagagatgtgcctgctctgtgccgcctcctggaacttttagaggaaggacaaagattacccgctccacctgcatgtcccgctgaggtgcacgaactaatgaagttgtgctgggctccttccccccaagaccgacccagtttcagtgcacttggaccccagctggatatgctctggtctggctcaagggggtgcgagacacacgccttcaccgctcaccccgaggggaaacaccacagtctctccttctcatag

SEQ ID NO: 227465 - DNA, 3285 bp, synthetic construct
  misc_feature 1..3285: note = Description of Artificial Sequence: Synthetic coding sequence
  source 1..3285: mol_type = other DNA
atggcacccccatctgaagaaacccctctcattccacagcggagctgttccctgttatctaccgaagccggtgcattgcatgtacttttgcctgcgcgaggcccaggaccacctcaacggctctccttctcatttggagaccatctggcagaggatctttgcgtccaggccgcaaaagccagtggcatcctgcctgtgtaccattctctcttcgccttggccacagaagaccttagctgctggtttccgccatcgcacatcttctctgtggaagatgctagcacccaggtgctattatacagaatccgtttctacttcccgaactggtttggcctggaaaaatgccatcgttttggacttcggaaggatctggcgagcgctatcctcgatttgcctgtattagaacacctcttcgcacagcacaggtcagacctagtcagcgggcgactcccagtcgggttgagcttaaaggaacagggagagtgcctgagccttgcggttctggatctggccaggatggcgagggagcaggcccagcgtccgggtgaactattaaagaccgtctcatacaaggcctgcttgcccccaagcttgcgggacctgatccaggggttgagcttcgtgacacgcaggagaattcgtagaacagtgagacgcgcactgaggcgcgtggctgcctgccaagctgacagacatagcttaatggcgaagtacatcatggaccttgagcgcctggaccccgcaggggctgctgagacgtttcacgtggggctgcccggagctcttggcggacacgatggccttggtctgctgagggtcgctggcgatggaggcatcgcctggacccagggggaacaagaggtgctgcaacctttctgtgacttcccagaaattgtggacatctcaattaagcaggcccctagagtgggcccagccggagagcataggctagtgacagtaacaagaacggacaaccaaatcctggaggcggagttcccaggactgccggaggctctgagttttgttgctctcgtggatggatactttaggcttaccaccgactcacagcattttttctgcaaggaagttgcaccacctcggctcctggaggaagtagctgagcagtgtcacggccctattacgctcgatttcgctatcaacaagttgaagaccggcggatcccgcccagggtcctacgtactgcgacggagccctcaagacttcgactcattcctgctgaccgtatgtgtccaaaaccccttagggccagattataaggggtgcctgattagaaggtctccgaccgggacattcctgctggtgggactgagtaggccccacagctccctcagagagctgttggctacctgttgggacggcggactgcatgtggacggagttgccgttacattaacctcgtgttgtattccacggcctaaagaaaaatcaaatttgattgtggtgcagcgcggacatagccctcccacctcaagcctggtccagccacaatcacaataccagttgtcacagatgacattccataagattccagctgacagtctggagtggcacgaaaatctcggccatgggtcctttacaaaaatctacaggggatgtagacacgaggtggttgatggcgaggcccgaaagaccgaggtactcttgaaggtgatggacgccaaacataaaaattgcatggagtccttcctggaagccgctagtcttatgagtcaggttagttataggcacctagtgcttctgcatggagtgtgtatggccggagatagcacaatggtgcaagagtttgtgcatttgggcgctattgacatgtacctcaggaagagaggacaccttgttccagccagctggaaactgcaagtagttaaacagcttgcctatgccttgaactatcttgaagacaagggactgccccacgggaacgtgtccgccaggaaagtactactggccagagaaggtgccgatggatcaccaccatttatcaaactgtctgacccaggagtgagtccagctgttctcagtctcgaaatgttgacagatcggataccttgggtggcacccgaatgcttgcgggaagcccagactctcagtctcgaagcagacaagtggggttttggcgctaccgtttgggaggttttttcaggagttaccatgccaatctccgctttggacccagctaaaaagctgcagttctacgaggaccgccaacagcttcctgcccctaagtggacagagctagccttactgatacagcagtgtatggcatacgagcccgtccagaggccttcatttcgggcagtgattagagaccttaattcactgatttcatccgattacgagctgctgagcgacccaacccccggagccctggccccacgggacgggctttggaatggtgcccagttatacgcctgccaggaccccacgatttttgaggaaagacacttaaaatacattagccaattaggaaaaggaaactttgggagcgttgagctctgtcgctatgaccccttaggagataacactggggcactggttgctgtgaagcagttgcagcacagtggacccgatcaacagcgggactttcagcgtgagatccagatccttaaggccctacatagtgactttatagttaagtacaggggagtgtcttacggacctgggaggcagtctctcaggctcgttatggagtatctgccatcggggtgcctgcgagatttcctgcagcgtcatcgggctcgcctggacgcctcccgcctgttgctgtattcatctcagatctgtaaaggcatggagtatcttggatcccggcgttgcgtgcatagggacctggctgcccgaaatatactggtggagtctgaggctcacgttaagatagctgacttcggcctggcaaaactgctccccttggacaaagactactatgttgtgagggagcctgggcagagcccgatcttctggtacgctcccgaatcactgtctgataacatcttttctaggcagagcgatgtctggtcctttggggtggtgctttacgaactctttacatactgtgataagtcttgctctccttccgccgagtttttacgcatgatgggctgcgagagggatgttccagctctttgtagattgctggagcttttagaagagggccagagacttcccgcaccgcctgcatgtcccgcagaagtatctgctgcaggcctggcaagcgtgagccaatctgtggattgggctggagtgtcgggcaagcccgcaggcgcttag

SEQ ID NO: 227466 - DNA, 1575 bp, synthetic construct
  misc_feature 1..1575: note = Description of Artificial Sequence: Synthetic coding sequence
  source 1..1575: mol_type = other DNA
atgtcgggcaaaaggaaaagggttgtcctcaccattaaggataagctcgatattatcaaaaagctcgaggatggcggatcttcaaaacaactggccgtgatctatggcattggcgaaactaccgtcagggacattcgaaaaaataaggaaaaaatcattacttatgccagttcctctgatagcactagcctcctcgcaaagcggaaatccatgaaacccagtatgtatgaggagcttgatcgcgctatgcttgagtggttcaaccagcagagagccaaggggaaccctatttccggtcccatctgtgctaaaagagccgagttttttttctacgccctgggaatggatggtgactttaatcctagcgcgggatggctgacgagattcaaacaaaggcattcaatccgggagatcaacatcagaaatgaacgcctcaacggcgatgagactgccgtcgaagatttctgtaacaatttcagggacttcatagaacgtgagaatttgcagcctgagcagatctataatgcggacgagacaggacttttttggaaatgtctaccctcacgaatatccgtgattaaagggaaatgtacagtacccggacataagagtatcgaggagcgagtcacaataatgtgctgcgccaatgccaccggccttcataaactgaaattgtgtgtggtgggaaaagcgaagaagcccaggtctttcaaaagcacggacacattaaatctgccggtgtcctattttagccaaaaaggcgcttggatggatctatccatctttcgccagtggtttgacaagatctttgtgccacaggtgcgcgaatacctgagatccaagggtctgcaggagaaggctgtgcttttgctggataatagccccacacacccaaatgaaaacgtattaagatccgacgatggtcagattttcgccaagtacctgcctcccaacgtagctagcttgattcagccttcagaccaaggagtgatagccacgatgaaaaggaactaccgcgcaggcctcctccagaacaacctggaagagggtaatgacctgaagtccttttggaaaaaactgactttactagacgctctttatgagatcgccatggcatggaacctagtgaaaccagtgacgatttctcgggcttggaagaagatattgccaatggttgaggaaaaggaatcattagattttgatgtggaagacattagtgtggctaccgttgccgcaattcttcagcacactaaaggtctcgaaaatgtgaccaccgagaacctcgagaagtggctggaggtggactccaccgaaccaggttacgaggtcttgaccgattcagagataatcaggagagcgcagggccaggcagacgagtcgagtgaaaacgaggaggaggagattgaattaatcccggaaaaacatattaaccacgcggctgctttacagtggacagagaaccttctagattacctggagcaacagggagacatgattctccctgatcggttggttattagaaagctccgagcaacgattcgaaacaagcagaaaatgaccaagagtagtcagtag

SEQ ID NO: 227467 - DNA, 1575 bp, synthetic construct
  misc_feature 1..1575: note = Description of Artificial Sequence: Synthetic coding sequence
  source 1..1575: mol_type = other DNA
atgtctggtaaacggaagcgggtagtgctcaccattaaagacaaattggatatcataaaaaaactggaggatggcggttcatcaaaacagctggcagttatttatggcattggcgaaacaactgttcgggatatccgtaagaataaagaaaagattattacttatgcttcaagctccgatagtaccagtctcctcgctaagcgcaaatctatgaagccttcaatgtacgaggagctggatcgggctatgttagagtggtttaatcaacagcgagcaaaagggaacccgatcagcgggccaatctgtgccaaacgcgcagagttctttttctatgccctgggcatggacggcgacttcaacccttccgctggatggctaacgcgtttcaaacaacggcacagtatccgggagattaatatccggaatgagaggctcaacggagacgagacagccgtggaggacttctgtaacaattttcgggatttcatagaacgggaaaatctgcaaccagaacagatatacaatgctgacgagaccggtctgttctggaaatgtctgccatccaggatttccgtgattaagggtaagtgtactgtccccggtcacaaaagtatcgaagagagagttaccatcatgtgttgcgccaacgccacagggttgcataagctgaagctctgcgtggtaggaaaggcgaagaagcctcgctctttcaagagtacggacaccttgaatttacctgtcagctacttcagccagaagggagcctggatggacctctctatattcaggcagtggttcgacaagatatttgtgccccaagtaagggaatacctccgcagcaagggtctccaggagaaggcggttttgctcctcgataactcccctacacatcctaacgaaaacgtgctccgttctgacgatgggcagatcttcgcaaagtacctgcccccaaatgttgcctccttgatacagccctcagaccagggcgtgatagccacaatgaagagaaattacagagctggactgttacagaataacctcgaggagggtaatgatttgaaaagcttttggaaaaagctgaccctactggacgcattgtacgagatcgcaatggcctggaatctggtgaagcctgtcacgatcagtagagcgtggaagaaaatcctgcctatggtagaggagaaagagtcccttgactttgacgttgaggacatctcagtcgccaccgtagcagccattctgcagcatacaaagggcctagagaatgtgaccaccgaaaatctggaaaagtggttggaagtggatagcacggagccaggatacgaagtgctgactgatagcgagattatcaggagggcccaaggtcaggctgatgaaagctcagaaaacgaggaagaagagatcgaactcatccccgaaaaacacatcaatcacgcggcagccttgcaatggaccgagaatctattagactatcttgagcagcaaggggatatgatactacccgacagactggtaatcagaaaactgagggccaccatacgcaataagcagaaaatgacaaagtcctctcagtag

SEQ ID NO: 227468 - DNA, 1251 bp, synthetic construct
  misc_feature 1..1251: note = Description of Artificial Sequence: Synthetic coding sequence
  source 1..1251: mol_type = other DNA
atggccggtgacactcattgtccagcggaacctcttgcgagggaagggacactgtgggaggcccttagggcactgctgccacacagcaaggaggatctcaaactggatttgggggaaaaggtggaaagaagtgtggtcaccctgctgcaacgcgctacagagcttttttacgagggccgacgcgacgagtgtctgcagtccagcgaggtcattctggattactcgtgggagaagctaaacactgggacttggcaggatgtagacaaggactggaggcgggtgtatgccatcggttgcctgttaaaagccctatgcctctgccaggcccctgaggacgccaatactgtagcagctgcccttcgggtgtgtgacatgggtctgctgatgggagctgcgattctcggggatattttactcaaagtggccgcaatcttgcagactcacctgccgggaaagcggccagctaggggatctctgcctgaacaaccgtgcacaaaaaaagcacgcgctgatcatggcttgatacctgacgttaaacttgagaaaacagttccacggcttcaccgtccatccctccagcactttcgggagcagtttctggtgccaggccgtccggtgatactgaagggggtggcagaccactggccatgcatgcagaagtggtccttggagtacattcaagagattgccggatgtaggactgttcctgtggaggtcggttcccgctacaccgatgaagagtggagtcagacactgatgaccgtcaatgagtttataagcaagtatattgtgaatgagccccgtgatgtgggctacctagctcagcatcagctgttcgatcagatccctgaactcaaacaggatatctccatccccgattattgttcgcttggcgatggggaggaggaagagattactattaatgcttggttcgggccacaaggaaccatttcgcctctccaccaggatccacagcagaatttcttggtccaggtgatgggcaggaaatatattcgcttatactctccacaggagtccggtgcactctatcctcacgacactcatctgttgcacaacacttctcaagtggacgttgaaaaccctgacctcgagaaatttccgaagtttgccaaggcgcctttcctctcgtgtattctgtcccccggtgaaattttgttcatcccagtgaagtactggcactatgtgagggcactggacctgtcgttttcagtgtccttttggtggagctag

SEQ ID NO: 227469 - DNA, 663 bp, synthetic construct
  misc_feature 1..663: note = Description of Artificial Sequence: Synthetic coding sequence
  source 1..663: mol_type = other DNA
atggccggtgatacccactgcccagccgaaccccttgcccgtgaaggcacattgtgggaagccctgcgggcactcctccctcattctaaagaggatctgaagctggacttgggagaaaaagtggaaagatccgttgtgaccttgcttcagcgggctaccgagctcttttatgagggacggagagatgaatgtctgcaatcgtcagaagtaatcctcgattactcatgggagaagttgaacaccgggacatggcaggatgtggacaaagattggagacgcgtctacgctattgggtgcctcctgaaagcactgtgtctctgccaagctcccgaggacgccaataccgtggccgctgctttaagagtgtgcgatatgggtttgctgatgggcgcagcaatactcggtgacattctcctcaaagtggccgcaattctacagacccacctcccaggaaagcggcctgcgcgtgggtcccttcccgaacaaccttgtaccaaagtcgacgtcgagaatccagatttggagaagtttccaaaatttgccaaagccccattcctaagctgcatcttgagccctggcgagatcttgttcatacccgtaaaatattggcactacgtgagagctctagacctgagtttctccgtgtctttctggtggagttag

SEQ ID NO: 227470 - DNA, 1365 bp, synthetic construct
  misc_feature 1..1365: note = Description of Artificial Sequence: Synthetic coding sequence
  source 1..1365: mol_type = other DNA
atgagccgcgagaaatgctctcccggagagggggctgaagagggccgaggctccgaagcctccggactgaaggccagcgccggacacggaacagagccggcaggtggcggacctatggctggagatacccactgtccagccgaaccgctcgcacgggaaggcacgctgtgggaggcgctaagggctcttctaccccatagcaaagaggatctcaaattggatctgggcgagaaagtcgaacgctccgttgtaacactacttcagagagccacagagttattctatgagggccgtcgcgacgaatgcctccagtcctcggaggtgatcctggattacagttgggagaagctgaacacaggcacctggcaggacgtggataaggattggaggagagtgtacgccatcggatgcctcctgaaagcgttgtgtttgtgtcaggccccagaagatgcaaatactgtcgccgcagctttgcgggtctgtgacatgggactgctcatgggagcggctatcctgggtgacatcttgctgaaagtggctgccatcctccagactcacctgccaggcaagcggcctgcacggggatctctgccagaacagccctgcactaagaaggcccgtgccgaccatgggctgatccccgacgtcaagctggaaaagaccgtgcctaggctccaccgcccttccctgcagcactttcgggagcagttcctggtcccaggaaggccagtcatcttgaagggcgtggctgatcactggccttgcatgcaaaagtggtcgttggagtacatccaggagatcgccggatgtagaacggttcccgtagaagtggggtcgcgatatacagatgaagagtggtcgcaaacactgatgactgttaatgaatttatctcaaagtatatcgtgaacgagccccgagacgtgggatacttggcgcaacaccagctatttgatcagatcccggaactcaagcaggacattagcatacccgactattgttcattaggtgacggcgaagaggaggaaataacaattaacgcctggttcgggcctcagggaacgatcagcccgctccaccaggatccccagcagaacttcttggttcaggtcatgggcaggaaatatatccgactgtactcaccgcaagaatccggggcattatacccacatgacacacacctgcttcataatacctctcaggtggacgtggaaaacccagacctcgagaagttccctaagttcgccaaggccccattcctcagctgtatcctgagcccaggcgagattctattcattccagttaagtattggcattatgtgagagctcttgacctctccttctccgtttcattctggtggagctag

SEQ ID NO: 227471 - DNA, 441 bp, synthetic construct
  misc_feature 1..441: note = Description of Artificial Sequence: Synthetic coding sequence
  source 1..441: mol_type = other DNA
atgacagttaacgagttcattagcaaatacattgtcaatgagcctagggatgtgggttacctggcccagcaccagctcttcgaccagatccccgagctcaaacaggatatctctatcccggattactgttcgctgggcgacggggaggaagaagagatcactatcaatgcttggttcggcccacagggaaccatcagcccgcttcaccaggacccacaacagaattttctcgtacaggtaatgggcagaaagtacattagattatacagcccacaggagtccggggcactatacccccacgatactcaccttctgcataacacatcccaggtggacgtggagaacccggacttggagaagtttcccaagtttgccaaggccccattcctttcctgtattctcagccccggagagatcctttttattcccgttaaatattag

SEQ ID NO: 227472 - DNA, 1119 bp, synthetic construct
  misc_feature 1..1119: note = Description of Artificial Sequence: Synthetic coding sequence
  source 1..1119: mol_type = other DNA
atgaaccacaagtcaaaaaagcggattcgcgaagccaaaaggtcagccaggccggaattaaaggattctctagactggacacgccataattactatgaatctttttctctctctccggcagccgttgcagacaatgtcgaacgcgcagatgcattgcagctgagtgtggaggagttcgtagagcgatatgagaggccgtataaaccagttgttcttctcaatgcacaggaaggctggtcagcccaggagaagtggacactcgaacggctgaagcggaagtaccgaaaccaaaagtttaaatgcggcgaggacaacgacgggtactccgttaagatgaagatgaaatattatattgagtatatggagagcacccgcgacgactcccccttatatatttttgatagtagctatggagaacaccccaagcggcgaaagttgttagaagactataaggttcctaagttcttcacggacgacctgttccagtacgcgggagaaaaaaggagacccccttaccggtggttcgttatggggccacccagaagtgggaccggaatacatatagaccctctgggtacctctgcttggaacgccctggtgcagggtcacaagcgctggtgtctctttccaaccagcacacctagggagctgatcaaagtcaccagagatgagggtggaaaccagcaggacgaggccattacctggttcaatgtgatctaccctcggactcagttgcctacatggcctcccgaattcaagcctctggaaatactgcaaaaaccaggagaaacagtgtttgtgcctggagggtggtggcacgtggtgttaaacctggatactacgatcgcgatcacccagaacttcgctagctcaaccaattttccagtagtgtggcacaagacggtccggggaaggccaaaattgtcacgcaagtggtatcggatcttgaagcaggaacatcccgagttggcagtgttagcagacagcgttgacctccaggagtctacagggattgcatccgactcaagcagcgacagctcaagcagcagctctagctcatccagtgactctgactccgagagaatccgcgacacttgcgggggtagggcacatccctag

SEQ ID NO: 227473 - DNA, 1212 bp, synthetic construct
  misc_feature 1..1212: note = Description of Artificial Sequence: Synthetic coding sequence
  source 1..1212: mol_type = other DNA
atgaaccacaaaagcaagaagaggatcagggaagctaaacgatcggcccgtcccgaattaaaagactcgctagactggacccgacacaactattatgagtccttcagcttaagccccgcagccgtcgctgacaacgtcgagagggctgatgccctccagctgagcgttgaggaattcgttgagcgttacgagagaccttataaacctgttgtgctgttgaatgcccaagaaggttggagcgcccaggagaagtggaccctggaaagactaaaaagaaagtacagaaaccagaagtttaaatgcggcgaggacaatgacggatattcagtcaagatgaagatgaagtactacattgagtatatggagtcaactagagatgactctccgttgtacatcttcgacagttcctacggcgagcacccaaaaagacgtaagctgctcgaagactacaaagtgcccaaattcttcacagacgacttgttccagtatgcgggtgagaagagacgtcctccttatcggtggttcgtgatggggcctcctaggagtggcacgggcatccatatcgacccactggggacaagcgcctggaacgctttagttcagggccataagagatggtgcctgtttcctacttcaacaccccgagagttgatcaaagtgacacgagacgaagggggaaaccaacaggacgaggcgattacctggttcaacgttatatatccgagaacccagcttccaacttggccacccgaattcaagcccctggagatcctgcagaagccaggagagaccgtgttcgttcctgggggttggtggcacgtggtgctgaacctggacacgactatcgcaatcacccaaaattttgcatcatccaccaatttccctgtggtatggcacaagactgtcaggggtcgccctaagttgagtcgaaagtggtaccgaatcttgaagcaggagcatcccgagctagcagtgctcgccgactctgtggacttacaggagagcaccgggatcgcctcggactcatcctccgactcctccagttcttctagttcctcctcgtctgatagtgatagtgagtgcgagagtggatccgagggggacggtactgtacaccgtagaaagaaaagaagaacatgttctatggtgggcaatggggataccacttcccaagacgattgtgtcagcaaagagcgaagttcttcaagatag

SEQ ID NO: 227474 - DNA, 1245 bp, synthetic construct
  misc_feature 1..1245: note = Description of Artificial Sequence: Synthetic coding sequence
  source 1..1245: mol_type = other DNA
atgaatcacaagagcaaaaaacgaattcgcgaggccaagaggtcagcacgacctgagctgaaggattctcttgactggactagacataattactacgagagtttctccctctctcctgctgccgttgcagacaatgttgaacgagccgacgccctgcagctatcggtagaggaatttgttgagaggtacgagcggccatataaacccgtggtgttactgaatgcccaggaaggctggtcagcccaggaaaagtggaccctggagcggcttaagcgtaaataccggaaccagaagtttaaatgtggcgaggacaatgatgggtacagcgtaaagatgaagatgaaatactacatcgaatatatggagagcaccagagacgattctcctctatacatcttcgatagttcttacggcgaacaccccaagagacgcaagcttctcgaggattacaaggtacctaagttctttactgacgatctgtttcagtatgccggagagaagcgaaggcccccatatagatggtttgtaatgggacctccaaggtccggaacaggtattcatattgaccctttgggtacaagtgcttggaatgcactggtacaaggacacaagcgctggtgcctgttcccaacgtccacacctcgggagctcattaaagtgacacgggacgaagggggtaatcaacaagacgaggcgatcacctggttcaatgtgatctaccctcgaactcagcttcccacctggcctccagaatttaagccactggagattttgcagaaacctggagagaccgtgttcgtgccaggcggatggtggcatgtcgtgttgaacctcgacacaacaatcgctatcacacagaatttcgcttctagcacaaattttccagtggtttggcacaaaacggtccgagggcgaccaaagctgtctcgtaagtggtatcggattctgaaacaggaacatcccgaactggccgtcctggcagactccgttgatttgcaggagtcgactgggattgcatctgatagctcgagcgactcttctagctcatcgagctcatcctccagtgattctgatagcgagtgcgagagcggtagcgaaggtgatgggacggtgcacaggcgcaaaaagcgtcgaacctgtagcatggtcggtaatggtgacaccacgtcacaagatgactgtgtcagcaaggaacgctcctcatcaagaattcgggacacatgcggcggacgagctcacccctag

SEQ ID NO: 227475 - DNA, 441 bp, synthetic construct
  misc_feature 1..441: note = Description of Artificial Sequence: Synthetic coding sequence
  source 1..441: mol_type = other DNA
atgctcgcaggagctggcagacccggactgccacaaggcaggcatctgtgttggctcctatgcgcgttcacactcaagctatgccaggccgaggctcccgtgcaggaggaaaaattaagtgcatcgacgtcgaacctaccctgctggttggttgaggaatttgtcgtggccgaggagtgcagcccgtgtagcaacttcagggccaagacgacgccagagtgtggaccaaccgggtatgtggaaaagattacttgttcttccagcaagagaaatgagtttaagtcttgccgaagtgcactgatggaacagcggctgttctggaaatttgagggggctgtggtttgtgtcgctttgatatttgcttgcctggtgattattcggcaacgccagctggacagaaaggctctcgaaaaagtgcggaaacagatcgagagtatctag

SEQ ID NO: 227476 - DNA, 354 bp, synthetic construct
  misc_feature 1..354: note = Description of Artificial Sequence: Synthetic coding sequence
  source 1..354: mol_type = other DNA
atggcatgggggtggcaccttagttttctctccgcatctacgagcaacctgccctgctggcttgtcgaagaattcgttgtggccgaggagtgttcaccttgttccaacttcagggctaagacaactccggagtgcgggcctactggatatgtcgaaaagataacctgttcttcctctaagagaaacgaattcaaatcttgccggtctgccctgatggagcaacggctattctggaagtttgaaggcgcagtggtatgtgtggctcttatcttcgcttgtctggttatcatcagacagcgccagctggacagaaaggctctggaaaaagtgcgcaaacagatcgagtccatttag

SEQ ID NO: 227477 - DNA, 354 bp, synthetic construct
  misc_feature 1..354: note = Description of Artificial Sequence: Synthetic coding sequence
  source 1..354: mol_type = other DNA
atggcgtggggttggcatctgagtttcctcagcgctagcacaagcaacttgccctgttggctagtcgaggagtttgtggttgcggaggaatgtagtccatgcagtaactttagggccaagacaacaccggagtgtggacccaccggatacgtggaaaagataacctgttcatcatccaagcgaaacgagtttaagagttgcaggtccgccctgatggagcagcggcttttctggaagtttgaaggcgctgtggtatgtgtcgcactcatctttgcttgcttggtgattattcgccagaggcagcttgatcggaaagctctcgagaaggttaggaagcagattgagagcatatag

SEQ ID NO: 227478 - DNA, 354 bp, synthetic construct
  misc_feature 1..354: note = Description of Artificial Sequence: Synthetic coding sequence
  source 1..354: mol_type = other DNA
atggcctggggatggcacctgagttttctgagcgccagcactagcaacctgccatgttggttagtagaagagttcgttgtggccgaagagtgttcaccctgttcaaacttccgcgctaaaacgactcccgaatgtgggccaactgggtacgtcgaaaaaataacatgtagctcctcaaagcggaacgagtttaagtcatgcagatctgcacttatggaacaacggctgttctggaagttcgaaggggctgtagtgtgtgtagccctcatttttgcatgccttgtgatcatccgccaaaggcagctggaccgaaaagctttggaaaaggtccggaagcagatcgagagcatttag

SEQ ID NO: 227479 - DNA, 1044 bp, synthetic construct
  misc_feature 1..1044: note = Description of Artificial Sequence: Synthetic coding sequence
  source 1..1044: mol_type = other DNA
atggaaaccccattctacggggatgaggccctgtcaggactcggtgggggtgcctcgggatcagggggatcatttgcgagtcccggtcggttgttcccaggagcacctccgaccgccgctgcgggatctatgatgaagaaggacgctctgaccctgagcttgagtgagcaggttgcagccgctcttaaacctgccgcagcgccaccaccaactcctctgcgggctgacggggcaccatccgccgcacctccagatggcctattggcctcccccgacttagggctcctgaagctggcctctccggagctagaacggctaatcatacagtcaaacggtctggttacgactacgcctacatcatcccaatttctgtaccctaaggtagcagcatccgaggaacaggagtttgctgaggggtttgttaaagccttggaagatctgcataagcagaatcagttgggagcaggtgctgccgcagccgctgccgcagctgccgcagggggtccaagcggcaccgccaccggcagtgctcctcctggcgaactcgcgcctgccgcagctgcccctgaggcccctgtgtacgctaatcttagttcctatgccggtggcgctgggggagctgggggagctgcgactgtagccttcgccgcagaacccgtgccattcccccctcctccaccccctggtgccttggggcctccacggcttgctgccctaaaggatgagccgcagaccgtgccagacgtgccctcgtttggggagtctcccccattgagtcccatcgatatggacactcaggaacggatcaaggccgagcggaaacgacttcgcaatcgcatcgcagcttcaaaatgtcggaagagaaaattggagagaatttcaaggctcgaggagaaagtcaagacactcaagtctcagaacacggaactggcgagcaccgctagcctgctgcgggaacaagtggcccagctgaaacagaaagttctgtcccatgtgaatagcggctgtcagttgttacctcagcatcaggttcctgcttattag

SEQ ID NO: 227480 - DNA, 2934 bp, synthetic construct
  misc_feature 1..2934: note = Description of Artificial Sequence: Synthetic coding sequence
  source 1..2934: mol_type = other DNA
atgtctttcgctctggaagaaacactggaaagtgattgggtggccgtgcgcccacatgtgttcgatgagcgcgagaagcacaaattcgtcttcattgtggcgtggaacgaaattgaggggaagtttgccattacatgtcacaaccgaactgctcaacgccagcgaagcggtagtcgggagcaggccggtgcacggggaggcgctgaagctggcggtgccgcatccgacgggtctaggggtccagggagccccgctggaagaggcaggccagaagccacggcgtccgctacattagttagaagtccagggccacgtcggtccagcgcctgggctgaggggggttcaccgcgttccacaagaagtttgctgggcgatcctagactgaggtcccccggttccaaaggtgccgaatccagattaagaagccctgtccgggctaaacctatccctggacagaagaccagtgaggcagatgatgcagcaggagcagcggctgccgctgctagacctgctccaagggaggctcaagtaagctctgtgaggatcgtttcagccagcgggactgtttcagaggagattgaggtgctcgaaatggtgaaagaggacgaagcccctctcgccctgtcagacgccgagcagccgcctccagccacggagcttgaaagccctgccgaggaatgttcctgggcaggtctgttttcctttcaggaccttcgggcagtacaccaacagctttgctccgtaaatagtcagcttgagccatgtctgcctgtcttccccgaagagccatcaggcatgtggacagtcctcttcggaggcgctcctgagatgacagagcaggagattgacaccctctgttaccaactacaggtgtacctcggtcacggcttggacacctgcggctggaagattctgagccaggtgctatttactgaaactgatgacccagaggaatactatgagtcactgagcgagttgcggcagaaaggctacgaagaggttcttcaaagggctaggaaaagaatacaggagctgctcgataagcataaaaacaccgaaagcatggttgaactgctggatctgtatcaaatggaggacgaggcgtactcaagcttagcagaggccaccaccgagctgtaccaatacttgctgcagccctttagagacatgagagaactcgccatgcttcgccgacaacaaataaagatcagcatggagaatgactatctgggtccacgtcgtatcgagagcctgcaaaaggaagatgctgattggcaacggaaggcccacatggctgtgctgtcgatccaggatctaacagtaaagtacttcgaaataactgccaaggcccaaaaggcagtatacgatagaatgagggccgaccagaagaaattcggaaaagctagttgggccgcagccgctgaacgaatggagaagctgcagtacgctgtatctaaagagacccttcaaatgatgcgtgccaaagagatttgtcttgaacaacgcaagcacgccctaaaggaggaaatgcaatcactgaggggaggtacagaggccatcgccaggttagaccagctggaagcagactactatgaccttcagcttcagctgtacgaagtccagtttgagatattgaagtgtgaggagttgctgttgacagctcagctagagtcaattaagaggctcataagcgagaagcgggatgaggtagtttactacgatacctatgagtcaatggaggcgatgctggaaaaagaggagatggcggcttctgcctatctgcaacgcgaagagctgcagaagttgcaacagaaagcacggcaactggaagctaggcggggtcgcgtgtctgccaagaagagttacctgaggaacaagaaagaaatctgcatcgccaagcacaatgagaagatacagcagcggacacggatcgaagacgagtatcgtacacaccacacggtgcagctgaaacgcgaaaaactacacgatgaggaagaacgcaagtcagcctgggtgagccaggagaggcagcggaccttggacaggcttagaacttttaagcaacgctatcctggacaggtgatcctaaagtcgacgcgcctccgcctcgcccacgcccgacgtaagggcgctgcttcccccgtgctccaggaggaccactgcgactccctccccagcgttctgcaggtcgaggagaaaaccgaagaggtgggagagggtagggttaagcgcggaccatctcagacaaccgaaccgcagtcactagtgcagctggaagacacttctctgacccagctcgaggctacgtctttacccctaagcggggtgacctccgaattgcctccaacaatatcccttcctttgctaaataacaatctcgagccttgttccgtgactattaatcccctcccatcgccactcccacccaccccacccccacctctgcctgtagcaaaggactcaggtcccgagaccctggaaaaggacctgccccgtaaggagggcaacgagaaaagaatacctaagtccgcctccgccccatcagctcacttgttcgattccagccaactagtgtcggccaggaagaaactcagaaagacagctgaaggcctccaaaggaggcgtgtgagtagccccatggacgaggtgctcgcctccctgaagcgtgggtcatttcatctcaagaaggtggaacagagaaccctgccaccgttccctgacgaggatgactctaacaacatcctcgcacagatcaggaaaggggttaaactgaagaaagttcagaaggacgtgttgcgggagtcctttacgttgcttcctgatacggatccgctgactcggagcattcacgaggctctgcgcaggatcaaggaggcttccccagaaagtgaggacgaagaagaggcattaccgtgcaccgactgggaaaattag

SEQ ID NO: 227481 - DNA, 2967 bp, synthetic construct
  misc_feature 1..2967: note = Description of Artificial Sequence: Synthetic coding sequence
  source 1..2967: mol_type = other DNA
atgtccttcgccctcgaagaaacattggagtccgactgggttgccgttcggccacacgtctttgatgagcgggaaaagcataagttcgtgtttatcgtcgcctggaacgaaatcgagggcaaattcgctataacgtgtcataatagaaccgctcaaagacaacggagtgggagcagagaacaggccggagctaggggcggagccgaagccggaggagctgcttccgacggaagtcgcggacctggttcccccgctggcagaggcagacccgaagccacagcgtctgctacgcttgttagatccccaggaccccgaagatctagcgcatgggctgaaggaggctctcctcgcagcacacggagcctgcttggagatccaaggttgaggtctcctggttctaagggtgcggagtctcggctgcggagcccagtacgggcaaagcctatacccggtcaaaagacaagcgaggccgacgacgctgcgggtgcagccgcagcagcagcacgtcctgcccctcgcgaagcccaggtttcatcagtgcgtatagtgagtgcttctgggaccgtttctgaggagatcgaggttttggaaatggtgaaggaagatgaggcccctcttgccctttcagatgccgagcagcctcctccagcgacagagctcgaatcacccgctgaggaatgctcttgggccggattgttcagttttcaggatttacgcgcagtgcaccagcagttgtgctctgtcaatagccagctggaaccatgtctcccagtcttccctgaggagcctagtgggatgtggaccgtgctgttcggcggagcacctgagatgacggagcaggagatcgacactttgtgttaccagctgcaggtatatctcgggcacggcttggacacctgcggttggaaaattctgagccaggtgctgttcactgaaaccgacgacccggaagagtattacgaatctcttagcgagctgagacaaaaaggatatgaagaggtgttacagagggccaggaagagaattcaagagctgttggacaagcacaaaaacacagagtcaatggtcgagctcctggatctctaccagatggaggacgaggcttatagcagcctggctgaggctaccaccgagctttaccagtatttgctgcaaccttttcgcgatatgcgagaacttgctatgcttagaagacagcagatcaagatttcgatggaaaacgactatctcgggccacgcaggattgagagtcttcagaaggaagacgcagactggcagagaaaagcccatatggccgttcttagtatacaggatctgactgttaagtactttgaaattactgctaaggctcagaaggcggtgtatgacagaatgcgcgctgaccagaagaagtttgggaaggcttcttgggccgctgccgcagagcgtatggagaaactgcagtacgctgtgagtaaagagacccttcagatgatgagagccaaggaaatctgcttggagcagagaaagcatgcgctgaaagaggaaatgcagtcactgcgcggaggcaccgaagccattgcccgtctggatcagcttgaggcggactactacgacctgcagttacaattatatgaggtacagtttgaaatcctgaagtgtgaagaactgctgttgaccgctcagcttgaatcaattaaacgcctgattagcgaaaagcgcgacgaagttgtgtattatgacacctatgagtcaatggaagctatgctcgagaaagaagagatggccgctagcgcctatctgcagagagaagagttgcagaagttgcagcagaaggctagacagctcgaggcaaggcggggacgcgtgagcgccaagaaatcttatttaaggaataagaaggaaatctgtatagcaaagcataatgagaagattcaacagcggactcgaattgaagacgagtacagaacgcaccacactgtccagctgaagagggagaagttacacgacgaggaggagaggaagtcagcctgggtcagtcaggaaagacaaagaacactcgatcgtctgagaaccttcaagcagcgatatcccggacaggttatcctgaaatccaccaggctgaggcttgcgcacgccagacgcaaaggcgcagctagccccgtcttgcaggaagaccactgtgattcactgccttccgttctgcaggtcgaggagaaaaccgaagaggttggagagggacgcgtaaagcgaggaccttctcaaactaccgagccccaaagcttggtgcagttagaggatacaagccttacacagctggaggcaaccagcctccctctgagtggtgtaacttctgagctcccacccactatttctctcccacttctgaataacaatcttgagccatgcagcgtcacgatcaatccactgccctctccattgccccctacccctccacctccaccacctcctcctccaccaccacctccccctcccctgcctgtggcaaaagactccggccctgagacactggagaaggacctgcctcgcaaagagggcaacgaaaagaggatacctaagtcggctagcgccccaagcgctcacctctttgattcaagccagctcgtgtccgctcgtaagaaactgagaaaaaccgctgaaggtctccaacgcaggagagtttccagccctatggacgaggtgctcgcctctctgaagcgtggaagtttccatctcaaaaaggtcgagcaacgcactctccctccctttccagacgaggacgatagcaataacatactggctcagataaggaaaggtgtgaagctcaagaaggtgcaaaaggacgtcctgcgggaatcttttacgttactccctgatacagacccattaactcgctcaattcacgaggcactgcgtaggattaaagaggcctcaccagagtctgaagatgaggaagaggctctaccctgtacagactgggaaaattag

SEQ ID NO: 227482 - DNA, 2238 bp, synthetic construct
  misc_feature 1..2238: note = Description of Artificial Sequence: Synthetic coding sequence
  source 1..2238: mol_type = other DNA
atggaagtgatgaacctgatggagcagcctattaaagttaccgaatggcagcaaacctacacgtatgactcgggcattcatagtggtgccaatacttgtgttcccagcgtttccagcaaaggcatcatggaggaggatgaggcttgtgggagacaatacaccctgaagaagaccactacctacacgcaaggagttcctcccagccagggggatttggagtaccaaatgtccactacagctagggctaaacgcgtgcgagaagcaatgtgtccaggagtcagcggggaggattcctccctactcttagcaacacaagtcgagggccaagcaactaatctgcagcggctcgccgagccctcccagctgctgaaaagcgcaatcgtgcacttaattaactaccaggacgacgcagaacttgccacccgggcactccccgaactaactaaattgctgaatgatgaggatcccgtcgtggtgaccaaggcagccatgatcgttaaccagctcagtaagaaagaggcctcaagaagggcacttatgggaagcccacagctcgtggccgcagtggtgcggactatgcagaacacttccgatctggacacggcacgatgcactaccagcatactgcacaacctcagtcaccacagagagggcctgctggcaatttttaagtccggaggcatcccggctctagtgagaatgctgtccagcccagtcgagagcgttttattctatgccatcactacactccacaaccttctgttgtatcaagaaggtgccaaaatggctgtgcggctggctgacgggctccaaaaaatggtacccctgttgaacaaaaataaccccaaatttctggcgatcacgactgactgcctgcaacttctagcatacggaaatcaggagtccaaactcatcatactcgcaaatggtggcccacaggctctggtgcaaatcatgagaaactattcatatgaaaaactcctgtggacaacttcaagagttttaaaggtcctctctgtctgcccttctaacaaaccggcaatcgtggaagccggaggcatgcaggctcttggcaagcatctgacctcgaacagcccaaggctggttcagaactgtctatggacactcaggaatctgagcgatgtcgcaaccaagcaggagggactcgagagtgtgctgaaaattttagtgaaccaactctctgtagatgacgtcaatgtgctcacttgtgctacaggaacactctcaaacctgacgtgcaacaacagcaaaaacaagaccctggtgacgcaaaacagcggagttgaggcgctcatccacgcgattctgagggcgggagacaaggatgatatcaccgagcccgctgtttgcgcactgcggcacctcacttctcgacacccggaggcggaaatggcccaaaactcggttagactgaattacggcatccccgcaatcgttaagctacttaaccaacctaaccaatggccccttgttaaagccactatcgggctgattcgcaacctcgctttgtgtccagcaaatcacgcccctttacaggaggccgcagtcattccgagactggttcaacttctggtcaaggctcatcaagacgcacaacggcacgtggctgccggtacacagcagccatacactgacggtgtacgcatggaagaaattgtcgaaggttgcactggagctctgcatattctggccagagatcctatgaatagaatggagattttcagattgaacaccataccactgtttgtgcagctgctgtactcttcagtggagaacatccagagggttgccgctggcgttctgtgtgagctggcgcaggacaaggaggccgctgacgcgattgacgccgagggtgccagtgcccctttgatggagttgctgcattcacgaaatgagggaaccgctacctacgctgcggcagtgctgttcagaatctcagaggataagaatcccgactatagaaagagggtctccgtggagttgaccaattcattgtttaagcacgacccagctgcatgggaagccgctcagagcatgattcccatcaacgaaccgtacggggacgacatggacgcaacatataggcccatgtattcaagcgacgtgcctctggacccactagagatgcacatggacatggacggcgattaccccatagacacatactcagatggcctcaggcccccatatcctacagcggatcacatgctcgcatag

SEQ ID NO: 227483 - DNA, 2238 bp, synthetic construct
  misc_feature 1..2238: note = Description of Artificial Sequence: Synthetic coding sequence
  source 1..2238: mol_type = other DNA
atggaagtgatgaacctgatggagcagccaattaaagtgacggaatggcagcaaacttacacatacgatagcggtattcattcgggcgctaatacatgcgtgccctcagtatcttccaagggcattatggaggaagatgaagcttgtggtcgtcaatataccttaaaaaagacgactacatatacacagggagtgccccctagtcagggagacctggaataccaaatgagtacaactgccagggcaaaaagagtacgcgaagcaatgtgccctggcgtgtctggagaagattcctcccttctgctcgcaactcaagtggagggtcaagccacaaatcttcagaggttggcagaaccttcgcagctgctgaaaagcgccatcgtgcacctgattaactatcaagacgatgccgaactggccactcgtgctctgcccgagctgacaaagctgttgaacgatgaggatccagttgtcgtaactaaggccgctatgatcgtgaaccagttgtctaagaaagaggcctctcggagggccctaatgggcagcccccaattggttgccgcagtggttcgcacaatgcagaatacatccgacctggatactgcaagatgtaccacttctattctacacaacctgagccaccatcgtgaggggctactggccatcttcaagagcgggggaatcccagccctggtcagaatgctctcaagcccagtggaaagcgtcctgttctacgccattacaacactgcacaacctacttttataccaggagggagcgaaaatggcagtcaggctggctgatggacttcagaagatggtcccgctgcttaataagaacaatccaaagttcctggcaatcactacagactgtcttcagctcctggcctatgggaaccaagaatcaaagctgataattttggccaatgggggtccccaggccttggtacagatcatgcgcaattacagctacgagaagttgctttggacaacctcccgggtgttgaaggtgctatctgtctgccctagcaacaaaccggctattgtggaagcagggggtatgcaggcacttggcaagcatttaacatctaattctccaaggttagtgcagaactgcctctggacattaaggaacctctccgatgtggccacaaagcaggaagggctggagtcggtcttaaaaattctggtgaaccagctgagcgtagatgacgtcaatgtcctaacttgcgctaccggaacccttagcaacctgacctgcaacaatagtaaaaacaagaccttggtgacgcagaactccggagtggaagcactcatacacgcgatcctccgcgctggggataaagatgacataacagagcctgcagtttgtgctcttcgacaccttacgtccagacaccctgaagccgaaatggcacagaactctgtccgactgaactatggtatccccgcaattgtgaagcttctcaaccagccaaatcagtggccattagttaaagctactataggcctcatacggaacctggcattgtgccccgcaaaccatgcccctctacaagaggcagcagttattcccaggcttgtccaactgttggttaaagctcatcaggacgcacagcggcacgtggcagcagggacacagcagccatatacagacggggttaggatggaggagatcgtggagggatgcactggcgctctgcacattctagcaagggatccaatgaatcggatggagatattccgactgaatacaattcccctgtttgtccagctcctttactcgtctgtggagaacattcaacgcgtggcagccggagtcttatgtgagttagcacaggacaaggaggcagcagatgcaatcgacgctgaaggcgcatctgcacctctgatggaactcctccactctaggaacgagggcacagccacttacgcagcggctgtgctcttcaggatctctgaggacaagaaccctgattacaggaaaagggtgtctgtcgaactgacaaattctctgttcaagcacgaccccgctgcttgggaagccgcacagtcaatgattccgatcaacgaaccttacggtgacgatatggatgccacctataggccgatgtacagcagcgacgtgccactggaccccctggagatgcacatggacatggacggggactatcccatcgacacttattccgacggcctgcgccctccttaccccacagctgatcatatgctcgcctag

SEQ ID NO: 227484 - DNA, 2238 bp, synthetic construct
  misc_feature 1..2238: note = Description of Artificial Sequence: Synthetic coding sequence
  source 1..2238: mol_type = other DNA
atggaagtgatgaacctgatggaacagccaatcaaagttacagaatggcaacagacttacacctatgacagtggtatacatagcggtgctaacacttgtgtaccaagtgtgtcatccaagggaatcatggaagaggatgaggcatgcgggagacaatacaccctgaagaaaacaaccacctatacacagggggtcccaccatcacaaggggacctagagtaccagatgtctacaactgcccgtgcaaagcgggtgcgggaagcgatgtgccctggggtgtctggggaagattcctcgttgcttttagccactcaagtagaaggtcaggctaccaacttgcagcggctcgcggaacccagtcaactgctgaagagcgcaattgtgcacctgattaattaccaggatgatgcagaactcgcaacacgagccctgccagaacttactaaactccttaacgatgaagatccagtggtcgtcacgaaggccgcaatgatcgtgaatcagctttccaaaaaagaggcctcacggagggccctgatgggtagtccacagctggtggccgcagttgtcaggacaatgcagaatacgagcgaccttgataccgcccgatgtactacttcaatattacataatttaagccatcaccgagaagggctcctagccatctttaagagcggaggcatccccgcacttgtaagaatgctcagcagccccgtggaaagcgtcctgttttatgctattaccaccttgcacaacctgctattgtaccaggagggagccaaaatggccgtcaggcttgccgatggcctccagaagatggtgcccctattgaacaagaacaatccaaagttcctagccatcactaccgactgccttcagctcctagcatacggaaatcaagaaagcaagttgatcatcttggcaaacggaggccctcaggctctggtccagattatgcggaactattcctatgaaaaactgctatggaccacaagccgtgtgctcaaagtcctgagcgtttgtcccagcaacaagccagccattgtagaggcaggcggaatgcaggctttgggcaaacatctgacatccaactcccccagacttgtgcaaaactgtctgtggactcttaggaaccttagtgatgtggctactaagcaggagggcctagagtctgtcctgaagattctggtgaaccagctatccgtagacgacgtcaacgtcctcacatgcgcaaccggcaccctttctaacctcacttgcaacaactctaagaacaagaccctggtaacacagaattcaggagtcgaagccctgatccatgcaatcctccgtgctggagataaggacgatatcacagagccagcggtctgcgccttgcgccatttgacatcacgccatccagaagccgagatggcccaaaattccgtccggctgaactacggcattcccgctatcgtgaagctacttaatcaacccaaccaatggcctttggtaaaggccaccatcggcttaattagaaacttggccctctgtcccgctaatcacgcgccactgcaggaggccgctgtgatacccaggctcgtccagctactcgtcaaagctcaccaagacgctcagcggcacgtggccgcaggcacccaacagccctacaccgatggggtcagaatggaagagattgtagaaggttgtacaggggcattgcatatcctggctcgggacccaatgaatcgaatggaaatattccggctgaataccatacctttatttgtgcaacttctgtatagttccgtggagaatatacagagggtggccgcaggcgtcctttgtgaactcgcccaggataaggaggccgctgacgcaatcgacgccgagggcgcttctgctcctctgatggagctgctccattcccgcaatgaaggcacggcaacttatgcagcagctgtactgtttcggataagcgaagacaaaaatcctgactatcgaaaaagggtaagcgtcgagctcacaaacagtctgttcaagcacgatccagcagcatgggaggccgctcagtccatgatcccaattaatgagccatacggggatgacatggatgctacgtaccgcccaatgtattcttccgatgtgcctttagatcctctagagatgcacatggatatggatggtgattacccaatcgatacttatagtgacggcctgcggcctccttaccccaccgcagaccatatgctagcttag

SEQ ID NO: 227485 - DNA, 834 bp, synthetic construct
  misc_feature 1..834: note = Description of Artificial Sequence: Synthetic coding sequence
  source 1..834: mol_type = other DNA
atggaggtcatgaatctcatggagcagcctattaaggttacggagtggcaacagacgtatacttatgacagcggtatccactctggagccaacacatgtgtgccttctgtgtctagcaaagggattatggaggaggacgaagcttgtggacggcagtacactctgaaaaaaactactacctacacgcagggcgtgcccccatcacagggagacctcgagtaccaaatgtccaccaccgcacgggctaagcgggttcgggaagcaatgtgcccaggcgtgtcaggggaggactcgtctttgctactggcaacccaagtggaggggcaggctacaaatctgcaaaggctagctgagccttcacagctgctgaaatcagccatagttcatcttatcaattatcaagacgacgccgaattagctacaagggcgctcccggaactgacgaagttgcttaatgatgaggatcctgtggttgtgacaaaagcagcaatgatagtaaaccagctcagcaaaaaggaggcctcccgcagggcacttatgggctctccccagctggtcgcagctgtagtaagaactatgcagaacacttctgatctggacacagctaggtgcaccacctccatcctccacaacctctcccaccatagagagggcctgctcgcgatcttcaagagtggagggatccctgccctggttaggatgttgtccagtccagttgaatctgtcctcttttacgctatcacaaccttgcacaatcttctcctttaccaggaaggggcaaagatggcagtaaggttagctgacggtctgcagaaaatggtgcctctgctctag

SEQ ID NO: 227486 - DNA, 708 bp, synthetic construct
  misc_feature 1..708: note = Description of Artificial Sequence: Synthetic coding sequence
  source 1..708: mol_type = other DNA
atggaggtcatgaatttgatggagcaacccattaaagtgactgagtggcagcagacatatacgtacgacagtggaatccacagcggtgccaatacctgcgtcccatccgtatcatctaaagggataatggaagaggatgaggcttgcggccgacagtacactttaaagaagaccaccacttacactcagggagtgcctccaagccagggagacctggagtatcaaatgagcactacagcacgggctaagagggtgcgggaggccatgtgcccgggagtttccggcgaggattcttctctcctcctggctacacaagttgaaggacaggcaaccaacctccaacggctggctgaaccatctcaactgctgaagtccgccattgtgcatctcataaactaccaggatgacgctgagctagcaacaagggcgctgcccgagctcaccaaactccttaatgacgaggaccctgtggtcgtgacgaaagccgcaatgattgtcaaccaactgtcaaaaaaagaagcatcgaggcgtgcgcttatgggctcaccccaactcgtggcggcagtggtgcgcacaatgcagaatacatccgaccttgacacagccaggtgcactacctcgatcctccataatctctctcatcacagagaaggcctgctcgccattttcaaatctggtggtatccctgccttagtaaggatgctgtag

SEQ ID NO: 227487 - DNA, 891 bp, synthetic construct
  misc_feature 1..891: note = Description of Artificial Sequence: Synthetic coding sequence
  source 1..891: mol_type = other DNA
atggaggtgatgaacttaatggagcagcccatcaaggttacggagtggcaacagacttatacttatgacagtgggatacattcaggagctaatacgtgcgtgccgtctgtctcttctaaaggtatcatggaggaagacgaagcttgcggcagacagtacacactgaaaaaaaccaccacatacacgcaaggagtcccccctagtcagggggacctggagtatcaaatgtccaccacggcccgagcaaagcgggtcagagaagcaatgtgtccaggcgttagcggcgaggactcttctctgcttctagcgacccaggtggaggggcaggccacaaatctccagcggttggctgagccgtctcagctgttgaaatctgccatcgtccacctcattaactaccaggatgatgccgagctggcaacgagggctcttcctgaattgacaaagctgttaaatgacgaggaccctgtcgttgtcaccaaagccgctatgatcgtcaatcagctgagcaagaaggaggcttcgcgcagggccctgatgggatccccgcagctcgttgcagctgtcgtgcggacgatgcagaatacaagcgatctcgacactgccagatgtaccacttcaatcctgcacaatttgagtcatcacagggaaggcctgttggcgattttcaaaagcggagggattccagcactagtaaggatgctttcaagccccgttgagtccgtgttgttctatgccatcacaacgttacacaacctactgctgtatcaggagggtgccaaaatggctgtgagactcgccgatggactccagaaaatggtccccctgctgaacaaaaataatcctaaattcctggccatcaccaccgattgtcttcagctgttggcatag

SEQ ID NO: 227488 - DNA, 261 bp, synthetic construct
  misc_feature 1..261: note = Description of Artificial Sequence: Synthetic coding sequence
  source 1..261: mol_type = other DNA
atggaggtcatgaacttaatggaacagccgattaaggtgactgagtggcagcaaacgtatacatacgatagcgggatccacagcggcgcaaatacctgtgtcccatccgttagctcgaaggggatcatggaggaggatgaggcctgcgggcgacaatacacccttaagaaaacaaccacctatactcagggagtgcctccatcccaaggcgatcttgagtatcagatgagcactaccgctcgcgcaaagcgggtgcgctag

SEQ ID NO: 227489 - DNA, 897 bp, synthetic construct
  misc_feature 1..897: note = Description of Artificial Sequence: Synthetic coding sequence
  source 1..897: mol_type = other DNA
atggaggttatgaacctgatggaacagcctataaaggtgaccgagtggcagcagacctatacgtatgattctggtatacattcgggcgcaaatacctgcgtcccatccgtgtcatccaagggcatcatggaagaggatgaagcctgcggacggcagtataccttgaaaaagaccacaacctatacccagggcgtgcccccttcccagggtgatctcgaatatcaaatgagtacaacagctagagcaaaaagagtgagggaagccatgtgtcctggcgtctccggggaggattcttcacttctgctcgccacccaggtcgagggtcaggccaccaacctccagagactggcagagcctagtcaactactcaagtcagcaattgtccacctgatcaattaccaggacgacgctgagttagccacccgtgctctaccagaactcacaaagttgctcaatgatgaggaccctgtggtagtgaccaaggcagccatgatagtgaaccagctgtccaagaaggaagcatcacgaagagcattgatgggatctccccaactggtggccgcagttgttaggactatgcagaatacatctgatctggatactgctcgctgtacgacgagcatactccataacttaagccatcaccgcgagggtctcctcgcaatctttaaaagcggcggaattccagccctggttagaatgctgtcgagcccagtcgaaagtgtcctgttttatgccatcactactttgcataatttactgctctatcaagaaggggcaaagatggcagtgagactggccgacgggttgcagaaaatggtgccactattgaataaaaataaccccaagttcctcgcaatcactaccgactgcctgcagctgcttgcctatggctag

SEQ ID NO: 227490 - DNA, 1776 bp, synthetic construct
  misc_feature 1..1776: note = Description of Artificial Sequence: Synthetic coding sequence
  source 1..1776: mol_type = other DNA
atggaggtgatgaacctgatggaacagccaattaaggtgaccgagtggcagcagacctacacatacgacagtgggatacacagcggcgcaaatacctgcgtccccagcgtgagctctaagggcatcatggaagaggatgaggcttgtggtcggcaatatacattaaagaaaaccaccacctacacccagggcgtgccccctagtcagggggatctggagtaccagatgtctacaaccgcgagggctaagcgagtgcgcgaagcgatgtgtcctggcgtgtctggcgaggactcctcactcctcctggctacccaagttgagggccaggcgactaatttacaaaggctggctgagccatcccagctcctgaaaagcgctattgtgcacctgatcaattatcaagatgatgctgaactcgccacccgagctctgcctgagctcacaaagctattgaatgacgaggaccctgtggtggtgaccaaagctgcaatgatcgtgaatcagttatctaagaaagaggctagccgcagggccctgatgggatccccacaacttgtggcagccgtggtgaggacaatgcagaatacctctgatctggacaccgctcggtgtacgactagcattctgcacaatctctcccaccaccgggaaggcttattggcgattttcaagtccggtgggatccccgcactagttcgaatgttgagcagcccggtagagagcgttctgttctatgccataactactcttcacaaccttctcttataccaggaaggcgctaagatggctgtccgtctggccgacgggctgcagaagatggtccctctcctgaacaaaaacaatcctaaattcctggccataactaccgactgtctgcagttgcttgcgtatgggaaccaggaatctaaaatcttgaccgcaaccgtcgataacgccaacattctgttacagattgataacgcacggctggcagccgatgatttcagaacaaaattcgagacggaacaggcactgaggctctcggttgaggccgacataaacggcctgcgcagagtgttggacgagctcacattagcaagagcagatcttgagatgcagattgaaaacctgaaagaggagctcgcttatcttaagaaaaatcatgaggaagaaatgaacgcgctgcgaggacaggtcggcggtgagattaacgtggaaatggatgccgctccgggtgtcgatctgagccggattctcaacgaaatgagggatcagtacgagaagatggccgaaaaaaaccgcaaggatgcagaagactggttcttctcaaaaacagaggaactgaaccgcgaagttgctacaaattccgagcttgttcagtccggaaagtcggagattagtgaattgaggaggaccatgcaggccctcgagatcgagctgcagtctcaactaagcatgaaggcctccttggagggaaacctggctgaaacagaaaatcgttactgcgtgcaactctctcagatccagggcctcattggctccgtagaggagcagctggctcaattacggtgcgagatggagcagcagaatcaggagtataaaatcctgctagacgttaagacccgcctggagcaggagattgccacatatcgccgactgctcgagggggaggacgcccatttgactcagtataagaaggaaccggtcacaacccgacaagtccgaactatcgtcgaagaggttcaggacggtaaagtgattagctctcgggagcaggtacatcagacgaccagatag

SEQ ID NO: 227491 - DNA, 897 bp, synthetic construct
  misc_feature 1..897: note = Description of Artificial Sequence: Synthetic coding sequence
  source 1..897: mol_type = other DNA
atggccagacgctcccgccaccgattgctgctcctgctattacgctatctggtggtcgcactcggataccacaaggcgtatggcttctccgctcctaaggaccaacaggtcgtcaccgccgtcgagtatcaggaagctatcctggcctgtaagacaccaaagaaaacagtttcctcacggctggaatggaaaaaactggggaggtcagtgagcttcgtctattaccagcagaccctccaaggcgattttaagaatcgcgctgaaatgatcgatttcaatatacggattaagaatgtgacccgatcggacgccggaaagtacaggtgcgaggtcagcgccccatcggagcaggggcagaacctagaggaggacactgttactcttgaggtgctagtggcccctgcggtcccttcttgtgaggtacctagcagcgccttaagcggcactgttgtggagctacgctgccaggacaaggagggcaatcctgccccagagtacacttggtttaaagatggtatccggttgttggaaaaccctcgacttggctctcagtccaccaactcctcctatacgatgaacacgaaaacaggaacactacagttcaacacagtgagtaagcttgacaccggggagtactcttgtgaagcccgaaattctgtgggctatcgccgttgccccggaaagagaatgcaggtcgatgacctgaatatttcagggattatcgctgctgtcgtggtcgtcgcacttgtgatcagcgtgtgcgggctcggggtttgttacgcccagcgcaagggttatttctcgtccaaatatatgtttatgaagtctaacagttccagtaaggctacgacaatgagcgaaaatgacttcaagcatactaaatcatttattatctag

SEQ ID NO: 227492 - DNA, 789 bp, synthetic construct
  misc_feature 1..789: note = Description of Artificial Sequence: Synthetic coding sequence
  source 1..789: mol_type = other DNA
atggccagacggagcaggcataggctgttactgcttctccttaggtatttggtggttgcactcggctaccacaaagcttatggtttctcagctcccaaggaccagcaggtggtgaccgccgtagaatatcagggggactttaagaatagggctgaaatgatagatttcaacattaggatcaaaaacgtgacacgttctgacgcaggaaagtaccggtgtgaggtaagcgctccaagcgagcagggccagaatctagaagaggacaccgtgaccctagaggttctggtagcacctgcggtaccctcctgcgaagtcccaagtagcgctctcagtggcaccgtggtggaattacggtgccaggacaaagaaggcaatcccgctccagaatacacctggttcaaagacggaatacgcctgctggaaaatcccagactgggctcccagagcaccaattcgagctataccatgaacactaagacaggcacactccagttcaacaccgtctctaaactggacacgggtgagtactcctgcgaagcaagaaactcggtcggttacagacggtgtccaggcaagcgtatgcaagttgacgacctgaatatctcaggcatcattgctgcagtcgtggtggtggccctggtcatctctgtatgtggcttgggggtatgctacgcacagagaaagggctatttttctaaagaaacctcgttccagaagtctaactcatcaagcaaagccactaccatgtctgagaacgattttaaacatacgaaatcctttatcatctag

SEQ ID NO: 227493 - DNA, 897 bp, synthetic construct
  misc_feature 1..897: note = Description of Artificial Sequence: Synthetic coding sequence
  source 1..897: mol_type = other DNA
atggccagaagatccaggcacaggctgctgctactgctcctgcgttatcttgtggtggcactgggctatcataaggcttacggatttagtgcccctaaggaccagcaggtcgtgaccgctgtcgagtatcaggaagcgatactggcctgtaagactcccaaaaaaacagtcagtagtcgcttggaatggaagaaactgggaagatccgtttccttcgtctattaccagcagaccctgcaaggagatttcaagaatcgagctgagatgatagatttcaatatcagaatcaagaacgttactcgctcagacgctgggaaatatagatgcgaagtgtcagccccatctgagcaggggcaaaatctggaggaagataccgtgaccctggaagtactggtggctccagctgtgccctcatgcgaggtgccctcgtccgctctctccgggactgtggtggaacttcggtgccaggataaggaagggaatcccgctcctgagtacacatggtttaaggatggcatccgactcctggagaacccaagactgggtagtcagagtacaaactcatcctatacgatgaataccaaaacagggacccttcaatttaatactgtgagcaagctcgacactggagaatacagctgcgaggcgaggaactccgtgggctatcggcgatgtcctgggaagaggatgcaggtggacgatctgaatatctctgggataattgctgccgttgttgttgtggcacttgtgatctcggtgtgtgggttgggagtctgctatgctcagcgcaagggatacttctctaaggaaacaagcttccagaagtcaaacagtagctcgaaagcaactacgatgtcggagaacgatttcaaacatacaaaatccttcattatctag

SEQ ID NO: 227494 - DNA, 939 bp, synthetic construct
  misc_feature 1..939: note = Description of Artificial Sequence: Synthetic coding sequence
  source 1..939: mol_type = other DNA
atggcacgacggagccggcatcgcttattgcttttgctgctccgctatctggtggtggcgctcggatatcacaaggcctacggattctcagcccctaaggaccagcaggttgtcactgctgtggaataccaggaggccatcctggcctgtaaaacgcctaaaaagaccgtgtcatcacgcctcgaatggaaaaagttgggcaggtccgtctcttttgtgtattatcagcagactctgcagggagatttcaaaaatagggccgagatgatcgacttcaacattcggattaaaaacgtgactcgaagtgacgctggaaaatatcgctgcgaggtgagcgctccatcagagcagggacagaatttggaggaggatacggttacactcgaggtgctggtggcacctgccgttccttcctgcgaggtccctagctccgcgctgtccggcaccgtcgtggagctccggtgccaggataaggaggggaatcctgccccagagtacacttggttcaaggatggcataaggctccttgagaatcccagacttgggagtcagtcaacaaactctagttatacgatgaacacaaaaacagggacactgcaatttaataccgtgtccaaactggacacgggggagtacagctgcgaagcccgaaatagcgtgggctaccgccgatgccctggaaagcgcatgcaggtggacgatctgaacatttctgggatcattgccgctgtggtggtggtggctctggtgatctctgtgtgcggccttggcgtttgctatgcccagcgcaaaggctacttctctaaagagacctcttttcagaaatcaaactcttcgtctaaggccacaaccatgtcagagaatgtgcagtggctgacgcccgtcatccctgccttatggaaagcagccgcaggtgggagtagaggtcaggagttttag

SEQ ID NO: 227495 - DNA, 933 bp, synthetic construct
  misc_feature 1..933: note = Description of Artificial Sequence: Synthetic coding sequence
  source 1..933: mol_type = other DNA
atggccctgcggcgtccacccaggcttagactttgcgccagattgcctgattttttcctgctgctgctgtttcggggatgtcttataggtgctgtgaatctcaagtcgtctaaccgtacccctgtggtccaggagttcgaatcggtagagctgtcatgcattatcactgacagccagacctctgacccacgtatcgaatggaaaaagatacaggacgagcagacgacctatgtgttttttgataataagatccagggggatctcgccggacgcgcagagatcttgggaaaaacctccctgaaaatctggaatgtgacaagacgcgacagcgctctctacagatgtgaggttgtggcgaggaacgaccgtaaggagatagatgagatcgtaattgaactgactgtccaagtgaagccggttaccccagtctgccgggtgcctaaggcggtcccggttgggaagatggccacgctgcactgccaagagtcggaggggcatcctcgccctcattatagctggtacaggaatgatgttcccctgcctacagacagtcgcgctaaccctcgattccggaattccagtttccacctcaactccgagactggcactctggtgttcaccgctgtccacaaggatgattctgggcagtattactgtattgcttcaaatgatgcgggtagtgctcgctgcgaggaacaggagatggaggtgtacgatttaaacatagggggtattattggcggagtcttggtcgtgcttgctgtgcttgctctgatcacgctaggcatctgttgcgcctatcgtcggggttacttcattaacaacaagcaggatggagagtcttataagaaccctggcaagcccgacggtgtaaactatatccgaactgatgaggaaggagactttaggcacaagagctcctttgttatttag

SEQ ID NO: 227496 - DNA, 780 bp, synthetic construct
  misc_feature 1..780: note = Description of Artificial Sequence: Synthetic coding sequence
  source 1..780: mol_type = other DNA
atggctctcaggcgccctccgcgactgaggctctgtgccaggctgcctgatttcttcctgctgctccttttccgtgggtgcctcatcggggctgttaacttgaagagctctaatcgcacacccgtggtgcaagaattcgaatctgtagagctgagttgcatcatcacagattcccagacgtctgatcccagaatcgagtggaaaaagatccaggacgagcagacaacctatgtctttttcgacaacaaaatacaggtgaaaccagtgaccccagtgtgccgggtacctaaggcggtgcccgtcggtaagatggccacgctccactgccaggagagtgaagggcatccgcgaccccactactcctggtaccgcaatgacgtgccactccctaccgattcccgggctaaccctcggttccggaattccagcttccacctgaactccgaaaccgggacactggtgttcacagctgtgcataaggacgacagtggccagtactactgcatcgcatccaatgatgcgggatctgctagatgtgaagagcaagagatggaggtgtatgacctgaatatcggaggtataatcggcggagtgttggtagtccttgccgttctagccctaatcaccctgggtatctgttgcgcttaccggagagggtacttcatcaacaacaaacaggatggggaaagttacaagaaccccggtaagcccgacggggtgaactatattaggactgacgaggagggggattttagacacaagagttctttcgtgatttag

SEQ ID NO: 227497 - DNA, 1068 bp, synthetic construct
  misc_feature 1..1068: note = Description of Artificial Sequence: Synthetic coding sequence
  source 1..1068: mol_type = other DNA
atggtccccgctcgcctcggccctgctgtcgccatggtgacaggcgctggcaggagggtcttggcgggatgggctcacgccaggggagattacaaaccaagaagagccgcagctggcccatctgcgaccctggacatggcccttcggcgtcccccacgactgaggttgtgcgccaggttacctgatttcttcctgctgctcctgtttagaggatgcctgattggcgcagtgaatctgaagagcagcaatagaacccccgtagtgcaggaattcgagtcggtggaacttagctgcattatcacagatagccaaacttctgaccctcgcattgagtggaagaagattcaggacgagcaaaccacctacgtctttttcgataacaagattcagggtgaccttgctggcagggccgagatcctgggcaagaccagtctcaagatttggaatgtcactcgacgagattcggctctgtaccggtgcgaagttgttgctcgaaatgatcgaaaggagatcgacgaaatagtcattgagctgactgttcaggtgaaacccgttacaccagtgtgccgggtgccaaaagctgtgcctgtgggaaaaatggccaccctacactgtcaagaaagcgagggacatccaaggccccactactcatggtatcggaacgacgttcccctccctaccgattccagagctaatccgcgtttcagaaactcatcctttcatctgaattccgaaaccgggaccttggtgtttactgccgttcataaagatgatagcggccagtactactgtatcgcctcaaatgacgcaggtagtgccagatgtgaagagcaggagatggaagtatacgatctgaatattgggggtattataggaggtgttttagtggtcctggcggtgttagcgcttatcacattggggatctgctgcgcgtaccgaagaggctatttcataaacaacaagcaggacggagagtcttacaagaatcccggtaagcctgatggcgtgaattatattcgaactgatgaggagggtgatttcaggcataagagctcttttgtgatttag

SEQ ID NO: 227498 - DNA, 1986 bp, synthetic construct
  misc_feature 1..1986: note = Description of Artificial Sequence: Synthetic coding sequence
  source 1..1986: mol_type = other DNA
atgacagggggtcgtttcgacttcgatgacggcggaacgtactgtgggggatgggaagagggcaaagcacacggacatggtatttgtacagggccaaagggccaaggggaatattccggaagctggtctcatgggtttgaggtggtggggggatatacttggccatccggcaatacttatcagggctattgggcccagggcaagcggcacggattgggcgtggaaacaaaggggaagtggatgtatcgcggtgagtggtcccacggcttcaagggacgctacggcgtgaggcagtctctttgtacacctgctcggtacgagggaacctggtctaacggactgcaggatggctatggtgttgaaacatatggtgacggcggaacataccagggccagtgggccggtggcatgagacacggatacggagtgcgacagagtgttccatatgggatggccactgtcatcagatcccctctgcgcacatccctggcaagccttaggagtgagcagagcaacggatctgtcctgcacgacgccgcagctgctgccgacagtccagccggaacacggggtgggttcgttctgaactttcacgccgatgccgaacttgctgggaaaaagaagggcggattgttccggagggggagtctactagggtccatgaagttaaggaagtcagaatcgaagagttcaatttctagcaagcgttcaagcgtgcggtcagacgcagctatgtcacgtatcagcagctcagacgccaattctaccatttctttcggggatgttgactgcgatttttgccctgtggaggatcacgttgatgccacaacaaccgaaacctacatgggagaatggaagaacgacaagcgcaacggcttcggagtgtcagaacgaagtaatggcatgaagtatgaaggtgagtgggcgaacaacaagagacatggatacggctgtactgtgtttcccgatggcagcaaagaagagggtaagtataagaacaacattctggtgcgagggatccggaaacagttgattcctatcaggcatactaagaccagagaaaaggttgaccgagccatagagggagcccagagggccgcagcaatggcccgtactaaggtggaaatcgctaacagcagaacggcacatgcgagagccaaagccgacgctgcagatcaagctgcgctagcggctagacaggagtgcgacatagcaagggctgtggcaagggagctttccccagacttttatcagcctgggccagactacgtgaaacagaggtttcaagaaggagtggatgccaaagagaatcccgaagagaaggttccagagaagccccctacacccaaggagagtcctcatttttacagaaagggaacaactccacctagatccccggaagcctcgcccaagcattcgcatagccctgcgtcttctcctaagcccttgaaaaagcagaacccgtcttcgggggcaagactgaatcaggacaagcgatccgttgctgatgaacaagtcacagccatagttaataaacccctgatgtccaaggctccaacaaaggaagcaggtgccgtggtaccgcagtccaagtactccggacgccatcacatcccaaatccgtccaatggcgagcttcactcacagtaccacggctactatgtcaaacttaatgccccacagcaccctcccgtggacgtggaggacggagatggatcaagccagtcgtcatccgctctcgttcacaagccaagtgctaataaatggtcgccgtcaaaatccgtgacgaagcccgtagctaaagagagtaaggccgagcctaaggctaaaaaatctgagctggcaatccctaaaaacccggctagtaatgactcatgtccagctcttgagaaagaggctaacagtggcccaaacagcatcatgatcgtcctggtaatgttgttaaatatcgggttggcaattctgtttgtgcacttcctgacctag

SEQ ID NO: 227499 - DNA, 390 bp, synthetic construct
  misc_feature 1..390: note = Description of Artificial Sequence: Synthetic coding sequence
  source 1..390: mol_type = other DNA
atgtctggcggtaggttcgactttgacgacggtggtgcttactgtggaggttgggaagggggaaaagctcatgggcacggtctgtgtaccggcccaaaaggtcaaggcgaatactccgggtcctggaacttcggatttgaggtcgcgggtgtgtacacatggccctctggtaatacttttgaaggctattggtcccagggtaaaaggcacggtctaggaattgagactaagggaagatggctgtataaaggtgagtggactcacggattcaagggtcgctatggtatacgacaatccagcagtagcggagcaaagtatgaagggacctggaacaatggactgcaggacgggtacgggactgaaacatacgccgacggaggtatgtgctag

SEQ ID NO: 227500 - DNA, 2091 bp, synthetic construct
  misc_feature 1..2091: note = Description of Artificial Sequence: Synthetic coding sequence
  source 1..2091: mol_type = other DNA
atgagcggtggtcggtttgactttgacgacgggggtgcctattgcggaggttgggaaggcggaaaggcccatggccatggcctgtgcacagggccaaaaggacagggcgaatacagtggcagctggaacttcggttttgaagtggcaggtgtgtatacgtggccaagtggcaatactttcgagggttactggagccagggaaagcgtcacggattggggattgagaccaagggacgatggctctacaagggggaatggacccacggctttaagggccgttacggcatcagacaatcgtcaagtagcggcgctaaatatgaagggacatggaacaacggactgcaggatgggtatgggaccgaaacctatgccgacggagggacctaccagggtcagttcaccaacgggatgcgacatggctacggggtgagacagagcgtcccttatggcatggcagtcgttgtgagatcacctctgagaacctctctgtccagtctgcgcagcgagcacagtaacggaaccgtcgccccagacagccccgcttcccccgctagtgacgggcctgcactgcctagccccgctatcccacgcggtgggttcgctctaagcctcctggctaacgcagaggccgctgctcgcgctcccaaggggggtggcttatttcagcgcggtgctttgctcggcaagctcaggcgcgcagagagccgaacatctgtcggatcacagaggtctagagtctcctttctaaagtccgacctgtcgagcggtgcaagcgacgcagcgtccactgcttcgctgggtgaagccgctgaaggagctgacgaggccgctccctttgaagccgatattgatgccacaaccactgaaacatatatgggtgagtggaaaaacgacaaacgcagcggcttcggtgtctcagaacggtcctccggccttaggtatgaaggcgagtggttggacaaccttcgacatgggtacggctgtaccacactccccgacggccacagggaggaggggaagtatagacacaatgtgcttgtcaaagacactaaacggcgtatgctgcagctaaagtccaacaaagtgcggcagaaggtggagcactcagttgaaggcgctcagcgcgctgccgctatcgcaagacagaaggcagaaatcgctgcttcgcgtactagccatgccaaggcaaaggcagaagcggctgagcaggccgcactggctgccaatcaagaatctaacatagccagaacactggctagagaactcgctcccgacttttatcagcccggacccgaataccagaagagacgcctcttgcaggagatcctggagaattctgagagcctgctggagccacctgacaggggcgctggcgctgccggactaccccagccgcctcgtgagtccccacagcttcatgaaagggaaacacctagaccggagggcggatcaccatccccagccggaacaccaccccagccaaagcggccacgtccaggggtgagcaaagatggactgctgagtcccggagcatggaacggggagccctcgggcgagggatcgcggagcgtgaccccaagtgaaggcgctggacgcaggtcccctgccagacccgcaacggagaggatggcaatcgaggctctgcaggcccctcccgctccttctcgcgaacctgaagtagccctgtatcaagggtatcactcctacgcagtgaggaccacccctcccgagccacccccttttgaggatcagccagagcccgaagtctctggctctgagtctgccccatcctccccagcaactgctccactgcaggccccaaccttacgaggcccagagcccgctcgggagacgccagcgaaacttgagcctaaacccattatacccaaggccgagcccagggccaaagctcggaagactgaagctcgtggactgactaaggcaggagcaaaaaaaaaggcaaggaaagaggctgccttggctgccgaggcggaggtggaagtggaagaagtacccaataccatcttgatttgcatggtcatcctgttgaacatcggcctggctatcttgttcgtccatctcctgacttag

SEQ ID NO: 227501 - DNA, 2247 bp, synthetic construct
  misc_feature 1..2247: note = Description of Artificial Sequence: Synthetic coding sequence
  source 1..2247: mol_type = other DNA
atgtccagtggaggcaggttcaattttgacgatggaggcagctattgcggcggatgggaggacgggaaagcacacggtcatggggtttgtacaggccctaagggtcaaggcgaatacaccggatcctggtctcacggcttcgaagtgttgggagtatatacatggccctcagggaacacttatcaggggacctgggctcaaggcaagcggcatgggattggcttggagtctaaaggaaaatgggtctataaaggggagtggacccacggcttcaaagggcgatacggagtgagagagtgtgctgggaatggagccaagtatgagggcacatggtctaacggactccaggacgggtacgggacagagacctacagtgatggcggtacctaccaaggtcagtgggtgggcggtatgaggcagggatatggagttaggcagtcggtcccctacggtatggccgctgtcataagaagtccccttcgaacgtccattaacagcctccggtccgaacatacgaacggaacagccctacatcccgacgccagtccagccgtggctgggtcgcctgcagtgagcagggggggatttgttctggttgcacactccgatagcgagatcttaaagtctaagaaaaaggggctgttccggcgtagcctgttgtcgggactgaagctgagaaaaagtgaatctaaatccagcctggcctctcagcggtctaagcagagcagtttccgctctgaggctgggatgtcaactgtatcgagtacagcctccgatatacatagcaccatttcgctgggcgaagcggaagcagagctggcggtcatagaggacgacatcgacgccaccactactgaaacatacgtgggcgaatggaagaacgataaacggtcagggttcggcgttagccagcggtcagacggcttgaaatacgagggcgagtgggccagcaatcggaggcacgggtacggttgtatgacatttcctgacggaacgaaagaagaagggaagtacaagcaaaacatcctcgtcgggggaaaacgtaagaacctaatcccactccgggcatctaagattcgggagaaagttgaccgggcagttgaagctgcagagagggccgcaaccatcgccaaacagaaagccgagatcgctgcttctcgaacctcccacagccgggcaaaagccgaggctgcactcacagccgcacagaaggctcaggaggaagccaggatagccagaataaccgccaaagagttctcaccctcatttcagcacagagaaaacgggttagaataccagcgacccaaacgccaaacatcatgcgacgacattgaggtcctgagcaccggtaccccactgcagcaagaatctccggagctctacagaaaaggcactacccctagtgatttgacccccgacgatagccccctgcaaagcttccctacttccccagctgccactcctccccctgccccagcagcaagaaataaagtagcccacttctctcggcaagtgagtgttgacgaggagagaggaggggacatccaaatgctgctggagggaagggcaggcgactgcgcacgctcatcatggggtgaagaacaagcagggggatctagaggtgtacgctccggtgcattgcgtggtggtttattggtggatgatttccgtacaagaggatctggacgtaaacaacccggaaatcctaaacctcgcgagcggcgaactgagtccccccctgtttttacatggactagccaccaccgcgctagtaaccactctcctgggggatcaaggttgcttgaactccaggaagagaaactctcaaattaccgtatggaaatgaaaccactgctccggatggagactcacccacagaagaggaggtacagcaagggcggagcctgtagaggcttgggcgacgaccaccggccagaggatcgaggtttcggcgtccagcgccttaggagcaaggctcaaaataaggaaaacttcaggccggctagctcagccgagcctgcagtgcagaagctggccagccttcgcctcggcggtgccgagcccagactcttgagatgggacctcactttctcaccccctcagaaatctctgcctgtcgcgctggaatcagacgaagaaaacggtgacgagctcaagtcttctactggctccgctcccatccttgtggtcatggtcatcctattaaacataggcgtggcaatattatttatcaacttcttcatatag

SEQ ID NO: 227502 - DNA, 561 bp, synthetic construct
  misc_feature 1..561: note = Description of Artificial Sequence: Synthetic coding sequence
  source 1..561: mol_type = other DNA
atgtcttcaggaggcaggttcaattttgacgatggcggtagctattgcggcggatgggaagacgggaaagcccacggccacggtgtctgtactggcccaaagggccagggtgagtacactggctcctggagccatgggttcgaggtgctgggggtgtatacctggccaagcggtaacacttatcaggggacatgggcacaaggcaagagacacggaattggtctggaaagcaaaggaaaatgggtctataagggcgaatggacacacggctttaagggacgatacggggtgagggagtgtgctgggaacggcgcaaagtatgaggggacctggagcaatggtctgcaggacggttacggcacagaaacatattccgacggtgatgctacagcttttggcgctgagcccggtcccgaagctcgggagttacccgcagctgctgcggcagcagccgctgcagctgcagcagccgttagatggtttctctgtcgggaaccctggccagctttgcaactgcctgcctgcctggattctcctatctctaccccccaatgtacgtag

SEQ ID NO: 227503 - DNA, 96 bp, synthetic construct
  misc_feature 1..96: note = Description of Artificial Sequence: Synthetic coding sequence
  source 1..96: mol_type = other DNA
atgccacctcacagcgggcagagtcgcggtagaaaacccggttcctgtctgctattgctactgcttcttctactcctcttgctgctcctgctgtag

SEQ ID NO: 227504 - DNA, 1836 bp, synthetic construct
  misc_feature 1..1836: note = Description of Artificial Sequence: Synthetic coding sequence
  source 1..1836: mol_type = other DNA
atgagacagggctatggggtcagacagagcgtgccatacggcatggcagccgtgatacggagccctctgagaacctccattaactccttgcggagcgaacacacgaacgggaccgcactgcaccccgatgcttcccctgcagtggctggatccccagcggtgagccgtgggggattcgtactggttgcccactctgacagcgaaatcctcaagtctaagaaaaagggactgttccgcagatccctgctctctggcctgaagttgcgaaagtccgagtccaaaagctcactggcatcacagcgcagcaagcagtcctctttcaggtccgaggcgggaatgtcaactgtgagctccaccgcttctgacatccactccaccatcagcttaggcgaagcagaggccgagctcgcggtgattgaggatgatattgatgccacgacaacagagacatatgttggggaatggaagaacgacaaaagaagtggcttcggggtgtcccagagaagcgatggactcaagtacgagggagagtgggcttctaataggcggcatggctatgggtgtatgacatttcctgacgggactaaagaggagggaaaatacaagcaaaacatcctggtgggaggcaagcggaagaacctgatccctttacgagctagcaagattcgggagaaagtggatcgggcagtcgaagcagctgagcgcgctgctaccatagctaagcagaaggcagaaattgccgctagtcgcactagccattcaagggcgaaggctgaggcagcgcttaccgccgctcagaaggcacaggaagaggcaaggattgctcgcatcacggctaaggaattttcaccatcatttcagcacagggagaatggtctagagtaccagagaccaaagagacagacctcgtgcgatgacattgaggttttatcaacaggaacacctcttcagcaggagtctcccgaactttaccgtaagggcactacgccttcagacctcacacctgacgattcgcccttgcagtccttccccacgtctcccgctgccactcccccacccgctcccgcagccaggaacaaagttgctcactttagtagacaggtctctgtggatgaggagaggggcggagatatccagatgctactggaaggacgggctggtgactgcgccaggtcaagctggggggaggagcaagccggaggcagcagaggggtaagatcaggagcactgcgcggtggattgcttgttgacgacttccgtacgcggggttcgggcaggaagcagcccggaaaccccaaacctagggaacgcaggaccgaatctcctcccgtttttacatggactagccaccatcgagcgagcaaccactcaccaggtggtagcagactgctcgagctgcaagaagagaagctcagtaattatagaatggagatgaagccccttctacgcatggagacgcacccacaaaaacgcaggtatagtaagggcggtgcttgtcggggtctcggggatgaccatcggccagaggatcgcggtttcggagtgcagcgccttcggtctaaagcacagaacaaggagaattttaggccagccagcagcgccgaacccgcagttcagaaattggcctcgctgcggctaggtggggcagaacccaggctcctccgctgggaccttactttctccccccctcaaaaaagtttgcctgtagcgcttgaatccgatgaggagaacggcgatgaacttaagagttccaccgggtccgcccctattctggtggtaatggtgatactacttaatatcggtgttgctatcctcttcataaacttttttatttag

SEQ ID NO: 227505 - DNA, 1347 bp, synthetic construct
  misc_feature 1..1347: note = Description of Artificial Sequence: Synthetic coding sequence
  source 1..1347: mol_type = other DNA
atgacaagctcttgctgtgtgaccaataacttgcaggcatccctgaagtcttgtccaaggccggcatctgtttgctcaagcggcgtgaactgcaggcccgagctttgcctgggctatgtttgtcagccgatggcatgtctcccttctgtatgtctgccaacaacatttcggcctgcttcctgtctgtcaaagacatatctttcttcatcgtgccaggcagccagcggcatcagtggcagcatgggcccaggatcatggtacagtgagggcgctttcaacgggaatgagaaagagaccatgcaatttctcaacgatcggctggcctcctacctgacgagggtgcgccaattagagcaggagaacgccgaattggagagtagaatccaagaggcctctcactcccaggttctcaccatgacacccgactaccagtctcatttcaggaccatcgaagagttgcagcagaagatcctctgcaccaaggctgagaacgcgaggatggttgtgaacattgataatgcgaagctggcagccgatgatttcagggctaagtatgaggctgagcttgccatgagacagctggtcgaagctgacatcaatggtctgagacggatcttggatgatctaactctgtgcaaggccgacctggaggcacaggtggagtctctgaaagaggaactgatgtgtctgaaaaagaaccatgaagaggaagtcggcagcttgagatgtcagctgggggaccgactaaacatcgaggtagacgccgcacctcccgttgacctgactcgcgtgctggaggaaatgcggtgtcaatacgaagctatggtcgaagccaatcgccgtgatgttgaggagtggtttaatatgcagatggaggagctgaaccagcaggtagctacatcctccgaacagctccagaactaccagtctgacattatcgacctgcgtcggactgtcaatacacttgaaattgaactgcaagcccagcatagcctgcgtgatagtttggaaaatactcttacggagagcgaagcgcgatactcctcacagctggcccaaatgcagtgcatgattacaaatgttgaagctcagctggccgaaatcagggctgacctcgagaggcaaaatcaggaatatcaggtgctgctcgacgtcagagcgcgacttgaaggagaaatcaatacatatcgctcactgcttgagaatgaagactgcaaattgccatgcaatccttgtagcactcccagctgcacgacctgtgtgccttccccctgtgtgcccaggacagtctgcgttccacggacggtcgggatgccatgctctccgtgtcctcaggggcgatactag

SEQ ID NO: 227506 - DNA, 1641 bp, synthetic construct
  misc_feature 1..1641: note = Description of Artificial Sequence: Synthetic coding sequence
  source 1..1641: mol_type = other DNA
atggctgaggtcgtctcccccgtcccaggggctgggaggagagagccaggagaggtgggcagggccagaggcccacctgtagccgatcccggagttgcactgagcccccagggggagataattgaaggttgccgactccccgtcctccgccgtaaccaggataatgaagacgaatggcctctagcagaaatcctttccgtcaaggacatttctgggaggaaattgttctatgtgcattacattgactttaacaaacgtctggacgagtgggtcacccatgagcgactggacctgaagaaaattcagtttcctaaaaaggaggcgaaaacccccacaaagaatggactccctggctcaaggccaggctcaccggagagagaggtgcccgcatcagcccaagcatctggaaagaccttgcctattcctgtacagattactctcaggttcaatctgcctaaggagagagaggcgatcccgggaggcgagcctgatcaaccattaagtagtagctcttgtctccagcccaatcatcgaagcacaaagcgtaaggtggaagtggtgagccccgcaacacccgttccaagtgaaactgcaccagcatctgtgttcccacagaatggagccgctaggagagcagtagctgcacagccagggcgaaagcggaagtccaattgtttggggactgatgaagactcccaggactcatccgacggaataccatctgctcctagaatgacggggtcccttgttagtgataggtcccatgacgatatcgtaacccgtatgaagaacatcgaatgtatcgaactgggcagacaccgactaaagccgtggtacttctctccataccctcaggagctgaccacgctgcctgttctgtacctgtgcgagttctgtctgaagtacgggagatccctcaagtgtctgcagcgccatctgacaaaatgcgacttgcgccacccccctggaaatgaaatatataggaaaggcaccatcagcttctttgaaatagatggcaggaagaacaaaagttatagtcagaatctttgtctccttgctaagtgctttctggatcacaaaaccttgtattacgatactgacccttttctgttctacgtcatgactgagtatgactgcaaaggtttccatatcgtcggatacttttctaaggaaaaggaaagcactgaagactacaatgtggcctgtattctgaccttgcccccttaccagcgacgcggatatggcaagctgttaattgaattctcatacgagctcagcaaggttgaaggaaagaccggcactcccgaaaaaccgctgtcggacttggggttgctttcatacaggtcatattggtcacaaactatcctggagattctcatgggcttgaagagcgaaagtggagagaggccacagatcacgatcaatgaaatcagtgaaattaccagtatcaaaaaagaagatgtgatttcaacactgcagtacctgaatcttattaattattataagggacagtatatcctgaccctctcggaggatatcgtagacggccatgagcgcgctatgctgaaacgcttgcttaggattgacagcaaatgtcttcattttacaccgaaagactggtctaaacggggtaagtggtag

SEQ ID NO: 227507 - DNA, 1386 bp, synthetic construct
  misc_feature 1..1386: note = Description of Artificial Sequence: Synthetic coding sequence
  source 1..1386: mol_type = other DNA
atggctgaggtgggagagatcattgagggctgtagactacccgtgctgaggcgcaaccaagataacgaggatgaatggcccctcgccgagatcctgtccgtaaaggatatctctgggagaaaattgttctatgtgcattacattgactttaataagagactcgacgagtgggtgacccacgaaagactggatctgaagaaaatccagtttccaaagaaagaggccaagacccctacaaaaaacggtctgccaggctctcgccctggttcccccgaacgcgaagttaagcgaaaggtcgaggttgtgagccctgccacaccagtgcccagcgagacggcgcctgcctctgtctttccccaaaatggcgcagcgagaagggcggtggccgcacagccgggacgaaagaggaagagtaattgcctgggtacagatgaagattcccaggattccagtgacgggattccttcggcgccacgaatgactggaagcctggtgagcgatcgctcccatgatgatatcgtaacccggatgaaaaacatcgagtgcatcgagcttgggcgtcaccgcctgaagccttggtatttttccccttatccccaggaactgactacgctcccagtactgtacctgtgtgagttttgcctgaaatatgggaggagcttgaaatgcctgcagcgccatttgacaaagtgcgacctccggcacccaccaggcaatgaaatctatagaaaaggaactatctccttctttgaaatcgatgggaggaagaacaaatcttacagtcagaatctgtgcctcctagccaaatgttttctggaccacaagactctctactacgacacggatccttttctcttttatgtaatgaccgaatacgactgcaagggttttcacattgtcggctacttttctaaggagaaagaatcaactgaggactacaacgtggcatgcattctgaccctgcccccttatcagcgccgtgggtacggcaagttattgatcgagtttagttacgaactctccaaagtcgaaggcaagaccggtacccccgagaaaccgctgtctgatcttggcctgctctcttataggagctattggtcccagactatcctcgaaatcttgatgggccttaagagtgagtccggtgagaggccccagataacaatcaacgagatcagcgaaatcaccagtattaaaaaggaagacgtgatttcaacactacagtacctgaatttaattaattattataaaggacagtatattctgacccttagcgaagacatcgtggatggtcacgaacgcgctatgctgaagcgacttctgaggattgactccaagtgcctgcattttacccccaaggactggtctaagaggggcaagtggtag

SEQ ID NO: 227508 - DNA, 1542 bp, synthetic construct
  misc_feature 1..1542: note = Description of Artificial Sequence: Synthetic coding sequence
  source 1..1542: mol_type = other DNA
atggctgaggtcggcgaaatcatcgagggttgtcgcctacctgtgctgcgccgaaaccaagataacgaggatgagtggcctcttgctgaaatcctatccgtcaaagacatatccggacggaaacttttctacgtgcattacatcgattttaataagagactcgacgaatgggttacccacgaaaggctggatctcaagaaaatccagttccccaaaaaggaggcaaagacacccaccaaaaacggtctacctgggtcacgccctggatcccccgagagagaggttccagcttctgcacaggcatccggaaagaccttaccaatccctgtgcagattaccttgaggttcaatctgccaaaggagagagaggctatcccaggaggagagccagaccaaccactgtcgtcctcctcttgcctccagccaaatcacagaagtaccaagcgcaaagtggaggtcgtttcgccagctacccctgttccttctgaaacggccccagccagtgtatttccccaaaatggtgctgctagaagggctgtggcagcacagccgggtcgcaagcgaaagagtaactgccttggaacagacgaggacagccaggacagcagcgatggtattccaagcgcacctcgcatgacagggtctttagtatcagataggtcacatgacgatatcgtgacccggatgaagaacattgaatgcattgagctgggaaggcaccggctaaagccatggtacttcagcccctatccgcaggagctcactactctacctgtgttgtacctatgtgaattttgtcttaagtatggccgttcactgaaatgccttcagcgtcacttaaccaagtgtgatctgcgtcacccgcctgggaacgagatttataggaaagggacgataagcttttttgaaatcgacggcaggaagaataagagctacagtcaaaacctgtgtttactggcgaagtgctttctggatcataaaacattgtactacgacacagatccattcctcttttatgtcatgactgaatacgactgcaaggggtttcatatcgtgggatacttctctaaggaaaaggaaagcaccgaagactataacgttgcttgtatcctgacactgcctccttaccagcgacggggttacggtaaactcctcatcgagttcagctacgaactttccaaggtagaggggaaaactggaacgcccgaaaaaccgctgagcgacctgggcctgctcagttacaggagctactggagccagaccattctggagattctgatgggcctcaagagcgaatctggagaacgtccccaaattacaataaacgaaatctctgagatcacaagcataaagaaggaagatgttatctccaccctccagtacttgaacctgataaattattataaagggcagtacattcttactttgagtgaggatatagtcgatggccacgaacgggctatgttaaaacgactgctgcggattgactcaaagtgcctgcactttacccccaaagactggtctaagcggggtaagtggtag

SEQ ID NO: 227509 - DNA, 1485 bp, synthetic construct
  misc_feature 1..1485: note = Description of Artificial Sequence: Synthetic coding sequence
  source 1..1485: mol_type = other DNA
atggccgaggtggtatcgccggtgcctggagccggacgacgggaacccggtgaagtcggcagagcaagggggccaccggtagcagatcccggagtggctctcagtcctcagggagagatcattgaaggctgtcgcctcccggtgcttagaagaaaccaggataacgaggacgagtggcctctcgccgagattctttccgtgaaggatatctccggcaggaagctgttctacgttcactacatcgatttcaataagcgtttagatgaatgggtcactcacgaacgattggacttaaagaaaatacagtttccaaagaaggaagccaagacccctactaagaacggactccctggctcccggccagggagccctgagcgggaggtgaaaaggaaggtagaggtggtgtcccctgccacacccgtgccatcagaaaccgcacccgcatccgtttttccccaaaacggcgctgcacgacgtgccgtggccgcacagccaggcaggaaaaggaagtcgaactgtctgggcacagatgaagactctcaagattcgagcgacgggattccttcagctccaagaatgactggctctctggtgagcgacagaagtcacgacgacatcgtaacccgaatgaaaaacatcgagtgcatcgagttgggaagacataggctgaagccatggtacttttcaccctacccacaggagctgactacattgcctgtgctctatctatgcgaattctgcctcaagtacgggcgtagcctgaagtgcctccagcgccatctgacgaagtgcgacctgaggcacccccctggaaatgaaatctatagaaaggggacgatttctttctttgagatcgacggtagaaaaaacaagtcatactcccagaatttgtgtcttctggccaagtgttttctcgatcacaagacactgtactatgacaccgatcctttcctgttttacgtgatgactgagtacgactgcaaggggttccatatcgtgggctacttctctaaagagaaggagtccaccgaggattacaacgtcgcgtgtatacttacattaccaccctaccagcgtaggggatacggcaagctcttgatcgagttcagctacgagttgagcaaggtcgagggcaagaccggtactccagaaaaacccctgagcgacctgggcttattgtcctatagaagctactggagccaaacgattctcgaaatcctgatgggcctcaagtctgaatcaggcgagagacctcagattaccatcaacgagatcagcgaaatcacatcaattaagaaagaagacgttatatccacactccaatacctgaacctcataaattattataagggccagtacattttaactctcagtgaggacatcgtggatggacatgagcgggcaatgctgaagagattgctgagaattgattccaaatgcttgcactttacacctaaggactggagcaaacgcggaaaatggtag

SEQ ID NO: 227510 - DNA, 6222 bp, synthetic construct
  misc_feature 1..6222: note = Description of Artificial Sequence: Synthetic coding sequence
  source 1..6222: mol_type = other DNA
atggtcaaactggccaacccactctacactgaatggatcctggaagccatccaaaaaattaagaaacagaagcagaggccgtccgaggagagaatttgccacgccgtgagcaccagccacgggttggataagaagactgtatctgagcagttagaactgagcgtgcaagatggttccgtgctgaaagtgacaaataaggggctggcgtcgtacaaggacccagacaacccgggaagattttctagtgttaaacccggtaccttccctaaaagtgccaagggcagtagagggagttgcaacgacctgcgcaacgtggattggaataaacttctgagacgggcaattgaaggactggaggaaccgaatggtagcagcctgaagaacattgaaaagtatttgagatcccaaagcgatcttacaagtactacaaataacccggcattccaacagcggctccgactgggagccaaaagagcagtcaataacggcagactgctgaaggacggtccccagtacagggtcaattacggctccctcgatgggaagggggctccccagtatccttctgctttcccaagtagtttacccccagtgagtctgttgccacatgagaaagaccagccccgagctgaccccatccccatttgtagcttctgcttgggaacaaaggagtccaatcgggaaaagaagcctgaagaactactcagttgcgccgactgcgggagtagtggccaccctagctgcctcaaattttgtcccgagcttaccactaacgtgaaggcactgagatggcagtgcatagagtgcaagacgtgttccgcatgtcgggtgcaaggccgtaatgccgataacatgttattctgcgattcctgcgatcggggttttcatatggagtgctgtgacccacccttgtcacggatgcctaaaggaatgtggatctgtcaagtgtgtcgaccaaagaaaaaaggccgtaaacttctgcacgaaaaggctgctcagataaagcgaagatatgcaaaacccattggaaggcccaagaataagctgaaacagcgtttgctctcggtcacctctgatgaaggttccatgaatgcttttacaggtagaggctcaccagggaggggccagaagacaaaggtctgtaccacgcccagcagtggacatgccgctagtgggaaggacagttcttcccgcttggccgttaccgacccaaccagaccaggggcaaccaccaagatcaccactacctcaacgtacatcagcgccagcacactgaaggtgaataaaaagacaaaggggttgattgacgggttgaccaaattcttcactccctctccagacggtagaagatctcggggagaaattatcgacttctccaaacactacagacccaggaaaaaggtttcccagaagcagagctgtacgtcacatgtactggccactggcactacccagaagctgaagcctccacctagctcactccccccaccgactcctatttcgggccaatctccaagctcacagaaatcgtcaacagccacttccagccccagtccgcaatcttcctcaagccagtgttcagttccgagtctgtcaagtctaaccacaaattctcaactgaaggcactctttgatgggctgtcacacatatacaccacccaaggacagtcgcggaagaagggtcacccttcttatgcacccccaaaaaggatgcggaggaagacggagctgagcagcaccgctaagtccaaggcccactttttcggaaagagagacatccgctcacgatttatatctcactcttcttcctctagttggggaatggcaagaggctctatctttaaagccattgcccactttaagcggactacgtttcttaagaaacatcgcatgcttggcaggcttaagtacaaagtcacaccacagatgggtacgccgtcaccgggaaaaggaagcctgaccgatgggaggattaagccggaccaagacgatgataccgagatcaagataaacattaagcaggagtccgctgatgtcaatgtcatcggcaacaaagacgtcgtaactgaggaggaccttgacgtgtttaagcaggctcaggaactgagctgggagaagatagagtgtgaaagcggtgttgaggactgtggtaggtaccccagcgtgatagaattcggaaaatacgaaattcagacttggtacagctccccctacccacaggagtacgccagactacctaagctttatctctgcgaattctgtctcaaatacatgaaatcaaagaatatattattgcggcacagcaaaaaatgcggttggtttcatccacctgccaacgaaatctatagacgcaaggatctatccgtattcgaagtggatgggaacatgtccaagatatattgtcagaatctgtgcctgctcgctaagctgtttctcgaccataagaccctgtattatgatgtggaacccttcttattttacgtgctcactaagaatgatgaaaagggatgccatttggtcggctactttagcaaagagaagttatgccaacagaaatacaatgtttcatgtatcatgatcatgccccagcatcagagacagggatttggacgcttcctgatcgatttcagctacctgttaagcaggcgagagggacaggccggttcacccgaaaaaccattatctgacctcggaagattgtcttaccttgcgtattggaaaagcgtcattctggagtacctgtaccatcaccacgaacggcacataagcatcaaggctatttcaagggccacaggtatgtgtcctcatgacatcgccaccacacttcaacatctgcatatgattgataagcgtgatggacgctttgtcatcatcagacgtgaaaaactgatcctgtcacacatggagaaactcaagacatgttcccgagctaacgagctggatcctgatagcctgcgctggactcccattttgatcagtaatgcggcagtgtctgaggaggagcgcgaagctgaaaaagaggccgagcgcctcatggagcaggcttcctgctgggagaaggaagagcaggaaatcctttccacaagggcaaactccagacaaagtccggctaaggtgcagtcgaagaataagtatctccattcacctgagagcaggcccgtcacaggtgagcgtggacaattgctcgaattaagcaaagagtcatccgaagaagaggaggaagaggaagacgaagaggaggaagaggaggaagaggaggaagaggaggatgaagaagaagaagaggaggaggaggaagaagaggaagaagagaacatccagtcttcgccccctcggcttacaaagccacagtcagtcgcgattaagcggaaaaggccattcgtgcttaagaaaaagaggggacggaaaaggcggcgaatcaactctagcgtgaccaccgagacaatatcggaaaccaccgaggtgctgaacgaaccctttgataacagcgacgaagaaaggcctatgccacagttagagcctacttgtgaaattgaagtggaggaggacggacggaagccggtgctccgcaaagcattccagcaccagcctggcaaaaaacggcagaccgaggaagaggaagggaaagataatcactgctttaaaaacgccgacccgtgtcgaaacaatatgaatgacgattcgtcaaatctgaaagaggggtccaaggataacccagagcctctgaagtgtaaacaggtgtggcccaaaggcaccaagcggggactttccaaatggcggcagaataaggagcgcaagaccgggttcaaactgaacttgtacacccctcctgaaacacctatggagccggacgagcaggtgactgtcgaggagcagaaagagaccagtgaggggaagacttctccctcccctattcgtatcgaggaggaagtcaaggaaactggtgaggccctgcttccccaggaggaaaaccgaagggaggaaacttgcgcacccgtgagccctaacacgagccccggagaaaagcctgaagatgacctcattaagccggaggaggaagaagaggaggaggaagaggaagaggaggaggaagaggaggaggagggagaggaggaggagggaggcggtaacgttgaaaaagatcctgacggagccaagagccaggagaaagaggaacctgaaatcagtacagaaaaggaggactccgccaggctagatgaccacgaggaggaggaggaggaagatgaggagcccagtcataacgaagaccatgacgctgatgatgaagacgattcgcacatggaatccgctgaggtagaaaaggaagagctccctcgcgaatctttcaaggaggtgctggagaatcaggaaaccttcctggacttaaacgtgcagcccggacactcgaacccagaggtccttatggactgcggagttgacttgactgcatcgtgtaattcggagcccaaggaactagcaggtgatccagaggctgtgcccgaaagcgatgaagaacccccaccaggcgaacaggctcagaagcaggaccagaaaaatagcaaggaggttgataccgaattcaaagagggaaaccctgccacgatggaaattgattccgagactgtgcaggcagtgcagtctctgacgcaggagagctccgagcaagacgatacctttcaggattgcgcagagacccaggaggcatgcaggtcccttcagaactataccagggcagaccagtccccccagattgcgacaactctagacgattgtcagcaatcagaccacagttcccccgtgtcctcagtgcactcccaccccggtcagtccgtacgctccgtgaactctccgagtgtgccagccctggagaacagttacgcacagatcagtcccgatcagagtgccatctcagtcccctccctccagaatatggaaacaagccctatgatggacgtgccatctgtatctgatcacagtcaacaagtcgtggacagcggcttttcagatctgggctctattgaaagcacaacagagaactacgagaaccccagttcttacgattcaaccatggggggtagtatctgcggcaatggaagcagccaaaattcctgttcctattccaatctgacttcttcttccttgactcagtctagctgcgcggtcacgcagcagatgagcaacatctctgggtcttgctcaatgctgcaacagaccagtatttcaagcccccctacttgctccgttaagagcccacagggctgcgtggtagaaagacccccttcctctagccagcagctggcacagtgcagtatggccgctaattttacgccacccatgcagctcgcggaaatcccagaaacctctaatgccaacatcggcctgtacgagcgcatgggacagtccgactttggcgcaggccactacccccagccttccgcaacgtttagtcttgccaagctgcaacagctgactaacactctcatagaccactccctgccatactcccatagcgcggcagtcacatcttatgcaaacagcgcttcgttatcaaccccactcagcaatacagggttggtgcagttatcgcagtctcctcattctgttcctggtgggccacaagcccaggctacaatgacgccacccccaaaccttacacctccccctatgaacctccctccgcctctgctgcagcggaatatggccgcttctaacatagggatctcccactcacagagactccagacgcagatcgcctcaaaaggccacattagcatgcggaccaaaagcgcctctctgtctcccgctgccgcaacccatcagagccagatctacggccgaagtcaaaccgtcgccatgcaaggtccagctcggaccctgaccatgcagcgtggcatgaacatgtctgtcaaccttatgcccgcacctgcctataacgtgaattcagtaaacatgaacatgaacaccctgaacgctatgaacggatactcaatgtctcagccgatgatgaactctggctatcacagtaatcatggctatatgaaccagaccccccagtaccctatgcagatgcagatgggcatgatgggaactcaaccgtatgcacaacagccaatgcaaaccccacctcatggaaatatgatgtacactgcccctggtcaccacggttatatgaatacaggcatgagcaaacaaagcctcaacggcagctatatgagaaggtag

SEQ ID NO: 227511 - DNA, 5672 bp, synthetic construct
  misc_feature 1..5672: note = Description of Artificial Sequence: Synthetic coding sequence
  source 1..5672: mol_type = other DNA
atggtgaagctagctaaccccctttatactgaatggatcttagaggctatacagaagattaaaaagcaaaaacagcgccctagtgaagagagaatttgtcacgcggtgtccacaagccacggcctcgataagaagaccgtatccgaacagctggagctgtcagtccaggacggctcagttctgaaagtgacaaataaagggctagcctcgtataaggatccagacaatcctggcagattctcctccgtgaaacctggcaccttcccaaaaagcgctaagggatcaaggggatcctgcaatgatttacgcaacgtggactggaataaacttttgagacgcgcaatagaagggttagaagagccaaatggctcaagtctgaagaacatagagaaatacctgagaagccaaagtgatttgaccagcaccacgaacaatcccgcatttcaacagaggttgcgcttgggtgccaagcgagccgttaataacggtagactccttaaagacggaccgcaataccgtgtgaattacgggagcctggacgggaagggcgcaccacagtatccatccgcgttccccagctctctgcccccagtgtccctcctcccccacgaaaaggatcaacctagagcggatcccatcccaatctgttctttttgcctaggcacaaaagaaagcaacagagagaagaagcctgaagaattgctgtcttgcgccgactgtggaagttcaggccatcccagctgtctgaaattttgccctgagcttacgactaacgttaaggccctgcggtggcagtgcatcgaatgtaaaacttgcagtgcctgtcgtgtccagggacgaaatgccgacaacatgcttttttgcgactcttgtgaccggggattccacatggagtgctgcgatccccctttgtcacgcatgcccaaaggcatgtggatctgccaagtttgtcggcctaagaaaaaaggtagaaagctcctgcacgagaaagccgctcagatcaagcgcagatacgcaaagccaatcggcaggcctaagaataagcttaaacagcgccttttgtccgtcacctctgatgagggctcaatgaatgcattcactggaagaggtagcccgggaaggggacaaaagaccaaagtctgtactaccccatccagcgggcacgccgcaagcgggaaagactcctcctctcggcttgccgtaaccgatccaacgcgaccgggagctacgaccaaaataactactaccagcacatatatatctgcatcaacgctgaaggtgaataaaaaaactaagggcctgatcgacggtctgacaaaatttttcactccgagcccagacggaagacgctcccggggtgagatcatcgattttagcaagcattaccggccaaggaagaaggtgagtcagaagcagagttgtaccagtcatgttcttgccaccgataccgagattaagatcaatatcaagcaggagtctgccgacgtcaatgtcattggtaacaaagacgtggtgaccgaggaagatctggacgtctttaagcaggctcaggagctgagctgggagaaaatagaatgcgagtcaggcgttgaggactgcggcaggtatccttccgtaattgagtttgggaagtacgagatacagacttggtattccagcccatacccacaggaatacgccaggctgcctaaactctatctctgtgagttctgcctgaagtatatgaaatcaaaaaatattctgctccggcattccaagaaatgtggctggttccacccacccgctaatgagatctaccgcaggaaagaccttagcgtgtttgaagtcgatggcaacatgtctaagatatattgtcagaacctgtgtttgctggccaaacttttcttagatcacaaaacactgtattatgacgtggagccttttctgttctatgtccttactaagaatgatgagaaagggtgccatctagtcgggtactttagcaaagaaaagctgtgccagcagaaatataatgtgtcttgcattatgatcatgccccaacaccaacgccaaggtttcggtcgtttcctaatcgattttagttatctgctgagtcggagagaaggacaagcagggtcaccagagaaacctctctcagacttgggacgtctgagctacctggcgtactggaagtcagtgatcctcgagtatttatatcaccaccacgaacggcatataagtattaaggcaatcagtagggccacgggcatgtgtccacatgacatcgctacgaccctgcaacatcttcacatgatcgacaagcgggacggtagatttgttataataagacgggaaaaattgatcctgagccacatggaaaaactgaaaacttgttcccgggcaaacgagctcgaccccgactccttaaggtggactcctatacttatcagtaacgctgcagttagcgaagaggagagagaggctgagaaagaggccgagcgattaatggagcaggcatcgtgctgggaaaaagaggagcaggagattctgtctaccagagccaattcacgtcaaagccccgctaaggtccagagcaaaaacaagtacctccactccccagaatcacggcctgtgaccggggagaggggccagcttctggaattaagcaaggaatcgtcagaggaggaggaagaagaggaggacgaggaagaagaggaggaagaggaggaggaagaggaggatgaagaagaggaagaagaggaggaagaggaggaggaggaggagaacattcagagctctcctccccgactgactaagcctcaatcagtggccataaagaggaagaggccatttgtcctgaaaaagaagcgcggtcggaagcggagacggatcaactccagtgtgactactgaaacaatctctgagactacagaagtcttgaatgagccttttgacaattccgatgaagagagaccgatgccacagttagagccgacttgtgagatcgaggtagaagaagacggtcgaaagccggtcctgagaaaggcgtttcagcaccagcccggtaagaaacggcagaccgaggaagaggagggaaaagacaatcactgttttaagaacgccgatccctgtagaaacaatatgaatgatgactccagtaacctgaaggagggcagcaaagacaatcctgagcctctgaaatgcaagcaggtttggccaaaggggaccaagaggggactgagcaagtggcggcagaataaggagcggaagaccggtttcaagctgaatctctacaccccccctgagacacctatggagcccgatgaacaggttacagttgaggaacagaaagagaccagcgaaggcaaaacatcgccgtcacccattcgcatcgaggaggaggttaaggagaccggggaagccttgctgccccaggaggagaacaggcgcgaagagacatgcgcccctgtgtccccgaatacatctccaggagaaaagcccgaggacgacctgatcaagcctgaggaagaagaggaagaggaagaggaagaggaggaggaggaagaggaggaggaaggcgaagaagaggaaggcggtggcaacgtcgagaaggacccagacggagccaagagtcaggagaaggaagagcccgagatctccacagagaaggaggacagcgctcgcctggacgatcatgaggaggaggaagaggaagacgaggagccctcacataacgaggaccacgatgctgacgacgaggacgatagccatatggaatctgcggaggtcgagaaagaggagctgcctagggaatcctttaaagaggtcctggaaaatcaagagaccttcctggacctcaacgtccagcccggacattcgaaccctgaagtcttgatggattgtggcgtggatttaactgcttcctgtaactccgagccaaaggagttggcaggagacccagaagccgtgcccgagagtgacgaagagccacccccaggagagcaggcacagaagcaagaccagaagaattcgaaagaagtggacacagaatttaaagagggaaatcctgccacaatggagatcgatagcgagaccgttcaagctgtccagtccctgacacaagaatcttcagagcaggatgataccttccaggattgcgctgagactcaagaggcttgtcgtagcctgcagaattatacccgcgcagatcagagccctcagatcgcgacgactctggacgattgccaacagtcagatcattctagtcctgtgagctccgtacatagccatccgggacagagtgttcgcagtgttaatagcccgagcgtgccagctctggagaactcgtatgcccagatctcccctgatcaaagtgcaatctctgtacccagcctgcaaaacatggagacttcccctatgatggatgtcccaagcgtgagcgatcacagtcagcaggtcgtagactccggattctccgatcttggcagtatcgagtcaactactgagaactatgaaaacccctcaagctatgattctactatgggcggaagcatttgcgggaacggatcatctcaaaactcttgtagttacagcaaccttacctcttcttctctgacgcagtcttcatgtgcagttacccagcagatgagcaatatttctggatcgtgcagcatgcttcagcagacgagtatttcctctccccctacttgcagcgtgaagagtcctcagggctgtgtagtggagagaccaccttcaagctcccagcaactggcacaatgcagtatggcagccaacttcacccctcctatgcagctggctgagattcctgaaacttcaaacgccaacattggcctgtacgagagaatggggcaaagtgatttcggagccggtcactacccacagccttcagctactttttcactggctaagcttcagcaactgactaatactctcattgaccactctctgccttatagccactcagccgctgtaacttcctatgccaactccgcctcactgagcacacccctgtcaaataccggcctggtgcaactatcccagagcccccacagcgtgcccggaggccctcaggcccaggctacaatgacacctcccccaaacctgacaccacccccaatgaatctgccaccaccgctcttgcagaggaacatggccgcttcaaatattggcataagtcactcccagcgcctgcagacgcagatcgcatccaaaggacatatctccatgcggacaaagtccgcatcactgtcccccgctgctgccacccatcagtctcagatttacggaagatcacagacagtcgccatgcaaggtcccgctagaacgctgaccatgcaaagggggatgaacatgtcagtcaatcttatgccggcaccagcctataatgtcaacagtgtgaacatgaatatgaacactctcaatgccatgaacggctattcaatgagtcagccaatgatgaattctggataccattcaaatcatggctatatgaaccaaacgccacagtaccctatgcagatgcagatgggaatgatgggtacacagccatatgcacagcagcccatgcaaaccccgcctcatggaaacatgatgtatacagctcccggacatcatgggtatatgaacacaggcatgtccaagcagtctctgaatggatcttatatgaggcggta

SEQ ID NO: 227512 - DNA, 5346 bp, synthetic construct
  misc_feature 1..5346: note = Description of Artificial Sequence: Synthetic coding sequence
  source 1..5346: mol_type = other DNA
atggtaaaactcgcgaatcctctctacacagaatggattttggaggccatacaaaaaatcaaaaagcaaaagcagaggcctagtgaagagaggatttgtcacgcagtttccacctcacatgggctggacaagaagactgttagcgaacagctcgaactgagcgtccaggatggcagcgtccttaaggtcaccaataaaggactagcgtcttacaaagaccccgacaacccgggacgcttttcttcggtcaaaccaggcaccttcccaaagtccgccaagggctcccgtggaagttgtaacgatctgagaaatgtcgattggaacaaactcctgaggagagcgatagaagggctcgaggaacccaatggctcgtcactcaagaacattgaaaagtaccttaggtctcagtcagatctcactagcacgactaacaatcctgccttccaacagcgcctcaggcttggtgccaagagagctgttaacaatggtaggctgttaaaggatggaccccaatacagagttaactatgggtcactggacgggaaaggtgccccacagtatcccagcgccttcccctcatccctaccacccgtttccttgttgcctcatgagaaggatcagcctcgcgctgatcccataccgatatgctcgttctgtctcgggaccaaagagtctaatagagagaaaaaacccgaggagctactttcctgcgctgactgtgggagcagtgggcacccaagctgcctcaagttttgtccagagctgacaaccaacgtgaaggctctccgctggcagtgcatcgagtgtaagacctgtagtgcgtgccgagtgcagggacgtaatgcagacaatatgctcttctgcgatagttgcgacagaggcttccacatggagtgttgtgatccccctctgtctcgcatgccaaagggcatgtggatttgccaggtctgtagacccaagaaaaagggacgaaagctcctacatgagaaggctgcccagataaagagacggtacgcaaagccaatcggacgccctaagaacaaattgaagcagcggctactgagcgtgacatcggatgagggcagtatgaatgctttcaccggtagaggatcgccggatactgagataaaaatcaatattaagcaggaatccgccgatgtcaacgtgatcgggaacaaggacgttgttaccgaagaggacttggacgtgttcaagcaagcgcaggaactgagttgggagaaaattgaatgcgaatcaggagtggaagattgcggaaggtatccaagcgtgattgaattcggaaaatacgagatccagacctggtactctagtccttatccccaggagtatgcgagattgcccaaactgtatctgtgcgagttttgcttaaaatacatgaagagcaaaaatattctcctccggcactctaaaaaatgcgggtggtttcatcctcccgcaaacgaaatctatcggcgtaaagacctttcagtcttcgaagttgatggcaatatgtctaagatctattgccagaatttgtgtctcctggccaaactgttcctcgatcataagactctgtactatgacgtggagccttttctgttctacgtgctcacgaaaaatgatgaaaagggctgtcacttggtggggtattttagtaaagaaaaactttgtcagcagaaatacaatgtgagttgtatcatgattatgccacagcaccaaaggcaggggtttgggcgtttcctcattgacttctcctatctcttaagccgacgtgaggggcaggccggatcaccagaaaagcctctgtccgacctgggacggttgtcctatctggcctattggaaatctgtaatactcgaatacctgtatcaccaccacgaacggcacattagcatcaaggcaattagccgagccaccggtatgtgtccacacgatatcgccactacattacagcacctgcacatgatcgacaagcgggacgggaggtttgtgattatccggcgagaaaagctcatcctgtctcatatggagaaactgaagacatgttctagggctaacgaattggatcctgacagtctcaggtggacccctatcctgatcagtaatgcagcggtcagcgaggaagagagagaagcggagaaagaggccgaacgacttatggagcaggcttcctgctgggaaaaagaagagcaggaaatattgagtacgagagccaattcgcgtcagagcccggctaaagtccagtccaaaaataaatatctgcacagccctgagtcccggcctgtgactggcgaacgcggacagctcttagagctaagcaaagaatcaagcgaagaggaggaggaggaggaggatgaagaagaggaagaagaggaggaggaggaagaggaagacgaggaggaggaggaggaggaagaggaagaggaggaggaggaaaacattcagtcttccccgcctcggctcacaaagcctcagtccgttgccattaagagaaaacggccttttgtgctgaaaaaaaaaagagggaggaaacgcaggcggattaattcaagtgtaacgactgaaactatatctgaaacaaccgaagtgctaaacgaaccctttgacaacagcgacgaagaacgtcctatgccccagttggaacccacatgcgagattgaagtggaggaagatggcaggaaacctgttctccgcaaagcctttcagcatcaacctggaaaaaagaggcagacagaggaggaggaagggaaggataaccactgtttcaaaaacgctgatccttgtcgtaataacatgaacgatgatagttcaaatttaaaggaaggatccaaggacaaccccgaacccctcaaatgtaagcaagtttggccgaagggaacgaagcgaggcctgtctaaatggagacagaataaagaacggaaaactggatttaagcttaacctgtacaccccacccgagacgccaatggaacccgacgagcaagtgaccgtcgaggaacagaaagaaacctccgaggggaagacgtccccgagtccgatacgcatagaagaagaagtgaaagagactggcgaagcactgctgcctcaggaggagaatagacgggaagaaacttgcgcaccagtaagcccgaatacctcacctggagagaaaccagaagacgacctgatcaagccagaggaggaggaagaagaggaggaagaggaagaggaagaggaagaggaagaggagggggaagaggaggaaggaggaggcaatgtcgaaaaggatccggacggcgcaaaatcccaggaaaaggaagagcctgagatcagcactgaaaaagaggattccgctaggttggacgatcacgaggaagaggaggaagaggacgaggaaccaagccacaatgaagatcacgacgcggacgatgaggatgattcccacatggaatccgctgaggttgaaaaggaggaactccctagggaaagtttcaaagaggttttggaaaatcaggagacctttctggacctgaacgtgcagcccggacacagtaaccccgaagtgctgatggattgtggagtcgacctcaccgcttcgtgcaactctgagcccaaggaactggcaggagatcctgaggcagtgcccgaatccgacgaagagcctcctcctggcgaacaggcccaaaagcaggaccagaagaattcaaaagaggtggatacagagtttaaagagggtaatcctgcaaccatggaaatagacagcgagacagtgcaagctgtccagagcctcactcaggaaagctcagagcaggatgacacatttcaagactgcgctgaaacacaagaagcttgcagatctctgcagaactatactagggccgaccagtcaccacaaatagccacaaccctggatgattgtcaacaatcggaccacagctcgccggtgagttcagtgcactctcatcccggacaaagtgttagatccgtgaattctccttctgtaccggcacttgaaaattcatatgctcagatctcccccgaccaatctgcaattagcgtgcctagcctacaaaacatggaaaccagtccaatgatggatgtcccctcagtgtccgaccacagccaacaggttgtcgactctggattcagcgacctaggctcaattgagagcaccacagaaaactatgagaatcccagttcctatgactccaccatgggaggctctatttgcggtaatggaagtagccaaaacagttgtagctatagcaacctgacctctagttccctgacccaatcatcatgcgccgtgacacaacagatgagcaatattagtggctcatgctccatgcttcaacagactagcataagctctccgcctacgtgtagcgtcaaatcaccccaggggtgtgttgttgagcggcctccttcctcatcacagcagctggctcagtgcagcatggccgcaaattttaccccccctatgcagctggcggagatacccgaaacctcgaatgctaatatcggcctctacgaacgaatgggtcagtccgatttcggcgctggccactacccccaacctagcgccaccttttccttagccaagttgcaacaactgactaacactttgatagaccattctttgccctattcccattcagcagccgtgacctcctatgccaatagtgcatctctgtcaacacctctgagcaatacagggctcgttcagctctctcagagtcctcactcagtgcccggaggccctcaggcccaggctacaatgacccctccccctaacctcaccccacccccaatgaacctaccgcctcctctgctgcaaagaaacatggctgcctctaatatcggcataagtcattctcagaggctccagacacagatcgcctccaaaggccacatcagcatgcgcactaagtccgcttctctttctcccgcagctgcaacacaccaaagccaaatatacggccgatcacagacagtggctatgcaggggcctgcacgcacactgactatgcagaggggaatgaacatgtcagtcaatctgatgcccgctcctgcatacaacgtcaacagtgtgaacatgaacatgaacacactgaatgccatgaatggttatagtatgagccagccgatgatgaatagcggataccactccaaccacggctacatgaaccaaacgccacagtatcccatgcagatgcaaatgggaatgatgggtactcagccctacgcccagcagccaatgcagacgccaccccatggaaacatgatgtatactgcgcctgggcatcatgggtacatgaacacaggtatgtcgaagcagagccttaacggctcgtacatgaggcggtaa

SEQ ID NO: 227513 - DNA, 5345 bp, synthetic construct
  misc_feature 1..5345: note = Description of Artificial Sequence: Synthetic coding sequence
  source 1..5345: mol_type = other DNA
atggttaaacttgctaatccactctatacagagtggatactggaagctatccaaaagattaagaaacagaagcaaaggcccagtgaagagaggatttgccacgctgtgagcaccagccatggtttggataagaaaacagtgagcgagcagctcgagttgagtgtgcaggacgggagtgtgctgaaagtcacaaataaaggacttgcttcgtataaggaccctgataaccctggcaggttttctagcgtcaaacctgggactttccccaagagcgccaagggatcacgagggtcctgtaatgaccttcggaatgtcgattggaacaagttactcaggagggccattgaaggtctggaagagcctaatggctcctctttgaaaaatatagaaaagtacctgcgttcacagtctgacctgacaagcaccaccaacaaccctgcattccaacagcggctgcgtctgggcgctaaaagagctgtgaacaatggcaggctgctcaaggacggcccacagtaccgcgttaattatggttccctggacggtaagggtgcgccacagtatccgtccgcctttcccagcagtctgccccctgtgtctctactcccccacgaaaaagaccaacccagggcggaccctatacccatttgctcattctgccttggtacaaaagagtccaaccgcgagaaaaagcctgaagaactcctttcatgtgctgactgtgggagtagcggccatccatcttgtttgaaattctgtcccgagttgacgaccaatgtgaaagcactgcgctggcaatgcattgagtgcaagacctgttcagcctgcagagtgcagggtagaaacgccgacaacatgctgttttgtgatagttgcgatagaggtttccatatggaatgttgcgatcccccattgtcaaggatgccaaagggcatgtggatatgtcaggtgtgccggccaaagaagaagggacggaaacttctgcacgaaaaagccgcacagattaaaaggagatatgccaagcccatcggtcgtccgaaaaataaactcaagcagcgtctgctatctgtgacatctgacgagggctcgatgaatgcatttaccggaaggggctcaccagataccgagattaagatcaacatcaagcaggagagcgcggacgtaaacgtgatcgggaataaagacgtggtcacagaggaggacctggatgtgtttaagcaagctcaagagttatcttgggagaagattgaatgcgaatcaggggtggaagactgtgggcgatacccaagtgttatagagttcggtaaatacgagatccaaacatggtacagttctccttacccgcaggagtacgctcgtctccccaaactttatttgtgtgaattctgtctaaagtatatgaagtctaagaatattttgctgaggcacagcaaaaagtgcggctggtttcaccctcccgcaaatgaaatctaccgaaggaaagacctgagcgtcttcgaagttgatgggaatatgagcaaaatttactgccagaatctttgtctgttggccaaactgttccttgaccataagacattatattacgacgttgaacccttcctcttctacgtgttgacaaagaacgacgagaaagggtgtcaccttgtgggctatttctctaaggagaagctctgtcagcagaagtacaatgtgagctgcattatgataatgcctcagcaccagagacaggggtttgggcgttttctgatagatttttcctacctcctgtcacgccgtgaggggcaggctggatcacccgagaagcccctgtccgacctcgggaggctgtcctaccttgcttactggaaatctgtgatcctggagtacctttatcaccaccacgaaagacacatcagcattaaagcaatctccagggcaaccggcatgtgccctcatgatattgccaccaccctccagcacctccatatgattgacaaaagggatggacgatttgtcattatccgcagggaaaagcttatcctgtcacacatggaaaagctgaagacatgttcgcgcgctaatgagctagacccagacagcctccgctggacacccattcttatctcaaacgctgccgtctctgaagaggagcgggaggccgagaaagaggccgaaaggctcatggaacaggcctcctgttgggagaaggaggaacaggagatactgagcacacgggctaattctcgacagtcacccgctaaggtgcagagtaagaataagtatctgcattcacctgaatcacgccctgtcaccggcgagagaggtcaactccttgagctgtccaaagagtctagcgaagaggaggaagaggaggaggacgaagaggaagaggaagaggaggaagaggaagaagaagatgaagaagaggaagaagaagaagaagaggaagaagaagaggagaacattcagagcagtccccctcgcttgaccaaaccccagtctgtcgccattaaacgcaaacgtccttttgtgcttaagaaaaagagaggcagaaagagacggcgtatcaattcaagcgtgacaaccgaaactataagcgaaacgaccgaagttctgaatgaaccttttgataatagcgatgaggaaagaccaatgccccaactcgagccaacctgcgagattgaagttgaagaggatggtcgtaagcccgtgcttcgcaaggcttttcagcatcagcccggaaaaaagcggcaaaccgaagaggaggaagggaaggataatcactgctttaaaaatgctgatccctgcagaaacaatatgaatgacgactcttcaaatctaaaagaaggcagcaaggataaccctgaacctctcaaatgtaagcaggtgtggcccaaagggaccaaacgcggtcttagtaagtggagacagaataaagaacgcaagactggtttcaagctgaatctgtataccccccctgaaacacctatggaaccagatgaacaagtgacggtcgaggaacagaaagagacttcagaggggaagactagcccttcgcctattagaattgaggaagaagtgaaagagactggtgaagccctgttaccccaggaggagaacaggcgggaagagacttgcgctcccgtgtctcccaatacttctcctggagaaaaacctgaggacgacctcataaaaccggaggaggaggaggaagaggaggaagaagaagaagaggaggaagaggaagaagaaggtgaagaggaagaagggggaggcaatgtggaaaaggatcctgacggtgctaaaagccaggaaaaggaggagcctgagattagcacagaaaaagaagactccgcacggctggacgaccacgaagaggaggaggaggaggatgaggagccaagccacaacgaggatcatgatgcggatgacgaagacgattcacacatggaatctgctgaggtagaaaaggaggaactgcctcgcgagtcgtttaaggaagtgcttgaaaatcaggagacttttctggatctgaatgtccaaccagggcattctaaccccgaagtgttgatggattgtggggtggacctaacagcaagttgcaacagtgagcccaaggagttggcaggagatcctgaggccgtccctgagtccgacgaggaacccccacccggtgaacaggcccagaagcaggatcaaaagaacagtaaagaagttgataccgagtttaaggaaggcaatccagccaccatggaaatagactctgaaacagtgcaggctgtccagtcattgacccaagagagctccgagcaggatgatacgttccaagactgtgccgagacccaggaagcatgccggtccctgcagaattatacaagggccgaccaaagtccacagatcgccaccacactagacgattgccagcagagcgaccactcctcaccggtctcatctgtgcacagccaccctgggcaaagtgtgcgctcagtcaattccccaagtgtccctgctttggagaatagttacgcccagatcagccctgaccaatctgccatctccgtgccaagcttgcagaatatggaaacgtctcctatgatggacgtgccttcggttagtgatcactctcagcaggtcgtggatagcggtttcagcgacctaggctccattgagtccacaacagagaattatgagaacccatcctcctatgatagcactatgggtgggtccatctgcggaaacggatcctcacaaaattcttgttcctattctaatctgacatctagctccttgacacagtcttcctgtgcagttacgcagcagatgtcaaatatatccggttcttgtagcatgcttcagcagacctccataagctcgccccctacctgctccgtgaagtccccccaggggtgcgttgtggagcgtccacccagttcatctcagcagctggcacaatgcagcatggccgctaacttcacacccccaatgcagctggccgaaattcctgaaactagcaatgccaacatcgggctgtatgagcgaatgggtcaatccgactttggagccggacactacccccagccatccgctaccttctccctggcaaaactccagcagctcacaaatactctcatagatcattctttaccttattctcatagcgcagctgtgactagttacgctaattctgctagtctctccacgccactcagcaatacagggctggtccagctctctcagagcccacacagcgtgcctggtgggcctcaagcccaggccactatgacaccgccacccaacctcacacctcctcctatgaacctccctccccctctgctacaaagaaatatggctgcaagtaacattgggataagccattcacagcgactgcagacgcagatagcaagtaaaggccatataagtatgagaactaagagcgctagtctgtcccccgcagcagctacacaccagagtcagatttacggaagatctcagacggtcgccatgcaaggccctgcaagaaccctcaccatgcagcggggaatgaacatgtctgtgaatctcatgcccgcacccgcatacaacgttaattcagtgaacatgaatatgaatacactgaatgctatgaatggctattcaatgtcccagcccatgatgaacagcgggtatcactccaatcatggctatatgaatcagacaccccagtacccgatgcagatgcaaatgggaatgatgggaacccagccttatgcacagcagccaatgcagaccccacctcatggcaatatgatgtatacagccccaggccaccatggctacatgaacaccggcatgtccaagcagagtttgaacggctcatatatgcggaggta

SEQ ID NO: 227514 - DNA, 5345 bp, synthetic construct
  misc_feature 1..5345: note = Description of Artificial Sequence: Synthetic coding sequence
  source 1..5345: mol_type = other DNA
atggtgaagctcgccaaccccttgtatacagaatggatcctcgaagcaatccagaagatcaagaagcagaaacagcgaccttctgaagagagaatctgtcatgctgttagcaccagtcatgggctagacaagaagaccgtcagtgaacagctggagctgtctgtccaagacggttcagtactcaaagtcactaacaaggggctggcgagttataaggatcccgacaaccctggtcggttttccagtgtgaaacctggcacgttcccaaagtcagccaaggggtctaggggctcctgcaacgatctgaggaatgtcgactggaataaactgctcagaagagccattgaaggcttggaggaaccgaacggatccagtctcaagaatattgagaaatatctcagatcccagagcgatctgacgtctactactaacaatccggcatttcagcagagactgcggctcggagctaaacgcgcagtgaacaatggccgactactgaaggatgggccacaataccgcgttaattacgggtcactggacggaaaaggggctccccagtatccatccgccttcccctcatcgttgcctccagtcagtctgctaccccacgagaaggatcagcccagggcagatcctatccccatttgcagtttttgccttgggactaaagagtcgaatcgggagaagaaacctgaggagctgctgtcatgcgccgactgcgggagttctggacacccctcttgcctgaagttttgcccagaactgactactaatgtcaaggcccttaggtggcagtgcattgagtgtaaaacctgtagtgcctgcagggtgcaagggagaaacgctgacaatatgttattctgtgattcgtgtgatcgaggttttcacatggagtgctgtgatccgcctttgtccagaatgccaaagggcatgtggatctgccaggtctgccgtcccaagaaaaaaggcaggaaactgctccacgagaaggccgctcagataaaacggagatatgccaagcccatcggtcggccaaaaaacaagctgaaacagaggctgctgagtgtgactagcgatgaaggttccatgaacgcatttacaggaagggggtcccccgataccgagataaagattaatattaagcaggagtcggctgatgtgaatgtgataggcaataaggacgtcgtgacggaagaagatctggatgtgttcaaacaggctcaagaactatcatgggagaaaattgagtgcgagagcggggtggaggactgtgggagatacccaagtgttatcgagtttggtaagtatgagattcagacctggtactctagtccctaccctcaggagtacgcccgtttaccgaagctttacctgtgcgaattctgtctgaaatatatgaagtctaaaaacattctgctccgccacagcaaaaagtgtggctggtttcatccacccgctaatgagatctatcgtagaaaggacctgtccgtgtttgaggttgacggcaacatgtcaaagatctattgccagaatctttgtttgttggcaaagctgttccttgatcacaaaaccttgtactacgacgtggaaccttttcttttctacgtcttgacgaaaaacgacgagaaggggtgtcatctggttggatatttctccaaggaaaagctctgccagcagaaatacaacgtgtcatgtattatgattatgcctcagcaccagaggcaggggtttgggagatttctgatcgatttttcctacctactcagcagacgcgagggccaggccggatccccagagaaaccgctgagtgacttaggccgactgtcatacttagcgtactggaagagcgtgatacttgagtatttgtaccaccaccatgaacgacacatctcgattaaagcaatttctcgagcaacgggcatgtgtccacatgacatcgccaccacattacagcacctccatatgatcgataagagagacggcaggtttgtcataatccgccgtgagaagctcattctcagccacatggagaagttgaagacttgcagtagagcgaatgagctcgatccagactcgctcagatggacccctattcttatttccaacgctgcagttagcgaggaggaaagggaagctgagaaggaggcggaaaggctgatggaacaggcttcatgctgggaaaaagaggagcaggaaatcttaagtactcgagctaatagtcgtcagagtcctgctaaggtccaatccaagaacaagtacctccactcacccgaaagcagacccgttacaggggagagggggcagctgctcgagctatccaaggagagtagcgaagaggaagaagaggaggaggatgaagaggaggaagaggaagaggaggaagaggaggaagatgaagaagaagaagaggaggaagaagaagaggaggaagaggagaacattcagagctcgccaccaaggctaacgaaaccccagagtgtcgccattaaacgcaagcgtcctttcgtgctgaagaagaagcgaggacggaagcgaaggcggataaattcatcggtgaccaccgaaaccatcagcgagacaacagaggtgttgaatgagccatttgataatagcgatgaagagaggccaatgccccagcttgaacctacgtgcgaaatcgaggtggaggaggacggtagaaagcccgtgctccgcaaggcgtttcagcaccagcccggtaaaaaacgccagacagaggaagaagaagggaaagacaaccactgtttcaaaaacgccgatccttgccggaataatatgaatgatgacagcagcaacctgaaagaggggagcaaagacaaccctgagcctctcaagtgtaagcaggtgtggccaaaaggcacaaaacgcggactctccaagtggcgccagaataaagaaaggaagacaggattcaagctgaatctgtacaccccacccgagaccccgatggagcctgacgaacaagtcacagtggaagagcaaaaagaaacatccgaaggtaagacatcaccttccccgattcggatcgaggaggaggtcaaggagaccggggaggcccttctgccccaggaagaaaataggagagaagaaacctgcgcacccgtctcgcctaatactagtcctggcgaaaagcctgaagatgacctgataaaaccagaggaggaggaagaagaagaggaggaggaggaagaagaagaggaggaagaggaaggagaggaggaagagggcggtggcaatgtcgaaaaagaccctgacggagctaagtctcaggagaaggaggaaccggagattagtaccgagaaggaggatagtgcgcgtcttgatgatcacgaggaggaggaggaggaggacgaagagccatcacacaatgaggaccatgacgccgatgacgaagacgatagtcatatggagtctgcggaggtcgaaaaggaggagctgcccagggagtctttcaaggaagttctggagaaccaagagacgttcttggatttgaatgttcagcccggtcattccaatccggaggtgctgatggactgcggggtcgatctgactgcttcctgtaatagcgagcccaaagagctcgctggtgatccggaggcagtcccagagtctgacgaggagccgcctcctggggaacaggcccagaagcaggaccagaaaaactccaaggaagtggatactgaatttaaagaagggaacccagctaccatggaaattgactctgagacagtgcaagccgtgcaaagcctgacgcaggaaagcagcgaacaggatgacacttttcaggattgcgccgagactcaggaggcttgcagatctttgcagaactataccagggcggatcaatctccgcagatcgccacaaccctggacgactgccagcagagcgaccatagctcacctgtgtcctcggtccactcccaccccggacagtctgtaaggtctgtgaacagtccttcagtcccagccctggagaactcttacgcccaaatcagccccgaccaaagcgctatttccgtgccatccctacaaaatatggaaacatctccaatgatggacgtgccgtccgtgtccgaccattctcagcaggttgtggattcaggcttttctgatctgggctccatagaatcaacgaccgagaactatgaaaacccttccagttacgactccactatgggcggtagcatctgcggcaacggtagctcccagaatagctgctcttatagcaacctgactagcagctcactgacccagtctagttgcgctgtgactcagcagatgtcaaatatctcaggctcatgtagcatgctgcaacaaaccagcatatcttcccctcctacatgcagcgtaaagtcgccacagggttgtgttgtggagcgacccccatcttccagccagcagctcgcacagtgcagcatggccgctaactttaccccacccatgcagctcgcagagatacctgagacttccaacgcgaatataggactatacgagcgaatggggcagagtgacttcggggctgggcactatccccagccttctgctaccttttccctggctaaattgcagcagttgacgaacaccttaatagaccacagtctcccttactcccacagcgctgccgtgacaagctatgctaattccgcttcacttagcactccattatctaacactggactagtgcagctcagtcagtctccacattcggtgcccggagggcctcaggcccaggcaaccatgactcctcctcccaatttgactccccctcccatgaacctgcctccacccttgctacaaagaaatatggcggcaagcaatatcggcatctcccacagccagagactgcagacccagattgcctctaaggggcatattagtatgcggactaagtccgcctcactctcaccagcggctgccacacatcagtcacaaatctacggacggtcccagacagtggccatgcagggcccagccagaactctgaccatgcagcgagggatgaatatgagcgtgaacctaatgcccgctccggcatacaatgtgaacagtgttaatatgaacatgaacacgctgaatgcgatgaacggatactctatgtcacagccgatgatgaatagcggttatcacagtaaccatggctatatgaaccagacccctcagtatccaatgcagatgcaaatggggatgatgggcacccagccctacgcccagcagccaatgcagacaccccctcacggcaacatgatgtatacagccccaggacaccatgggtacatgaatacgggcatgtctaaacagtccctgaatgggtcatacatgcggaggta

SEQ ID NO: 227515 - DNA, 4992 bp, synthetic construct
  misc_feature 1..4992: note = Description of Artificial Sequence: Synthetic coding sequence
  source 1..4992: mol_type = other DNA
atgactgaccgcttctgggaccaatggtatctctggtatctgcgcctcctcaggctgttggaccggggttccttccggaacgacggactcaaagcttccgatgtgttaccaattcttaaggagaaggtggcgttcgtgtccgggggaagggacaaacgtggcggacctatactgactttccccgctcgaagcaaccacgacagaattcgtcaggaagacctccgcaaactcgtgacgtatttggcctcagttccttccgaagacgtatgtaagcgcggatttactgtgataattgatatgcggggtagtaagtgggatttgattaagccgctgttgaagactttacaagaggctttccctgctgagattcacgtagccttgattatcaagccagacaatttctggcaaaaacaaaagacaaactttggatcttcaaagttcatttttgagacgtcaatggtctctgtggaagggcttacgaaactggtggacccatcccagctgaccgaagaattcgatggctctttagactacaatcacgaggaatggatcgagctgagactgtcattggaagagttctttaactccgctgtgcatctgctgtcccgtctggaagacctgcaggagatgttggcgcgaaaagaattccccgtggatgtggagggaagccggcgactgattgacgagcacacacagcttaagaaaaaggtgctcaaagcacctgtcgaggagctggatcgtgaggggcaacgtctgctccagtgtatccgctgtagcgacggattcagcgggaggaactgtattccagggtccgctgacttccaatcactggttccaaaaattacttctttgctggataagctgcactccaccagacagcatttgcatcagatgtggcatgtgagaaaactgaaattagatcagtgctttcaactacggctgtttgagcaggatgcagaaaagatgtttgattggatctcccataataaggaactcttcctacagtcccacactgagatcggcgttagttaccagtatgcccttgacttacaaacgcagcataatcactttgcaatgaactccatgaacgcctatgtaaatattaacagaatcatgtcggtcgcatctaggctgagcgaagccggtcactatgcctctcagcagataaaacaaatcagcacacagctggatcaagagtggaagagcttcgctgccgctctggacgaacggtcaaccatcctggcgatgtccgctgttttccaccagaaggccgaacaattcttatcgggggttgacgcctggtgcaaaatgtgcagtgagggcggattgccttctgagatgcaggatttggagctcgcaatccaccaccatcaaacattatacgagcaggttacacaggcgtacaccgaggtgtctcaagacggcaaggctctgttggacgtcctgcaacggccattgtctcccggaaatagcgaatcactgacagcgacagctaattattctaaagctgtccaccaggtactggatgtggtccacgaagtcctgcatcaccagcggagactagaaagtatttggcaacaccgaaaagtgcggttacatcagaggctccagctatgcgtcttccaacaggatgtccagcaagtcctggactggattgagaaccatggtgaggctttcttgtcaaagcacactggggtgggaaaaagcctgcacagagccagggcactgcaaaagagacacgatgactttgaggaggtagcccagaatacctacaccaatgccgacaagcttctcgaagcagccgagcagcttgcccagaccggcgaatgcgatccggaggaaatttacaaagctgccagacatcttgaagtacggatccaggattttgtgcgtagggttgagcagcgtaaactccttctcgatatgagcgtctccttccacacacataccaaggagttgtggacatggatggaggacctgcagaaggaaatgctggaggatgtgtgcgctgattctgttgacgccgtccaggaactaatcaagcaatttcagcaacaacagactgctaccttggatgctacactcaacgttattaaggagggcgaagacctgatacaacagctgagaagcgcccctccgagcttaggcgaaccatccgaggccagggactccgccgttagcaataataagactccacatagtagctctattagtcacattgagagcgtgcttcaacaactggatgatgcccaggtccagatggaagagctcttccacgaacgcaagataaagctcgatatctttttgcagcttcggatctttgagcagtatacgatcgaggtgaccgccgaacttgacgcctggaatgaggatctcctgcgccagatgaatgattttaataccgaggatctgacccttgccgagcaacgactccagcggcacactgagaggaaactagctatgaataatatgaccttcgaggtgatccagcaggggcaagacctccaccagtacattacagaggtccaggcgtcaggcatcgaactgatctgcgagaaggacatcgatctcgccgcacaggtgcaggagcttctggagtttctccacgaaaagcagcacgagctcgaactaaacgcggagcagactcacaagaggttggaacagtgcctccagttgcgacacctccaggcagaagtcaaacaggtcttggggtggatccgcaacggcgagagtatgctgaatgcatctctggtgaacgctagtagcctcagcgaagccgaacaactgcagagggagcacgaacagtttcaactggctattgaaagcctgttccatgcgacctctctgcagaagacccatcagagcgcattgcaagtgcagcagaaagctgaagtcctgttgcaggcgggacattacgacgcagatgccattcgcgagtgcgccgaaaaagtcgcattgcattggcagcaacttatgctcaaaatggaggataggctaaagctcgtcaacgcctccgtggcattctacaagacttctgaacaggtatgctcggtattggaatccctggagcaagagtatagacgagatgaagactggtgcggcggtagggacaaactaggcccagccgctgaaattgatcacgttatcccactgatttcaaagcatctggagcaaaaggaggcattcttgaaggcttgtacactcgctcggagaaacgccgaggtcttcttaaagtacatccacaggaataacgtgtccatgccaagcgtggcttctcacacacggggacccgaacagcaagtgaaggctatcttatctgagctgttgcagagggagaaccgggtccttcacttttggaccttgaaaaaaaggagactcgaccaatgtcagcaatatgtggtctttgaacgatccgccaaacaggcactggattggattcaggagacgggggagttctacttgtccacgcacacaagcactggcgaaacaaccgaggagacacaagaactgttgaaggaatatggggagttccgggttcctgcaaagcagacaaaagaaaaagtgaaactgctcattcagctggccgactctttcgtggaaaagggtcacatccacgctacagagatccgaaagtgggtgaccacggtggacaagcactatagagactttagtctcaggatgggcaagtacagatatagcctggagaaggcgctgggcgttaacactgaggacaacaaggacttggagcttgacattatccctgcctcactctcggaccgcgaagtgaagttaagagacgccaaccacgaagtgaacgaagagaaaagaaagtctgctagaaaaaaggagtttataatggccgagctgctccagaccgagaaagcttatgtccgggatctccacgaatgtctggagacatatctgtgggagatgacctcaggtgtggaagagatccccccaggaatcctgaataaggagcacatcatcttcggaaatattcaagagatctacgatttccacaacaacatttttctcaaggagttagaaaagtatgaacagctccccgaagacgtggggcattgcttcgtgacctgggccgataagtttcagatgtacgtcacctactgtaagaacaaacctgatagcaaccagctgatcctggaacacgccggaaccttctttgacgaaatacagcaacggcacggcctagctaatagtatcagttcctatctcatcaagcctgtgcaacggattactaaatatcaactccttctcaaagagctgctcacgtgttgcgaggaaggaaaaggagagctgaaggatggtctagaagtcatgctttccgtcccgaaaaaagctaacgatgctatgcacgtgtccatgttagaggggttcgacgagaatctcgacgtgcagggggaacttatcctccaggatgcttttcaagtgtgggaccctaagtccctgatccggaaaggcagagaacgccacctgtttctcttcgagattagcttggtgttttccaaagagatcaaggattcctctggccacacaaaatatgtctacaagaataaactactgacgtcagaactgggcgttacggaacacgttgagggggatccatgtaaatttgccctctggtctggcagaacaccttctagcgacaacaaaaccgtcctaaaggccagcaatattgaaactaagcaggaatggatcaagaacattcgtgaggtgattcaggagagaattatccacttgaagggcgctctgaaggaaccgctccagctccccaaaacacctgcaaagcagcgcaacaactcgaaacgagatggggtcgaagatatcgatagccaaggcgatgggtcgagtcagcccgataccatttctatcgcttccagaacgtctcagaacaccgtcgacagtgacaaggacggcaatctggtgcctagatggcatctgggcccaggcgaccctttctccacgtacgtttaa

SEQ ID NO: 227516 - DNA, 3870 bp, synthetic construct
  misc_feature 1..3870: note = Description of Artificial Sequence: Synthetic coding sequence
  source 1..3870: mol_type = other DNA
atgaagggcggtgatcgagcctacacccgcggtccctccctcggctggctgttcgcaaaatgttgttgctgcttcccttgcagggatgcttacagccacagctcttccgagaacgggggtaagtccgagtccgttgcaaacctgcaggcccagcccagtttgaactctattcattcttctcccggacctaagcgtagcaccaacacactcaagaaatggctgacctcacccgtcaggagattgaactcaggaaaggcagatggcaacataaagaaacagaaaaaagtgagagatggacgaaagtccttcgacctgggaagcccaaaacccggtgatgaaactacaccacagggagatagtgctgatgagaagtccaagaaaggctggggcgaagacgaacctgacgaggagtcccatactccgttgccacctccaatgaagatcttcgataacgatcccacccaagacgagatgtcgtcatctttgcttgcggctcgccaggcctccactgaagtgccgacagccgctgatctggtcaatgcaatcgagaaactggtgaaaaacaaactgtctctagagggttcaagctatcgtggatcattgaaggatcctgccggttgcttaaacgagggaatggcaccccctactccacctaaaaatccagaagaggagcagaaggccaaagccctgcgcggtcggatgtttgtacttaacgagctggtccaaaccgagaaggattacgtcaaagacttgggaattgtcgtggaagggtttatgaaaaggattgaggaaaaaggggtccctgaagatatgcgaggcaaggacaagatagtcttcggcaacattcaccaaatctatgactggcacaaagatttcttcctggccgagcttgagaaatgtatacaggaacaggacagactggcccagctgttcatcaagcacgagcgcaagttgcatatctacgtctggtattgtcaaaacaagcctaggtctgaatatatagtggctgagtacgacgcctactttgaggaggtgaagcaagagattaaccagcgcctcactctctcagactttcttatcaaacccattcagcgcatcaccaaatatcagctcttgctaaaagattttctgcgatactccgaaaaggctggcttggagtgtagcgatattgagaaagccgtcgagctgatgtgtctggtgcccaaaagatgtaatgatatgatgaacctcggcagactgcagggcttcgaaggtaccctcactgcccaaggcaagctgctccaacaagatacattttacgtcatcgagctggacgccggtatgcagagcaggaccaaagaacggagggtttttcttttcgagcagattgtaatcttcagcgagctcttgagaaagggcagcttgacacctggctatatgtttaagcggtccattaagatgaattatcttgtcctggaggaaaacgtcgacaacgacccatgcaagtttgccctcatgaatcgagagacatctgaaagggttgtgctccaggctgcaaacgccgacatccagcaggcttgggtgcaggatataaaccaggtcctcgaaacacagagggattttcttaatgcacttcagtctccaatagaatatcagaggaaggaaagatctacagccgtaatgcggtcacagcctgctcgtcttccacaggccagcccccgaccctatagttcggtgccagctggctccgaaaagccacctaaaggcagctcttacaacccacccctgccccctctcaagatatcaacttctaatggcagccccggtttcgagtatcaccagccaggggacaaattcgaggctagcaaacagaatgaccttggtggctgtaacggcactagttctatggccgtcatcaaagactactatgcccttaaggagaacgagatctgcgtgtcgcaaggagaagtcgtgcaggttcttgcagtcaaccagcagaatatgtgtttggtgtatcagcccgcatctgaccattctcctgccgctgagggctgggttcccggttcaatcctggctcccctcacgaaggcgaccgcagcagaatcttctgatggctcaattaaaaaatcctgcagctggcacactctgaggatgcggaaaagagctgaggtcgagaacaccggaaagaacgaagcgaccggacctcgcaaacccaaggacatccttgggaacaaggtgtcagtgaaggagactaactctagcgaggagagcgaatgcgacgatctggatccaaatacctcgatggagattctgaatccgaactttatacaggaggtggcaccagagttcctcgtccccctggtggatgtcacatgtctcctgggcgatactgtgatcctgcagtgtaaggtatgcggccgtccgaagcccactatcacctggaagggccctgatcaaaatatactggataccgacaattcaagcgccacatacacagtgtcctcgtgcgactcaggcgagataaccctcaagatttgcaaccttatgccccaggactcaggaatatacacctgtatcgccactaatgatcacgggacaacttcaaccagtgccaccgttaaagtgcagggcgtgcccgctgccccaaatagaccaattgcccaggaacgctcctgcacttcagttatcctgaggtggctaccacctagtagcacaggcaattgcacaattagtggatatactgtggaatacagagaggagggatctcagatctggcaacagagcgtagccagcacacttgacacgtaccttgtcattgaggacctgtcccccggttgtccttaccagtttcgtgtctcggcgtcaaatccttggggcattagcctaccgtccgaaccttcggaatttgtcaggctacctgaatatgatgcagctgcagacggagctaccatctcatggaaagaaaattttgacagtgcctacacggagctaaacgaaattggacggggacgattctctattgtgaagaaatgtattcacaaagctacacggaaagatgtcgctgttaagttcgtcagcaagaagatgaagaagaaggaacaggccgctcatgaggccgcactgcttcagcacctgcaacatcctcagtatatcacgctacacgacacctacgaatcccccacttcgtatatcctgatattggaactgatggacgacggacgattgctcgactatttgatgaatcacgacgagttgatggaagaaaaagtagcgttctacatcagggacattatggaggctcttcagtatcttcacaattgccgagtggctcacctcgatatcaagccagaaaacctcttgattgacctgcggatccctgtgcccagggtgaagctgatcgatttagaggacgctgtgcagatcagcggccattttcatatacaccatttgctcggtaatcccgaatttgctgccccagaagtcatccagggcatccctgtctccttagggactgatatttggtcaataggagtgcttacctatgtaatgttgagcggagtgagcccatttttggacgagtccaaggaggaaacttgcataaacgtgtgtcgcgtagacttttccttcccgcatgaatacttttgcggggtgagtaatgccgcaagagactttatcaatgttattttgcaggaggatttcagacggcgacccaccgctgccacgtgcttacagcacccatggctccagccacataatggctcgtacagtaagatacccctcgacacttccagactggcctgctttatcgagagacgaaagcaccagaacgacgtcagacccataccaaatgtaaagagctacattgtgaatagagtgaatcagggtacctag

SEQ ID NO: 227517 - DNA, 8960 bp, synthetic construct
  misc_feature 1..8960: note = Description of Artificial Sequence: Synthetic coding sequence
  source 1..8960: mol_type = other DNA
atgactgaccgattttgggatcagtggtatctttggtatttgaggctgctaaggctgctggatagaggcagctttcgtaacgatggcttgaaggcatcagatgtcctgccaatcctgaaggaaaaggtcgccttcgtgtccggcggtcgggacaagcgagggggtcctatactcacattccccgctcggtccaatcacgatcgtattcgacaggaagacctcaggaaactggtgacttacctggcttcagtgccatcggaggacgtgtgcaaacggggattcaccgtgattattgatatgaggggctccaaatgggacctgattaagcccctgctcaaaaccctccaggaggcattcccagcagagattcatgtggcgctgataatcaagcccgataatttttggcagaaacaaaagactaactttggctctagtaagttcattttcgagacatctatggtgagtgtggagggcttgacaaagctggtagacccgtctcaactgaccgaggaattcgacggctctttagattacaatcacgaggaatggattgagcttcgtttgtcattggaagagttcttcaattcagcagtgcatctgttgtctcgcctcgaagatctccaggaaatgttagcccgaaaggaattccctgtggatgtagaaggctctcgacgactgatcgacgagcacacacagctgaaaaagaaggtccttaaagcacctgtggaagaattggaccgggagggccaaagactgctgcagtgtatccggtgcagcgatgggttttccgggagaaactgcatccccggaagcgccgactttcagtccctggtgcctaaaataaccagcctgctcgacaagctgcacagcactcgacagcaccttcatcagatgtggcatgtaaggaagctgaagctggatcagtgttttcagctgaggctgtttgagcaagatgccgagaaaatgtttgattggatcagtcacaataaagagctttttctacagtctcatactgagataggtgtgtcttatcagtacgcgctcgatttgcagacgcagcacaaccactttgccatgaatagtatgaacgcctacgtcaacatcaatagaattatgtccgtggcttctcggctctctgaggcagggcattatgctagccagcagatcaagcagatttctactcaactggaccaggaatggaagagttttgccgctgctctggacgaaagatcaaccatcctcgctatgagtgccgttttccaccaaaaggccgagcagtttctgtccggagtagatgcctggtgcaagatgtgtagtgaaggtggacttcccagcgagatgcaggatctcgagctggctatccatcatcatcagacactgtacgagcaggtgacacaggcctacacagaagtatctcaggacgggaaggcattgctagacgtgctccaacgcccactgagtcccggtaacagtgagagcttgaccgccacggctaattactccaaggccgttcaccaggttctggatgttgtgcatgaagtgctccaccaccaacgtaggttggagtcgatctggcagcatcggaaagtgcgtctgcaccagcggctgcagctgtgtgtcttccagcaggacgtgcaacaagtgctggattggatagagaatcacggcgaagcgtttttatccaaacatactggagtggggaaatccctccaccgagcacgagccctacagaaaaggcacgatgacttcgaagaagtggctcagaacacctacaccaacgcggacaagctgttagaggcagccgaacaactggcacagaccggcgagtgcgacccagaggaaatctacaaagctgcacggcatctggaagttaggatacaggatttcgttcgtagggtggagcagcggaagctcctgctggacatgtctgtgtcctttcacacccacacaaaggaactgtggacttggatggaggatcttcagaaggagatgttagaggacgtctgcgcagacagtgtcgatgctgtgcaggagttgattaagcagtttcaacagcagcagactgccacactggacgccactctcaacgtgatcaaggagggcgaggatctcattcagcagctgaggtcagctccaccatcactgggggaaccctcagaggctagggattcggccgtgtctaacaacaagacgcctcactcctcttccatctcacacattgagtcagtcctgcaacaactagatgacgctcaagtacagatggaggaactttttcacgaacggaagataaagctggacatttttctacagctacgcatctttgagcagtacactatagaagtgaccgccgaactcgatgcctggaatgaagatctgctacgtcaaatgaatgattttaataccgaagatttaaccctggctgagcaaagactccaacggcacactgagcgcaagctagctatgaacaatatgactttcgaggttatacagcaaggacaggacctgcatcaatacattacagaagtccaagcctctggcatcgagctgatttgtgagaaggacattgacctcgctgcccaagtgcaagaattgctggagttcttgcatgagaaacagcacgagctggagttgaacgcagagcagactcataagcgcctggaacaatgtctgcagttgcggcatctccaggccgaagtgaaacaggtgctggggtggattagaaacggtgagtccatgctgaatgcctccctggtcaatgcttcgtcattgtctgaggcagaacaacttcaacgggaacacgagcaattccaactggccatcgagagcctattccacgccacttccctacaaaaaacccaccaatcagctcttcaagttcagcagaaggccgaagtgctgttacaggccggtcactacgacgcagatgctatccgcgaatgcgcagagaaagttgcgcttcattggcagcaactgatgcttaagatggaagataggcttaagctcgtgaacgccagcgttgccttctacaagactagcgagcaagtatgttcagttttggagtcgctcgaacaggaatatcgcagagacgaggattggtgtggcggacgggataagctgggtccagcagctgagatagatcatgtcattcctcttatttccaagcatttggaacaaaaagaggccttccttaaagcatgcacattagctcgacgaaacgccgaagtgttcctgaaatacatacatcgcaacaacgttagtatgccctcagttgccagccataccagaggaccagagcagcaggtgaaggcaattctgtctgagctgctgcagagagaaaacagagttctacacttttggacgttgaagaaacgcagactggatcagtgtcagcaatacgtggtcttcgagcgcagtgccaaacaagccctggattggattcaggaaactggcgagttctacctctctactcatacatctacgggcgagacaacagaggagacacaggagctgctgaaggaatacggagagtttcgcgtccccgctaagcagaccaaggagaaggtgaagctgttgatacagctggccgactcctttgtcgaaaagggccatatccatgccaccgaaatacggaagtgggtcacaaccgttgacaaacattaccgagacttttctctgaggatgggcaagtaccgctactccctagagaaagcgttaggggtgaatacggaagacaacaaggatctggagctggacattattcctgcctcattgtcggatcgtgaagtcaagctgcgggatgcaaatcacgaggtcaacgaagagaaaagaaagagcgccagaaaaaaggagtttattatggccgagctactgcagactgagaaagcctatgtccgcgacctgcacgagtgcctggaaacctatctttgggaaatgacatccggggtggaggaaatccctcctggcatacttaacaaggaacacatcatcttcgggaatattcaggagatttatgattttcacaacaacatctttctgaaagagctagagaagtacgaacagttacccgaagatgtggggcactgctttgttacttgggccgacaaattccagatgtacgtgacctattgcaagaataagccggattccaatcaactgatccttgaacatgcaggcacctttttcgatgaaattcaacagcggcacggactggcgaatagcatttctagctacctcatcaaacccgttcaaagaattacaaaatatcagctgctgctgaaggagctgctgacatgttgtgaagaaggaaaaggggaattaaaggatggcttagaagtcatgctgagcgttcctaagaaagccaacgatgccatgcacgtcagcatgctggaagggtttgatgaaaacctggacgtgcaaggcgaactgatcctgcaggatgcattccaagtttgggacccaaagtctcttataaggaaaggaagggaaaggcatttgttcctctttgagattagtctggtcttcagtaaagagatcaaagactcttcaggacatactaagtacgtgtacaaaaataagctgcttacaagcgaactgggggtgactgaacacgtagagggtgacccatgtaaatttgccctttggtctggacgtacccccagctctgacaacaagaccgtcctgaaagcctctaacatagaaacgaagcaggagtggatcaagaatattagagaggttatccaggagcgtatcatccatctgaaaggtgcattgaaagagccactacaattaccgaaaactccggctaaacagcgtaataacagcaagcgtgatggagtcgaagacatagactctcagggtgacggtagctcacaacctgatactattagcatcgcgtcaagaacaagccagaataccgtagattccgataagctgagtggcggatgcgagcttactgttgttctgcaagattttagcgctggacactctagtgagcttacgatccaggtgggtcagactgtagagctgctcgaacgtccctctgaacgacctgggtggtgcctagttcggactactgagcggtcccccccacttgaggggctggtgcctagctcagccctgtgcatctctcactcacgatctagcgtggagatggactgtttctttccccttgtcaaggatgcctacagccacagctcatcagagaacggaggaaaatctgaatctgttgctaatcttcaggcccagcccagtcttaattccatacactcctctcctgggccaaaaagaagcaccaatacactcaagaagtggctgacaagtcctgttcgacggttaaacagcggcaaggcagacggcaacataaagaagcagaagaaagtaagggacgggcgaaagagctttgatttgggctctcccaaaccaggtgatgaaaccacaccgcagggtgattcagccgatgagaaatccaaaaagggatggggtgaggacgaaccagacgaggaaagtcacacccccttgcctcctcccatgaagatctttgacaatgatcccacacaggacgaaatgagctccagcttgctggcggctagacaggccagcacagaagtgcccacagcggcagacctcgttaatgcaatcgaaaaacttgttaaaaacaagctgtccttggaaggaagtagttatcgcggaagccttaaggaccctgctggctgcctgaatgagggtatggctcccccaaccccaccaaaaaatcctgaagaggagcagaaagctaaggccctgcgtgggcgaatgttcgtcctgaacgaactggtgcagacggaaaaagattacgtgaaagacttgggaatagttgttgagggctttatgaagcggatcgaggagaagggtgtgcccgaggacatgcggggaaaagacaagatagtgttcggaaacatccatcaaatctacgattggcacaaggattttttcctcgccgaactcgaaaagtgcattcaagagcaagacaggttggctcagctctttattaaacacgagaggaaacttcacatatacgtatggtactgtcagaataagccccgatcagagtatatagtcgccgagtacgatgcatatttcgaggaagttaaacaggaaattaatcagcggctcactctctccgacttccttatcaagccgatccaacgcataacaaaatatcagctgctgctaaaggatttcctgcgctattctgagaaagcaggactggagtgttcggacatcgagaaggcagtcgaactgatgtgtcttgtaccaaagcggtgtaacgacatgatgaatcttggcagactccagggctttgagggcaccctgacagcccagggaaaactgctgcagcaggatacattttacgtaatagaactcgacgccggaatgcagagcaggaccaaagagcgcagggtttttctgtttgagcagatagtcatcttctctgagctcctacgcaagggttcactgactcctggctacatgttcaagcgatctattaaaatgaattatctcgtccttgaggaaaatgtcgataatgatccctgcaagttcgctctcatgaatagagagaccagcgaaagggtggttctgcaagccgctaacgctgatatccaacaggcctgggtccaagatatcaatcaggtgcttgagacccagcgtgactttctaaatgccttgcaaagtcccattgaatatcagcgcaaggagagatctacggctgtgatgagatcccagcccgcaaggctgccacaagcctctcccagaccttacagctccgtgcctgcgggaagtgaaaaacctccaaaggggtcctcatacaatccgcctcttcccccattaaagatcagcacctctaacggcagcccgggattcgaatatcaccagcctggtgataagttcgaagcatcaaagcaaaatgatttaggcggatgcaatggaacctccagcatggccgtgattaaggattattacgctctgaaagagaatgaaatttgcgtgtcccagggggaggtggttcaggttttagcagttaaccaacagaacatgtgtctcgtttatcaacccgcttcagaccattctcctgcagccgagggttgggtacctggatctatcttagctcccctcacaaaggccacagctgccgagtctagcgatggatcgataaaaaagtcttgcagctggcacaccctcaggatgcggaaaagagccgaagtggagaacactggaaaaaatgaagctactggccctcgcaagcccaaggacatcctgggcaacaaagtcagtgtaaaagaaacaaacagctccgaggaaagcgagtgtgatgacctcgacccaaacacatcaatggaaatcctcaaccctaacttcattcaagaagtggctcccgagttcctggtccccttggtcgacgtgacttgcctgttgggagataccgtgattttacagtgtaaagtttgcggcaggcctaaaccaacgatcacttggaaaggcccagatcagaacatcctagacacggacaacagctccgcaacctacaccgtgtcttcttgtgattccggcgagattacactgaagatatgtaatcttatgccccaggactcaggtatctacacctgcatcgccacaaacgaccatggaaccaccagtacttctgccacagtcaaagtacagggagtccctgcagcaccgaacaggccaattgcacaggagcggagctgcacttcagtcatcctcagatggttaccgccatcgagtactggtaactgcactattagcggctacactgtggaataccgggaagagggctcacagatctggcagcagagcgttgcatccacacttgatacgtacctcgtgattgaagatctgtccccaggctgtccgtatcaatttcgtgtttctgcctccaacccatggggcatctcccttccctcagagccatcagagttcgttcggttgcctgaatatgacgccgctgcggacggggctacgatttcttggaaggagaactttgattccgcctacaccgaactcaatgagatcggaaggggcagattttccatagtcaagaaatgtatacataaagccaccaggaaagacgtggccgtaaaatttgtgtcaaaaaagatgaagaagaaagagcaggccgcacatgaggccgctctgctgcagcatctgcagcacccccagtatataaccctgcacgacacatacgaatctcccacgtcatacatccttatcctggaactcatggacgacgggcgactcctagactatttgatgaatcacgacgaactgatggaagaaaaggttgcattttacattagagacatcatggaagccctgcagtacctccacaactgccgcgtcgcccacctggatataaaacccgaaaatctgcttatagatttgcgcatcccagttccacgcgtgaagctgattgatctggaagatgctgtacagattagcggtcactttcacatccatcatctgctggggaaccccgagtttgcggctccggaagtcatccagggcatacccgtcagcctcggcacagatatttggtccatcggcgtcctaacgtacgtcatgctgagcggcgtctcaccattcctagacgaatctaaggaggagacgtgtatcaatgtttgtcgggtcgatttcagcttcccccacgaatatttttgcggggtatcgaatgccgctcgggacttcattaatgtgatccttcaagaagacttcagacgtcggcctacagcggctacatgccttcagcatccttggttgcagccgcataacggctcttattccaagattccacttgatacgagtagattggcttgttttattgagcggcgtaaacaccagaatgacgttcgcccaatccctaatgttaagagctacatagtgaaccgtgtcaaccagggtactta

SEQ ID NO: 227518 - DNA, 3774 bp, synthetic construct
  misc_feature 1..3774: note = Description of Artificial Sequence: Synthetic coding sequence
  source 1..3774: mol_type = other DNA
atgaagggaggcgacagagcttatacccgcggaccctcacttggttggttattcgccaaatgctgctgttgcttcccatgcagagatgcatatagccatagtagctccgagaacggcggaaaaagcgagtccgtcgctaatttgcaggcccaacctagtcttaactctatccatagttcccccggacctaagcggtcaaccaataccctcaagaaatggctcacttcccctgttagacggctgaactccggaaaggcagatggaaatattaagaaacagaagaaagttcgagatggtcgaaagtccttcgatctaggcagccctaaaccaggcgacgaaactactccccaaggagacagtgcggacgaaaagtctaaaaagggctggggagaggacgaacccgacgaggagtcacatacccctctgcctccaccgatgaaaatcttcgataatgatccgactcaggacgaaatgtccctcgaaggttccagctatagaggaagccttaaggatccagcaggttgtttaaatgagggcatggccccacccacaccccctaagaatcctgaagaggaacagaaggctaaggccctccggggaaggatgttcgttttgaatgagttggttcagacggaaaaggactacgtcaaggacctgggcatcgttgtagaaggcttcatgaagcggatagaagagaaaggcgttcctgaggatatgaggggaaaggacaaaattgtgttcggcaacattcaccaaatttacgattggcataaggacttctttttggcagagctggagaagtgtattcaggaacaggacaggcttgctcaactgttcatcaaacacgaaagaaaattacacatttacgtctggtactgccagaacaagcctcgttccgagtatatcgtggcggaatacgacgcatatttcgaggaagttaaacaagaaattaaccagcgtctgaccctaagcgatttcctgatcaagccaattcagagaataacaaaatatcagttgctcctgaaggattttctgaggtactccgagaaggcaggcctggaatgttccgatatcgagaaagctgtggaactgatgtgcctggttcctaagcggtgcaacgacatgatgaatctggggcgacttcaggggtttgaaggcaccttgaccgctcagggaaagctgttgcagcaggatacattctacgtcatagagctcgacgcgggaatgcagagccgcacgaaagagcgacgagtctttctttttgaacagatcgtgattttcagtgagttgctgagaaagggtagtctgacacccggttacatgtttaagcgctctatcaaaatgaactacctggtgctggaagagaatgtagataacgatccatgcaagttcgcgctgatgaaccgagaaacatccgagcgcgtggtgctgcaagcggcaaacgcggacattcagcaggcgtgggtgcaggacattaatcaagtattagagacacagcgggatttcttaaatgccctgcaatcaccaattgagtatcagcggaaagagaggtctaccgctgtcatgcggtctcagcctgctcgtctacctcaggcatccccacgaccatactcgtcagtacccgcagggtcagagaaacctcccaaaggttctagttataacccaccccttcccccacttaaaatctcaaccagcaacggcagtcccggatttgaatatcaccagcccggagacaagtttgaggctagtaagcaaaatgatctggggggttgtaacgggacgtcctctatggctgtgataaaagactactacgccctcaaagagaatgaaatctgcgtttctcagggcgaggtggtccaggtgctggcagtgaaccagcaaaacatgtgtctcgtgtatcaaccggcatcagatcacagtcctgcagccgagggatgggtgcccggatccatattagcccctctgactaaagctaccgcagccgaatcatctgatggtagtatcaaaaaaagctgttcctggcacacactgcggatgagaaaaagagcagaagtggagaacactggcaaaaatgaggccacagggccacggaagcctaaagacatccttggaaacaaggtaagcgttaaagaaactaattcttcagaagagtccgagtgtgacgacctcgatccaaataccagcatggaaattctcaaccctaatttcatccaggaagtcgcgccagagtttctggtgcctctcgtggacgtgacatgcctgctaggcgacacagtcattctgcaatgcaaggtatgcggccgtcccaaacctaccatcacatggaaaggaccagatcagaacatcctcgacacggacaatagctctgccacttacacagtgtctagctgcgacagcggggagattaccttgaaaatttgcaacctgatgcctcaggactctggaatttacacctgtatagccaccaacgaccatggtactacgtctacatccgcgaccgtgaaagtgcagggcgtcccagcagctcccaatcgccctatcgcacaagagcggtcatgtacgtctgtcatccttaggtggctgcccccaagctccaccggcaattgcacaatctctgggtatacagtcgagtaccgagaagagggaagtcagatctggcagcaatctgttgcctccacactggatacctatctggtaatcgaagatttgtccccaggttgcccttatcaatttagggtgtccgcatcaaatccatggggaataagtctgccatcagaaccatccgagttcgtccgattgcccgaatacgacgctgccgcagatggagccaccatctcctggaaggagaattttgatagcgcgtacacagaactgaacgagatcgggagggggcgatttagcattgttaagaaatgtatccataaggcaacccgcaaggatgtcgctgtcaagtttgtgtcgaaaaaaatgaaaaagaaggaacaggcagcccacgaggccgcattgttacaacatctgcagcatcctcagtatatcaccttgcacgatacctacgagagtccaacaagttacatcctaatcctggagctaatggacgacggaaggctcttagactatctcatgaaccacgatgagctgatggaggagaaggtcgctttctacatccgggacatcatggaggctttgcaataccttcacaattgtcgggtggcccatctcgacatcaaaccagagaatctgcttattgacctgcgtataccagtgcccagggttaagctgatcgacctcgaggacgcagtgcagatcagcggtcacttccacatccatcatctgctgggcaatccagagtttgccgctcccgaggtgattcaaggaatcccagtgagcctcggcaccgatatctggagcattggtgtgctgacttacgttatgctttccggtgtaagccctttcctagatgaaagcaaggaagaaacatgcatcaacgtttgtcgggtggattttagcttccctcatgagtacttttgcggcgtgtctaatgctgccagagatttcataaacgtgatccttcaagaggactttcgcaggaggcccaccgccgcaacatgtctgcagcacccttggttgcaaccacacaatgggtcctacagcaagataccacttgacacctcccgcctcgcatgtttcatcgagcggcgtaaacaccagaatgatgttcggccaatcccgaacgtcaaatcttacattgtgaatcgcgtcaaccagggaacctag

SEQ ID NO: 227519 - DNA, 4964 bp, synthetic construct
  misc_feature 1..4964: note = Description of Artificial Sequence: Synthetic coding sequence
  source 1..4964: mol_type = other DNA
atgacagaccgattctgggatcagtggtatctgtggtatctgaggcttctgagactgcttgacagggggagtttccgcaatgatggcttgaaggcatccgacgtgcttcccattttgaaagagaaggtcgccttcgtgagcgggggtcgagataagagaggagggcctattctcacatttcctgcgaggagcaatcacgataggatccgccaggaagatttgcgcaaactggtgacttatcttgcctccgtcccatcggaggacgtgtgcaaaaggggctttaccgtgattattgatatgcggggaagcaagtgggacctgatcaaaccactcctgaaaactttacaggaggcttttcccgcagaaatccatgtggctctgatcataaagcccgacaacttctggcagaaacagaaaactaacttcgggtcatctaagtttatctttgaaactagcatggtctccgttgaaggactgacgaagcttgtcgatccaagtcaattgacagaggagtttgacggctccctggactataatcacgaggaatggattgagctgcgactgagcctagaagagttctttaactccgctgtgcacttgctgtcgaggctggaggacctgcaagaaatgctagctcggaaagaattccctgttgatgttgagggatctcgccgtctaattgatgaacacacccagctaaaaaagaaggtcctgaaggcccctgtagaggagctcgacagggaggggcagagacttcttcaatgtattcgatgctccgatggattttcggggaggaactgcatccctgggtctgccgactttcagtccctggtcccgaaaatcacctccctgcttgacaaactgcattccactcgccaacatctccatcagatgtggcacgtgcggaagctcaagcttgatcagtgcttccagcttaggttgtttgagcaggatgccgagaagatgttcgactggatttctcataataaggagctgtttctacagtcacacactgaaatcggcgtctcctatcaatacgccctcgacctccagacacagcataaccatttcgcgatgaatagcatgaatgcctacgtgaatattaatcgcattatgtctgtggcaagccggctgtctgaggccggtcattatgcctcccagcagatcaaacagatatccacacaactggatcaagaatggaagtcattcgctgctgctctggacgagcggtcaacaatcctggcaatgagtgcggtatttcaccagaaggctgagcagtttctgtctggcgtcgatgcatggtgcaaaatgtgcagtgaggggggactgcccagtgagatgcaggatctggagctcgctatccatcatcaccagaccctctatgaacaggtcactcaggcatacaccgaagtatcccaggacggaaaagcactcctggatgtgctccagaggcccctctccccaggcaactcagaaagcttgactgctaccgctaactacagcaaggcggtgcaccaggttctggacgtggttcacgaggtcctgcaccaccaacggcgattggagagcatctggcagcacaggaaagtgcggcttcatcagagactacagctgtgcgtgttccagcaagacgtgcaacaggtgcttgattggatcgagaaccatggagaggcctttttgagtaagcatactggcgtgggaaaaagcctgcatcgtgcccgtgccctgcagaagaggcatgatgactttgaagaagtcgcacagaatacctacaccaatgctgacaaactcctggaagccgcagaacagctcgcccaaactggggagtgtgacccagaagagatatataaggccgcaagacacctggaggttaggattcaggactttgtcagacgagtggagcagaggaagcttctgctggatatgtcggtaagctttcacacacataccaaggagctgtggacatggatggaagacttgcagaaagagatgctggaggatgtgtgcgctgacagcgtagatgctgtgcaagagctgataaaacagttccaacagcaacagaccgcaacactggacgctaccctaaacgttataaaggaaggggaagaccttatccagcagctgagatccgctccgccaagcctgggggaacccagtgaggcacgggacagtgccgttagtaataataagacaccacactcatccagcatctcccatattgaatccgttttacagcagctggatgacgcccaggttcagatggaagaactattccatgagcgcaagattaaattagacatttttctgcagctgcggatcttcgaacagtataccatagaggtcacggccgaactagacgcttggaatgaggatctcctgcggcaaatgaatgatttcaatactgaagaccttacattagctgaacagaggcttcagcgacacactgagcgcaaactggcaatgaacaacatgacatttgaagttatccagcagggccaagacctgcatcagtatataactgaggtacaggcctctgggatcgagctcatctgcgaaaaggatatagatcttgcagcacaggtccaggagctgctcgagttcttgcatgaaaaacagcatgagctcgaactgaatgctgagcagactcacaaacggctagagcaatgcctgcagctcaggcatctccaagctgaggttaagcaggttctagggtggattaggaacggcgagagcatgctgaacgcttctctggtgaacgctagttccctatccgaggccgaacaactgcaaagggaacatgagcagttccagctggccatcgagaaaactcaccagtccgccctgcaggtgcagcagaaggccgaggtgctgctgcaggccggtcactacgatgccgacgctatcagagaatgtgccgagaaggttgcactgcactggcagcaacttatgcttaaaatggaggacaggctaaagctggtgaacgcatccgtggctttttacaagacaagtgaacaggtctgtagcgtgctcgagagcttggagcaggagtaccggagagatgaagactggtgtggcggacgcgataaactcggcccagctgcagagatagatcatgtcattccactcattagcaaacacctggagcaaaaagaagcgttcttgaaggcttgcaccctcgcaagacgaaatgcggaagtttttttgaaatacatccaccgcaataatgtgtccatgccttcggtggcctctcacacccggggtcctgagcagcaggtgaaagccatcttatctgaactgctgcaaagggagaatcgtgtgcttcacttttggaccttgaagaagcgaagacttgaccagtgccagcagtacgtggtcttcgaacggtctgcaaagcaagctctggactggatacaggaaaccggtgagttttacctgagtacgcacacatcaacaggagagaccactgaagagacacaggagctgctcaaggagtacggagaatttcgggtcccagctaaacagactaaagaaaaagtgaagctgcttatccagcttgccgactcgttcgtggagaaagggcatatacatgctactgagattcgcaaatgggtgacgactgtggacaagcactacagagatttctccctaaggatgggaaaatatcgctatagcctggagaaggccctgggggtgaacaccgaagacaacaaggacctagagcttgacatcatcccagcgtccctcagcgaccgagaagtaaaactgagggacgcaaatcatgaagttaacgaggaaaagcgcaaatctgccagaaagaaagaatttattatggcagaactgctgcaaacagagaaagcctacgttagggatctccatgagtgtctggagacctatctttgggagatgacgtccggcgtggaagaaattccacctggaatcctcaataaggagcacatcatctttggtaatatccaggagatatatgacttccacaacaacattttcctcaaagaactggagaagtacgagcagctccccgaggacgtcgggcactgctttgtgacctgggctgacaagttccagatgtacgtcacgtattgcaagaacaagcccgattccaatcagctgatcctggaacatgcaggaacattttttgatgagattcagcagagacatggactagctaactctattagcagttacctcattaaaccggtccagcgtatcacaaagtaccaactgctgctcaaggagctcctgacatgttgcgaggaaggaaagggagaactaaaagatgggctcgaggtgatgctctccgtaccaaaaaaagccaacgatgccatgcacgtaagcatgctggagggatttgacgagaaccttgatgtgcagggtgaacttatcttgcaggacgccttccaggtgtgggaccccaagagcttgataagaaaaggtagggagaggcatctgtttctgtttgagatctcccttgtgtttagcaaggaaatcaaggactcctccgggcacacaaaatatgtatataaaaataaactgcttacctcagagctgggggtgactgagcacgtggaaggagatccctgtaagttcgccctgtggagcgggagaacaccatcctctgataacaagacagtcttgaaggcctccaatatcgaaacaaaacaggaatggatcaagaatattagggaagtcattcaagagaggataatccacctgaaaggcgcactgaaagagcccttgcaattgcccaagacaccggcaaagcaaagaaataattctaagcgcgacggcgtggaggatatcgacagccagggagacgggagttcgcagccagacactatctctattgcctctcgaacctcccaaaataccgttgattcagacaaggacgggaatctggtaccacgatggcacctggggccaggagacccctttagcacttatgtcta

SEQ ID NO: 227520 - DNA, 789 bp, synthetic construct
  misc_feature 1..789: note = Description of Artificial Sequence: Synthetic coding sequence
  source 1..789: mol_type = other DNA
atgtggtttctggttctgtgtctagctctgtccttaggcggaaccggagccgctccacctattcagagtcgaatagtgggcggatgggaatgtgagcaacactcacagccttggcaggccgcattgtatcacttctccactttccagtgcggtgggattctcgtgcatagacagtgggtcctgaccgccgctcattgcatttcagataactaccagttgtggctgggaaggcacaacctcttcgacgatgaaaacacggcgcagttcgtccacgtgtcagagagttttccacacccaggatttaacatgtctctgctggaaaatcatacacgccaggccgacgaagattactcacatgatttgatgcttttgcgcctgacggagcctgccgataccattacggacgcagtgaaggtagtcgaactcccaacggaggaacccgaggtcggttcgacctgcctggctagtggatggggctcgatcgaacccgagaatttctcatttcccgacgacctgcagtgtgtggatctgaagatcttgccgaacgatgagtgtaagaaggctcatgtacagaaggtcactgattttatgttgtgtgtaggccacctcgagggtggaaaagacacctgcgtgggggactctgggggtcctctgatgtgcgatggggtactgcagggggtaacaagttggggatatgtcccttgtggaactccgaacaagcccagtgtggccgtccgggttctgtcctacgttaaatggattgaggatactattgccgaaaattcttag

SEQ ID NO: 227521 - DNA, 483 bp, synthetic construct
  misc_feature 1..483: note = Description of Artificial Sequence: Synthetic coding sequence
  source 1..483: mol_type = other DNA
atgtccctccttgagaatcacaccagacaggctgacgaagactattcccacgatttaatgctgctacgcttgacagagcctgctgacaccatcacagatgctgtgaaggtggttgagctgccaactgaagagcccgaggtcggcagcacctgtttagcgtcaggatggggttccatagaacccgagaacttcagttttccggacgacttgcaatgcgtggacttgaaaattcttcctaacgacgaatgcaagaaggcacacgttcagaaggtgactgatttcatgctgtgcgttggtcaccttgagggaggcaaagatacctgcgttggcgattccggaggccctctgatgtgcgacggcgtgctccagggggttacttcatggggctatgtgccttgcgggacgccgaacaagccaagtgttgctgtacgggtgctgagttacgtcaagtggatcgaggatacaattgccgaaaactcctag

SEQ ID NO: 227522 - DNA, 1917 bp, synthetic construct
  misc_feature 1..1917: note = Description of Artificial Sequence: Synthetic coding sequence
  source 1..1917: mol_type = other DNA
atgatcctattcaaacaggccacctactttatttcactgttcgccaccgttagctgtggctgcctaacccagttatacgaaaacgctttcttccgcggtggtgatgtggcctctatgtacacccccaatgcacagtattgccaaatgcgctgtacatttcatccaaggtgcctgttgttttcttttctgccggctagcagtatcaacgatatggaaaagcgctttggatgctttctgaaggacagcgtgacaggcacccttcccaaagtgcacagaacgggggctgtgtctggacactctctgaaacagtgcgggcaccagatctccgcctgtcaccgggatatctataaaggtgtcgacatgcgtggcgttaattttaacgtttctaaagtttcctctgtggaggaatgccagaaacggtgtactagcaacatacggtgtcaatttttttcatacgccacgcaaacgttccataaagcagagtaccgtaacaactgtctgctgaagtactctccaggcggaacaccaaccgctattaaagtattgtctaacgtcgagagcggcttctccctgaagccatgcgccttgtcagagatcgggtgccacatgaatatatttcagcatttagcattttctgacgtggacgtcgctagagtactcacaccagatgcctttgtgtgtcgaactatctgcacttatcacccaaattgtctgtttttcaccttttataccaatgtttggaaaatagaaagccagcgcaatgtttgtctgcttaagactagcgagtctggcactccatcatctagcactccccaagagaacacaatcagcggctatagcctcctgacctgtaagaggacactgcccgaaccatgccattccaaaatctatcctggtgtagacttcgggggagaagaactgaatgtaacgttcgtcaagggagtcaacgtctgtcaggagacctgtacgaagatgatcagatgtcaattcttcacgtacagcctacttcctgaagattgcaaagaggagaagtgtaagtgcttcctgcggctgtccatggatgggtcacctacaagaattgcttatggaacccaagggtcctccggctactctctgcgactgtgcaatacaggcgataatagcgtatgcaccaccaaaacctccactcgtatagtggggggaactaattcttcctggggggagtggccctggcaggttagcctacaggtgaaattaacagcacagaggcatttatgcggaggtagcctcattggacaccagtgggtgctgacagccgctcactgttttgatgggcttcccctgcaggacgtttggaggatctattcagggatcctgaatctctctgacataacaaaggacaccccattctcccaaattaaggagatcattatacaccagaactacaaagtgagcgagggcaaccacgacattgccttaattaaactgcaggcccctctgaactatactgagttccagaagcctatttgcctcccatctaagggagacacaagcaccatttacaccaattgctgggtgacaggctggggattctccaaagagaaaggggagatccagaatatcttacagaaagtgaatatccccctggttacgaacgaggagtgccaaaagcgctaccaggattataagatcacccaacgtatggtttgcgccggatacaaagaaggcggaaaggatgcttgtaagggggatagcgggggaccgcttgtttgcaaacacaacgggatgtggagactcgtgggcattacttcctggggcgagggatgtgcacgccgtgaacagcctggcgtctacacaaaggtggccgagtatatggactggattttggagaaaactcagagcagcgatggaaaagcccagatgcagtctcccgcttag

SEQ ID NO: 227523 - DNA, 1545 bp, synthetic construct
  misc_feature 1..1545: note = Description of Artificial Sequence: Synthetic coding sequence
  source 1..1545: mol_type = other DNA
atgtatacaccgaacgctcaatactgccagatgcggtgtacattccaccctaggtgtcttctattttcctttttgccggctagctcaatcaatgacatggaaaagcgcttcgggtgcttcctgaaggattctgtgaccgggaccttacctaaggtacaccggactggtgcagttagcggtcactccctgaagcagtgcggacaccagatcagcgcctgccatagggacatttataagggtgtcgatatgaggggcgtaaattttaatgtgtcaaaggtgtcttcagtcgaagaatgtcagaagaggtgcacctccaatattaggtgccaatttttttcgtacgccacacagactttccacaaggctgaatacaggaacaactgcttactgaagtactcgcccggtggcactcctacagccataaaggtcctttccaacgtcgaaagtggcttcagtctaaagccttgcgccctttcagagatcggctgtcacatgaatatctttcagcatctcgctttttcagatgtcgatgtcgccagagtattgacaccagatgcctttgtgtgccgaacaatttgtacgtatcacccaaattgcttgttcttcacgttctataccaacgtctggaaaatcgagtcacagcgaaacgtttgtctgctcaagaccagcgaatctggtactccgagctccagcactccccaggagaacactatatccggttactccctactcacttgcaaaaggactctgcccgaaccatgtcacagcaagatttatccgggagtcgattttggcggagaggagttgaacgtcactttcgtgaagggcgtgaacgtttgccaggagacctgtactaagatgattaggtgtcaattctttacgtactcgctacttcctgaagattgcaaggaagagaagtgtaagtgttttctgcgtctgagtatggacgggtctccaactcgaatcgcgtatggcactcagggaagctccggttacagccttcggctgtgtaacactggcgataacagcgtgtgtaccaccaagacgtccacccgcattgtcggcggaactaactcatcatggggggagtggccatggcaggtatcattacaggttaaacttaccgcacagagacatctttgtggtggtagtctcatcgggcatcaatgggtgctcactgccgcacactgttttgacgggcttcctttacaggacgtgtggaggatttactccggtatactgaacctctcggacattactaaggatacaccgttttcccagattaaagaaatcatcatccaccagaactacaaggtatcagagggaaaccacgacatagcgctgattaagctgcaggcacctcttaactacacagagttccagaagccaatttgcctgccatctaagggcgatacaagcacaatatacactaattgttgggtaacggggtggggattctcgaaagagaaggggcgattccgatggtctctatccctccagacccaatggaacgttgctttcggcggtcaccaccagttgggttag

SEQ ID NO: 227524 - DNA, 447 bp, synthetic construct
  misc_feature 1..447: note = Description of Artificial Sequence: Synthetic coding sequence
  source 1..447: mol_type = other DNA
atgattctcttcaagcaggcaacatattttatctcactctttgccaccgtaagctgcggctgcctgactcagctgtacgagaatgcctttttcaggggcggagacgtcgctagcatgtatacgcccaacgctcagtattgccagatgagatgcacatttcaccccagatgcctcttgttttcctttttaccggcaagtagcattaacgacatggagaagcgcttcggctgtttcctgaaggacagcgtgacagggacgctgcccaaggtgcataggacaggggctgtctctggccattcactgaaacagtgtggccatcaaatctccgcatgccacagagatatctacaaaggggtggacatgaggggcgtgaattttaatgtctcaaaggtgtcatcggtagaagagtgccagaaacgctgtacatctaacatccgctgtcagtag

SEQ ID NO: 227525 - DNA, 753 bp, synthetic construct
  misc_feature 1..753: note = Description of Artificial Sequence: Synthetic coding sequence
  source 1..753: mol_type = other DNA
atgcggattctgcagctgattcttctagctctggcaacaggcctcgtcggtggggagaccaggattatcaaagggttcgagtgcaagcctcattcacagccatggcaggcggcactcttcgaaaagacccgtctgttgtgtggcgctacactcatagctccacggtggcttctgaccgccgctcactgtctcaagccacgttatatcgtccacctgggccaacataatttgcagaaagaagaaggatgcgagcagacccgcactgccaccgagtcttttccccatcccggattcaacaactccctgcctaacaaggaccatcgcaacgacatcatgctggtgaagatggcttctccggtgtccattacttgggccgtccggcctctaaccctctcaagtcggtgtgtcactgccggaaccagctgcctgatctctggctggggaagtacatcttctccacagctgcgactgccccatactctgagatgtgccaacattacgattatcgagcaccaaaagtgtgaaaatgcttatccaggcaacataaccgacaccatggtatgcgccagtgtacaggaaggagggaaagactcatgccagggggattctgggggacccctggtgtgcaatcagtcccttcaggggatcatatcatgggggcaggacccttgcgcaattacccgcaaacccggagtatacaccaaagtgtgcaagtatgtggattggattcaggagactatgaaaaacaactag

SEQ ID NO: 227526 - DNA, 849 bp, synthetic construct
  misc_feature 1..849: note = Description of Artificial Sequence: Synthetic coding sequence
  source 1..849: mol_type = other DNA
atgcaacgactgagatggttacgcgactggaaaagttcgggcaggggtcttactgccgcaaaagaacccggagccaggagcagtccccttcaggccatgcgaatattgcaactgatcttgctggcgttagccactggcctggtggggggagaaacaagaatcataaaggggtttgagtgcaagccacacagccagccatggcaggccgctctgttcgagaagacacgtctgctgtgtggtgcaaccttgatcgccccacggtggctattgaccgctgcccattgcctgaagccacggtacattgtgcacctcggccagcacaatcttcaaaaggaagagggctgtgaacaaacgcggaccgctactgagtcttttcctcaccccggttttaacaactccctgccaaacaaggaccacaggaacgatattatgctggtcaaaatggcctcccccgtaagtataacctgggccgtccggcctctgacattgtcgagtagatgcgtgacagctgggactagctgtctgattagcggctggggatcgaccagctcaccgcagctaagattaccccacactcttagatgcgcgaatatcacgataattgaacatcagaagtgcgaaaacgcttaccccggaaacatcaccgacactatggtgtgtgcgtccgtgcaggaggggggaaaggattcttgtcagggggacagcggaggtccactagtgtgcaaccaatcactgcagggcatcattagctggggtcaggacccttgcgccatcacccgaaaaccaggcgtctatacgaaggtgtgcaaatacgttgattggatacaggaaaccatgaaaaataattag

SEQ ID NO: 227527 - DNA, 828 bp, synthetic construct
  misc_feature 1..828: note = Description of Artificial Sequence: Synthetic coding sequence
  source 1..828: mol_type = other DNA
atgagaatcctgcagcttatcctgttggccctcgcaactggactggttgggggagagacacgaattattaaaggcttcgagtgcaagcctcactcacaaccctggcaggcagccctgtttgaaaaaacacgcctgctgtgcggagccacccttattgcaccccgatggttattgacagctgcacactgcctgaaaccttgggttagtctgacatccccaacacacgtgtccccagacttgtcctcctcaaattattgcctctcccatttgtctagatatatcgtgcatctgggacagcacaatctgcagaaggaagaggggtgcgaacagacgaggacagcaaccgagagctttccccatcccggattcaacaattcacttcctaacaaggaccataggaatgacatcatgcttgtgaaaatggctagccctgtcagcatcacatgggccgtcaggcccttaaccctcagctcaagatgcgtgaccgccggtacatcatgtttgatttctggttggggaagtaccagcagcccacagttaagattgccacatactttaaggtgcgccaacattactatcatcgaacatcagaaatgtgaaaatgcctatccaggcaacatcaccgacaccatggtctgtgctagcgtacaggaaggcggtaaggactcctgccaaggtgacagtggaggccctctggtctgcaatcagagcttgcaaggaatcattagctgggggcaggacccttgcgctatcactagaaaacccggagtgtataccaaagtttgcaagtacgtggattggatccaggagactatgaaaaacaactag

SEQ ID NO: 227528 - DNA, 753 bp, synthetic construct
  misc_feature 1..753: note = Description of Artificial Sequence: Synthetic coding sequence
  source 1..753: mol_type = other DNA
atgcgaatccttcaactgatcctactggctctcgctacaggacttgtgggcggagagacccggatcatcaaaggcttcgaatgcaagccacatagccagccctggcaagccgcattgttcgagaagacgagacttctgtgcggcgcaacactcattgcaccacgttggttactgacagcagctcactgccttaagcccagatacatcgtccacttggggcagcacaacctccagaaggaggaggggtgtgagcagaccaggaccgccaccgagtcatttccccatccgggattcaacaacagcctgccaaacaaagatcaccgaaacgacatcatgctggtcaaaatggcctcccccgtgtcaatcacatgggccgtgcgacctctgaccttgtcatcccggtgcgtcactgctgggacatcttgcctgatttccgggtggggaagcacctcgtccccacagctgcgattaccccatactctgcgatgtgcaaacattacaataatcgagcatcaaaaatgcgagaatgcctaccctggaaacatcacggatacaatggtttgcgctagcgtgcaggaaggtggcaaagattcgtgccaaggagactctggtggccctctcgtgtgcaaccagagcttgcaaggcattatttcctggggccaggacccatgtgcgataaccaggaagcctggagtgtacacaaaagtgtgtaaatatgttgattggatccaggaaacaatgaaaaacaattag

SEQ ID NO: 227529 - DNA, 849 bp, synthetic construct
  misc_feature 1..849: note = Description of Artificial Sequence: Synthetic coding sequence
  source 1..849: mol_type = other DNA
atgcaaaggctgaggtggctgcgggattggaaatcttccgggagggggttgaccgcagctaaagagcccggtgcccgatcgagccctctccaggcaatgaggatcctgcagctaattctcttagcgctggctactggactggttgggggtgagacacgcatcattaaggggtttgaatgcaagccacacagtcaaccatggcaggccgctttatttgagaagacgaggctcctctgtggcgctacattaatcgcacctcgctggcttctcactgccgctcactgcttgaaaccaagatatattgtgcatctgggacagcacaatctacagaaggaggaaggctgcgagcaaacccgtacggccacagagtccttcccccaccctgggttcaataattctctcccaaacaaggaccaccgcaacgatatcatgctggtcaaaatggccagccccgtgagcattacctgggcggtgcgtcccttgaccctttcttctcgctgcgtaaccgcgggtacaagctgcctgatttctgggtggggatcaacgtctagccctcaattacggctgccacacacattgagatgtgcaaatattacaatcattgaacaccaaaaatgtgagaatgcctatccaggtaatatcaccgataccatggtttgtgcctccgttcaggagggaggcaaggactcatgtcagggggattcaggaggccctctggtgtgcaaccagtccttgcagggcatcatttcctgggggcaagacccatgtgccattacccgcaaacccggtgtatacactaaagtttgcaaatacgtcgattggattcaggagacgatgaagaacaactag

SEQ ID NO: 227530 - DNA, 765 bp, synthetic construct
  misc_feature 1..765: note = Description of Artificial Sequence: Synthetic coding sequence
  source 1..765: mol_type = other DNA
atggggttatcgatctttcttctcctttgtgtgcttggtctgagccaagcagccaccccaaagatcttcaacggcacagaatgcggccgaaactctcagccatggcaagttgggctgtttgagggcacatcactgcgttgcggtggtgtcctgatcgaccaccgttgggttttgactgcggcacattgttcgggcagccgatattgggttcgcctgggcgagcacagcctgtctcagttggattggactgaacagatccgccattcagggttctcggtgacccacccgggttatctcggtgccagtacctcccacgagcacgatctgagactgctgagactgagactgccagttcgcgtcacaagctccgttcagcctctgccgcttcccaatgattgtgccactgccggaactgagtgtcacgttagcggctggggtattaccaaccaccctaggaaccccttccccgacttgctgcagtgtctcaacctgtctattgtgagccacgcaacatgtcacggtgtctatcccggacgaattacatctaatatggtgtgcgcgggaggggtgcctgggcaagatgcctgccagggtgatagcggcggacctctagtctgtggaggcgtcctgcagggtctcgtgagttggggctctgtcggcccttgcgggcaggacggaatccccggagtgtacacttacatttgcaattcaactctggtggggttgggcacaagttggaactttaattcctgccagcccttctag

SEQ ID NO: 227531 - DNA, 435 bp, synthetic construct
  misc_feature 1..435: note = Description of Artificial Sequence: Synthetic coding sequence
  source 1..435: mol_type = other DNA
atggccctttcagtgggcgttactcactctcgtggacgctggggctgtcttcgagcaccagcatgtgcagcgggagtgtcacttctgaccactggtggaagcagccagagactcacggcagccgcagatccgtttcctgacttgctgcagtgcctcaatctgtccattgtgtcacatgcaacctgtcacggcgtctaccctggtcgaatcaccagcaatatggtgtgcgcaggaggagtgcccggacaggacgcctgtcagggtgacagtggagggccactggtatgtggtggagtcctccagggtttggtgtcctgggggtccgtgggcccatgcggacaggacggcatacctggcgtatacacctacatttgcaatagcactctggtggggttgggaacttcctggaatttcaattcctgccaacccttttag

SEQ ID NO: 227532 - DNA, 747 bp, synthetic construct
  misc_feature 1..747: note = Description of Artificial Sequence: Synthetic coding sequence
  source 1..747: mol_type = other DNA
atggggctgtccatcttcctgctgttgtgtgtgttgggcctctcgcaggcagccacgcccaaaatatttaatggaacagaatgcggcaggaactcgcaaccctggcaagtgggactgttcgaaggcacatccctccgttgcggtggtgtgctgatcgatcatcgctgggtgctgaccgctgcccactgttctggcagccggtactgggtgaggctcggcgaacactccctgtcccagttggattggaccgagcagattaggcattcagggttctcggttacacatccaggatatctgggagccagcacatcccacgagcatgacctgaggctgttgagattgcgccttcccgtgcgcgttacgtcatcagtgcagccactccctttaccaaatgactgcgcaacagctggaacggaatgtcatgtctcagggtggggcattaccaatcaccctcgaaatcctttccctgacctcctccagtgcctcaatttatcaatcgtgagtcacgctacttgtcatggcgtctacccaggcaggattacaagtaacatggtgtgcgccggaggtgtgcccggtcaggatgcctgtcaaggtgattccggtggtccattagtgtgtggtggtgttttacagggccttgtgagctgggggagcgtgggcccttgcggacaagatggaatccctggggtgtacacttatatttgcaaatacgtggactggatccggatgatcatgaggaataattag

SEQ ID NO: 227533 - DNA, 747 bp, synthetic construct
  misc_feature 1..747: note = Description of Artificial Sequence: Synthetic coding sequence
  source 1..747: mol_type = other DNA
atgggactttctatctttctgttgctatgcgttcttggactgagtcaagccgctaccccaaagatatttaatggaacagaatgtggtcggaacagtcagccatggcaagtcggactgttcgaaggaaccagcctgcgctgtggaggggtgcttatcgatcacaggtgggttctgaccgctgcacattgttccggcagtcgctattgggtgcggctcggggagcattctctgagccagctggactggacggaacagatcaggcactctggtttttcggtgacgcatcccggatacctgggcgcttcgacttcgcacgaacacgatctgcgccttctcagattgcgactgcccgtccgagtgacgagttctgtgcagcctctccccctcccaaacgattgtgctaccgccggtacggaatgccacgtgtcaggatggggcataaccaatcaccctcgtaatccatttcctgatctgctgcagtgcctgaatctgagcatcgtatcccacgccacgtgccacggcgtctatccgggaagaattacctctaacatggtgtgcgcaggcggagtccctggccaagacgcttgccagggagacagcggaggcccattagtgtgcggcggagttctccagggccttgttagctggggctccgtgggcccatgcggccaagatggaattcctggagtatacacatatatttgtaaatacgtggactggataaggatgatcatgcgcaacaactag

SEQ ID NO: 227534 - DNA, 336 bp, synthetic construct
  misc_feature 1..336: note = Description of Artificial Sequence: Synthetic coding sequence
  source 1..336: mol_type = other DNA
atgggattaagcatcttcctgctgctctgcgtcctgggtctgagtcaggcagcaaccccgaagatctttaacggtactgaatgtgggagaaattctcagccttggcaggtcggtttatttgagggaacctctttaagatgtggcggagtcctgatcgaccatcggtgggtgctcacagcagctcactgttccggcaggccaatccccggatctgccccagtcccccaaccgctccatcggctgccatgccacctcccctggtgcgtgtcacgggaaaaccatgaacagcacggagtttgtaggagaaggccgggagcagggtgccttcctggttag

SEQ ID NO: 227535 - DNA, 834 bp, synthetic construct
  misc_feature 1..834: note = Description of Artificial Sequence: Synthetic coding sequence
  source 1..834: mol_type = other DNA
atgtggccattggccctggtgatcgcaagcctgaccctggcattgagcggtggcgtgagtcaggagtcgtccaaagtcctcaatacgaacggtacaagtgggtttctccccggaggctatacgtgcttcccacacagccagccctggcaagctgccctgcttgtgcagggccgactgctatgcgggggagtcctcgtgcaccctaagtgggtgctgacggcagcacattgcctgaaggaggggcttaaggtctacctcggaaaacatgcactgggcagagtagaagcaggcgaacaggtcagagaggttgtccacagcataccacatccagaatataggcggtcacccacacacctgaaccatgatcatgatatcatgctgctcgagttacagtcacctgttcaattgactggatatatccagacactgcccctcagtcacaacaatcgcctgaccccaggtacaacgtgcagagtatccggatggggaaccacgacttccccccaggtcaactatccgaaaacgctccagtgcgcaaatatccagttacgctctgatgaagagtgtcggcaggtatatcccggtaaaataacagacaacatgttgtgtgcaggaacgaaagagggcggaaaagacagctgcgagggagattcgggtggcccactggtttgcaacaggacactctacggcatcgtgtcttggggtgattttccctgcggtcagcctgaccgcccaggggtttatacaagggtgtctcggtatgtattatggatccgagagactatcagaaaatatgagacccaacaacagaagtggttgaagggcccacaatag

SEQ ID NO: 227536 - DNA, 378 bp, synthetic construct
  misc_feature 1..378: note = Description of Artificial Sequence: Synthetic coding sequence
  source 1..378: mol_type = other DNA
atgtggccccttgcattggtcattgctagtctcacgctcgcgctgtctggcgttaactatccaaaaacgctgcagtgcgccaacatacagcttagatcagatgaggaatgccgtcaggtctacccaggaaaaattacagataacatgctctgcgccggaaccaaagaaggcggaaaggattcttgcgaaggcgattcagggggaccattagtgtgcaaccgcacattatacgggattgtcagctggggagacttcccttgcggacaacctgaccgaccaggggtgtatacccgagtgagtcggtatgtgctgtggatccgcgaaactatccgcaagtacgagacccagcaacagaagtggctaaagggccctcaatag

SEQ ID NO: 227537 - DNA, 297 bp, synthetic construct
  misc_feature 1..297: note = Description of Artificial Sequence: Synthetic coding sequence
  source 1..297: mol_type = other DNA
atgggtttgatttacaagtgcctgcccgagaaggtcaccgttaacattgaaactaggtgcctgcccggtgtattccagggctcacagcaccagtgggaccaatgggttagtccaaggtggctacaccttcttccacctctgtctgcactggcaggctgccctacttccgcccgagcggcaacactttggggctcacctggtccaccccagatgggccctcattgccgcaccctaagcaaggggggagcccagtccctccctcggcaggcccgacctcgcgcttgtggttcttggtag

SEQ ID NO: 227538 - DNA, 282 bp, synthetic construct
  misc_feature 1..282: note = Description of Artificial Sequence: Synthetic coding sequence
  source 1..282: mol_type = other DNA
atgtggcccctggcgctcgtaattgcctccttgaccctcgcattatccggcggtgaggactttaaggaaccatctcaaggccctcgggacgtgatggccgcttctcgaccagaggcgtttcctaagggtctaacactagagcctcggcctgaaaaagggggaatatgcggttgcctggccccaggtacaattctcggactgaaggttgggtggctgttttcctcaggtgatacaccatggatccacgccagagccacacccgagtgccacaccttaggctag

SEQ ID NO: 227539 - DNA, 834 bp, synthetic construct
  misc_feature 1..834: note = Description of Artificial Sequence: Synthetic coding sequence
  source 1..834: mol_type = other DNA
atgtggcccctcgccctggttattgcctccctcaccctcgcattgtccggaggtgtgtcacaagaaagtagcaaagtattgaacactaatggaaccagtgggttcctcccaggtgggtacacgtgtttcccgcactctcagccttggcaggccgctctgctggtgcagggtcggctgctgtgtggtggtgtgctggtccaccctaagtgggtgctaaccgccgcacattgtctcaaggaaggacttaaggtgtacctgggcaagcacgctctggggcgagtcgaagcaggagagcaggtacgtgaggtggtccatagcatcccacaccccgaatacaggaggagccctacgcacctgaaccacgaccatgatatcatgctgctggagctgcagtcacctgtgcagcttacgggatatatacagacacttcccctgtctcacaataatcggttgactcctggcacaacttgtagggtatctggatggggcacaactacatcaccccaggtgaactaccctaagactttacaatgcgctaatatccaactccgatccgacgaggagtgtcgtcaggtgtaccctggcaaaatcacggacaacatgctttgcgccggaaccaaagaaggcggaaaagattcttgcgagggagactcaggcggacccttagtgtgtaaccggactttgtatgggattgttagttggggtgactttccctgtggtcagccagatcggcctggcgtgtatacaagagtctcaaggtacgtgttatggattagggaaaccatcagaaagtatgagacccagcagcaaaagtggctgaagggcccacagtag

SEQ ID NO: 227540 - DNA, 804 bp, synthetic construct
  misc_feature 1..804: note = Description of Artificial Sequence: Synthetic coding sequence
  source 1..804: mol_type = other DNA
atgtctcttagggtcctgggcagcgggacatggccaagcgctcctaagatgtttttgctgctgacagctctgcaggtacttgcaatcgcaatgacccagtctcaggaagatgagaataaaattattgggggtcacacatgcactcgcagttctcagccatggcaggccgctctgctggccggaccacggaggcgatttctctgcggcggtgcactgctctctggccagtgggtaatcacggccgctcactgtggacgtcctatactgcaggtagctctggggaaacataacttgagaagatgggaggcgacacaacaggtgctgcgagtggtgcgccaggtgacacaccccaactacaacagtcgcacacacgacaacgatctgatgctcctacagttgcagcagccagccagaatcggaagagctgtgcgacctatcgaggtcactcaagcctgcgcttctcccggtacatcatgcagggtgtccggttggggcactatttcctcaccaatcgctcggtaccctgcctccctgcagtgcgtcaatattaacatcagccctgacgaggtgtgtcaaaaggcataccccagaaccattaccccagggatggtttgcgctggagtgccccagggcggtaaagactcttgccagggtgacagtggaggaccactggtgtgcagagggcaactacagggcctggtgtcctggggaatggaacgctgcgcactccccggataccctggggtatataccaacctgtgcaagtacagaagctggatagaggaaactatgagggataaatag

SEQ ID NO: 227541 - DNA, 804 bp, synthetic construct
  misc_feature 1..804: note = Description of Artificial Sequence: Synthetic coding sequence
  source 1..804: mol_type = other DNA
atgtctctgagggtgctgggctctggcacctggccaagcgcccctaaaatgtttctgttgttgacggccttgcaagtgctcgcaatagctatgacacagtcccaggaggacgagaataagataatcggtggacacacctgtaccaggagctcacagccttggcaggctgcattattggcaggacctcgcaggagatttctgtgcggcggagccctgctgagtgggcagtgggtgataacagcagcacattgtggccgtcccatcctccaggtagcgctgggaaagcacaacttaagaagatgggaggcaacacagcaagtactgcgcgtggtacgtcaagttactcatcctaactacaattcccggacgcacgacaacgacctcatgcttctgcagttacagcagcctgccagaatcggtcgcgctgtgaggcccattgaggtcacccaggcctgcgccagtcccggaaccagttgccgggtcagtgggtggggtacaatcagcagtcctattgctcgctaccctgctagtctgcagtgcgttaacataaacatctctcctgacgaggtttgccaaaaagcatacccacggacgatcacgccgggaatggtatgtgctggggtgcctcaggggggtaaggattcgtgccagggggacagcggtggccctctggtttgtaggggacagcttcagggacttgttagctgggggatggagcggtgtgccctgccgggatatcccggagtgtacaccaacttatgcaaataccgcagttggattgaggagaccatgcgcgataagtag

SEQ ID NO: 227542 - DNA, 804 bp, synthetic construct
  misc_feature 1..804: note = Description of Artificial Sequence: Synthetic coding sequence
  source 1..804: mol_type = other DNA
atgtctctgcgggttcttggttctggaacttggccctccgctcctaagatgtttctgctgcttacagcactgcaggtccttgccattgccatgacacagtcacaagaagacgaaaacaaaatcatcggaggccacacctgtactaggagctcccagccttggcaagccgctctccttgccggaccacgaaggcggtttctctgtgggggagcacttctctcaggccaatgggtgatcaccgcagctcattgtggcaggcctatcctccaggttgccctaggcaagcataacctgagaagatgggaagccacgcaacaggtgcttcgggtggtgcggcaagtgacacatcccaattataacagtaggacacatgataatgacctaatgctgcttcagctgcagcagcctgcacggatcggccgtgctgttcgcccaattgaagttacccaggcttgcgctagccccggtacctcctgccgggttagtggatgggggacaatctcgtcccctatcgccagatatcccgcttccctgcagtgcgtcaacatcaacatctctcccgatgaagtgtgtcagaaagcttatccacggactattacgcccggaatggtatgtgctggggtacctcagggcggtaaagattcttgtcagggcgatagcggagggcctcttgtgtgtagaggtcagcttcagggcttggtcagttggggaatggagcgatgcgccttgcccggataccctggagtctacactaatctgtgtaagtaccggtcttggattgaggaaacaatgcgggacaagtag

SEQ ID NO: 227543 - DNA, 486 bp, synthetic construct
  misc_feature 1..486: note = Description of Artificial Sequence: Synthetic coding sequence
  source 1..486: mol_type = other DNA
atgtggcttcttcttaccctctccttcctgctggcaagtacggcagcacaggacggggataaactgctggaaggcgatgaatgcgccccacattctcagccatggcaggtcgccctgtacgaaagaggacgcttcaattgtggcgctagtctgatttccccacattgggtgctgtccgccgcacactgccaaagcaggttcatgcgcgtgcgactcggtgaacataaccttcgaaaaagagatgggcctgaacagctgaggacgaccagcagggtgataccacacccgagatacgaagctcgctcccacagaaacgatattatgctgctgaggctagtgcagccagctcgacttaatccacaagtgcggccagcagtgctcccaacaaggtgcccacatccgggtgaggcttgcgtcgtatccggctggggattggtgagtcacaatgaaccagggacagctggttctcctcgcagccaagggtag

SEQ ID NO: 227544 - DNA, 771 bp, synthetic construct
  misc_feature 1..771: note = Description of Artificial Sequence: Synthetic coding sequence
  source 1..771: mol_type = other DNA
atgtggttgctactgaccctgtcatttctgctcgcatcaacagccgcacaggatggcgacaagctgctagaaggtgacgagtgtgctccacactcacagccatggcaggtcgccttgtacgagaggggaaggttcaattgtggcgcttctttaatctcacctcattgggtcctttctgcagctcattgccaatccagattcatgagagtgagactcggtgagcacaacttacggaaacgagatgggcctgagcaactccgaaccaccagtcgcgtgatccctcatccacggtacgaggctcgctctcaccgcaacgacatcatgctccttagattagtccaacccgctcgcctcaacccgcaggtcagacctgcggtcttacccactagatgtccacatcccggtgaagcttgcgtggtgtctggatggggcctggtcagccacaacgagccaggcaccgcaggatctccgcgaagtcaggtcagcctacccgatacccttcactgtgccaatatctctatcatcagcgacacctcttgcgataagtcctatcccggacgccttaccaacacaatggtatgcgctggagccgaaggacgcggagctgaatcctgtgagggagattctggcggacctctcgtctgcgggggaatactgcaagggatagtttcttggggcgacgtgccctgtgataacaccactaagcctggcgtttatacaaaggtgtgccattacctggagtggatacgggagaccatgaagcgcaattag

SEQ ID NO: 227545 - DNA, 516 bp, synthetic construct
  misc_feature 1..516: note = Description of Artificial Sequence: Synthetic coding sequence
  source 1..516: mol_type = other DNA
atgtggctgttgctgactcttagcttccttctcgcttcaacggctgctcaggatggagataagctactggagggagatgaatgcgccccacatagccaaccctggcaggtggctctatacgagcggggtcggtttaactgtggggctagcttgatatccccccactgggtgctatccgccgcacactgccaaagccgctttatgagagtgcggttgggggaacacaacctcagaaaacgagacggcccagaacagctgcggacaacttcacgggtcattcctcacccacgatacgaggcacgctcacacagaaatgatatcatgctgctacggcttgtgcagccagcgaggcttaatcctcagggagactcagggggacctcttgtgtgcggcggtattttgcagggcatcgtctcatggggcgacgttccatgcgataacaccaccaagcccggagtgtacacaaaagtgtgccactacttggaatggataagggaaactatgaaacgcaattag

SEQ ID NO: 227546 - DNA, 489 bp, synthetic construct
  misc_feature 1..489: note = Description of Artificial Sequence: Synthetic coding sequence
  source 1..489: mol_type = other DNA
atgtggctcttgctaaccctaagcttcctgctcgcctccaccgccgctcaggacggcgataagctgcttgagggtgatgaatgcgcccctcacagtcaaccctggcaggttgcactttacgagcgaggcaggtttaactgcggagcatctttaatctccccacattgggtactgagcgctgctcattgccagtccagattcatgcgagtgaggctgggggaacataatctgcgcaagagagacggcccagagcagctacgtacaactagtcgcgtgatcccacatccacgctacgaagccaggtctcatcgcaacgatataatgctgctgcggctcgtccagccagcaagactgaatcctcaggtgcgacctgctgtgcttcccacaagatgtccccaccctggggaagcgtgcgttgtgtccggctggggcctggtctcacacaatgaaccaggcactgccggttcccccaggtcacaaggcgcatag

SEQ ID NO: 227547 - DNA, 771 bp, synthetic construct
  misc_feature 1..771: note = Description of Artificial Sequence: Synthetic coding sequence
  source 1..771: mol_type = other DNA
atgtggctgcttctgacgctttcttttctgttagcatcaaccgccgctcaagatggggataagctcctggagggagatgagtgcgccccacatagccagccttggcaggtcgcgctgtacgagcgcggtagatttaattgcggagcgtctctaatcagcccgcattgggtgctgtccgcagcccactgccagtcgcgctttatgagggtgcgtttgggtgaacataacttgagaaagcgggacggccctgaacagctacggaccactagccgagtaatcccccacccacggtacgaagccagaagccataggaatgacattatgctactgaggctggttcagccggctcgcctaaacccccaggtgcggcctgctgtactgcccaccagatgccctcatcccggagaggcctgtgtcgtgtccgggtggggactagtgtctcacaatgagcccggaacagccggatctccaaggagtcaggtgagcctgccagacaccctgcattgtgcaaacattagcattattagcgacacttcttgcgacaagtcctaccctgggagactgaccaataccatggtatgcgcaggggctgaagggcgtggagcggagtcctgtgagggggacagtgggggacctcttgtgtgtggtggcatactccagggcattgtctcttggggtgatgtaccgtgcgacaataccacaaagcctggcgtctacaccaaggtgtgtcattatcttgagtggatacgggaaactatgaaacggaattag

SEQ ID NO: 227548 - DNA, 786 bp, synthetic construct
  misc_feature 1..786: note = Description of Artificial Sequence: Synthetic coding sequence
  source 1..786: mol_type = other DNA
atgtgggatctcgtactgagtatcgctctgagtgtgggatgcacaggcgcagtgcctcttatccaatctcgcatcgtcggcggttgggaatgcgagaaacattctcagccttggcaagtcgcggtatactcacacggatgggcccactgtgggggtgtcctagtgcacccacagtgggtgctcaccgcagcccactgcctgaagaaaaattcccaggtgtggttggggaggcacaacctgtttgaacctgaagatacaggacagcgtgtgcctgtgagtcacagcttcccccatcctctgtataatatgtccctactcaaacaccagtcattgcgccctgatgaagactctagccacgatctgatgctcctcaggctgtccgaaccagcaaagattacagatgtggtgaaggttttagggctgccaacccaggaaccagcccttggtaccacttgttacgcctctggttggggttctattgaaccggaggaatttctgcgcccacgatcactgcagtgcgtgtcactgcatctgctgagcaatgatatgtgcgccagggcctatagcgagaaggtgacagagtttatgctttgtgccggtctttggaccgggggtaaagatacctgcgggggagacagtggcggtcctctggtatgtaatggcgtgctccagggaattacctcatggggacccgaaccgtgcgcccttccagagaagcccgcagtctacaccaaagttgtgcactacagaaagtggataaaagatacgatcgctgcaaatccatag

SEQ ID NO: 227549 - DNA, 672 bp, synthetic construct
  misc_feature 1..672: note = Description of Artificial Sequence: Synthetic coding sequence
  source 1..672: mol_type = other DNA
atgtgggacctagtgctgagcatcgcactgtcggttggatgtaccggtgcagtccccctgatccagagccggattgtgggcggatgggagtgtgagaagcactcccaaccctggcaggttgccgtctactcccacggttgggcccactgcggcggtgttctggtccaccctcagtgggtgctaaccgccgcacactgcttgaagaaaaattcccaagtttggctcggaagacacaatctttttgaacccgaagacacaggtcagcgggtccctgtcagccacagttttccccatccgctctataatatgagcctgctgaaacaccaatccctgcggccagatgaggacagctcccacgacttgatgctgctacggctgagtgaaccggctaagattacagacgtagttaaggtgctaggcctccctactcaggaacctgccctcggcactacatgctatgcatctgggtgggggagcattgaaccagaagagttccttcggcctcgctccttacaatgcgtgtccttgcatctgttatcaaacgatatgtgtgcccgtgcgtactctgagaaagttacagaattcatgctgtgcgcaggactctggaccggcggaaaagacacatgcggtgtttctcacccgtactcacagcatctcgaagggaaagggtag

SEQ ID NO: 227550 - DNA, 480 bp, synthetic construct
  misc_feature 1..480: note = Description of Artificial Sequence: Synthetic coding sequence
  source 1..480: mol_type = other DNA
atgtctctgttgaagcatcagtctctccgccctgacgaagactcttctcacgatttgatgctccttagacttagtgagcctgctaaaatcacagacgtggtgaaggtgctgggcctgcctacgcaggagccggctctcggtaccacatgctacgcctctggctggggcagtatcgagcccgaagagtttctccggccaagatccttgcagtgtgtgtccttgcatctcctttccaatgacatgtgcgccagagcctattctgagaaagtaacagagttcatgttatgtgctggactttggaccggcggtaaggatacctgtggcggagattccggtggcccacttgtgtgtaacggagtgctccagggcataaccagttgggggccagagccttgtgcgctgccggagaaaccagctgtgtatactaaagtcgtgcattatcgcaagtggattaaagacaccatagcagccaacccatag

SEQ ID NO: 227551 - DNA, 786 bp, synthetic construct
  misc_feature 1..786: note = Description of Artificial Sequence: Synthetic coding sequence
  source 1..786: mol_type = other DNA
atgtgggtgccagtggtctttttgaccttgtcggtcacgtggattggcgctgctccgctcatccttagccggatagtcggcggatgggaatgcgaaaaacactcccagccctggcaggttttagtggctagcaggggcagagcagtgtgcggcggtgtgctggtacacccgcagtgggtcctgaccgctgcccactgtattcggaacaagagcgtgatcctcctgggtcgccactcactatttcaccccgaggacacgggccaggtcttccaggtcagccatagttttccacacccgctttatgacatgagccttttaaagaatcgcttcctccgaccaggggatgacagcagtcacgacctcatgctgttgcgcttgagcgagccggctgaactcaccgacgccgtgaaagtcatggacctccctacacaggagccagccctcggcacaacttgctatgctagcgggtggggatcaatagagcctgaagaattcttgactcctaagaagcttcaatgcgtggacctgcacgtgatcagtaacgatgtctgtgcccaggtgcaccctcaaaaagtgaccaaatttatgctctgtgcgggtcgttggaccgggggaaagtccacctgctcaggcgattctggcggtcctttagtatgtaatggagtcctccagggcatcacctcatgggggtctgagccatgcgccctcccagagaggccttctctttacaccaaagtggttcactataggaaatggataaaggacaccatagtggctaacccttag

SEQ ID NO: 227552 - DNA, 663 bp, synthetic construct
  misc_feature 1..663: note = Description of Artificial Sequence: Synthetic coding sequence
  source 1..663: mol_type = other DNA
atgtgggtgccagttgtgtttctgacgctcagcgtgacctggatcggcgctgccccactcatcctgtctcgcatcgtgggagggtgggaatgtgaaaaacacagtcagccatggcaagtactggttgcttcccggggacgtgctgtgtgtggcggagttcttgtccacccacagtgggtcctaacagctgcacactgcattagaaacaagagcgtgattctgctggggagacattccctgtttcatcctgaagatactggtcaggtcttccaggtcagccactccttccctcaccccttatacgatatgagccttctgaagaaccggttcctgcggcctggtgacgatagcagcatcgagccagaggaattcctgacgcctaagaaactgcagtgtgttgatctgcacgtgatcagcaacgatgtctgcgcccaggtccatccccagaaggtcaccaaattcatgctgtgcgctggtagatggaccgggggtaaatcaacatgctctggagatagtggagggccattagtttgcaatggtgtcctgcagggtatcacatcttggggttcggagccttgtgctctacccgaaaggccaagtttgtacacaaaagtcgtacattatcggaagtggataaaagacactatagtcgccaatccttag

SEQ ID NO: 227553 - DNA, 717 bp, synthetic construct
  misc_feature 1..717: note = Description of Artificial Sequence: Synthetic coding sequence
  source 1..717: mol_type = other DNA
atgtgggtgccggtagtgtttttgaccttgagcgtaacatggatcggtgcagctcccctcattctgtcacgtatagtggggggatgggagtgcgaaaaacatagccagccgtggcaggtcctggttgccagccgtggaagggctgtgtgtggaggtgttctcgtgcacccacagtgggtcttgaccgccgctcattgtatacggaacaagagcgtcatactgctcggcagacactctctcttccacccagaggataccggtcaggtcttccaagtatcccacagcttcccccacccactttatgatatgagtctgttgaagaatcgcttcttgcggccaggcgacgattcgtctcacgaccttatgctattgaggctcagcgagccagccgagctgacggacgcagtcaaagtcatggatttgccaacccaggaaccagcactgggaaccacatgttacgcctctggatggggatcaatcgagcctgaagaatttcttacaccaaagaagctgcagtgtgtggatctccacgttattagtaacgatgtgtgcgcacaggtgcacccgcagaaggttaccaagttcatgttgtgcgccggacgatggaccggcggtaaatccacatgttcttgggtaattttaatcaccgagcttacaatgccggcacttcctatggtgctgcacggttccttggtgccctggaggggaggcgtatag

SEQ ID NO: 227554 - DNA, 657 bp, synthetic construct
  misc_feature 1..657: note = Description of Artificial Sequence: Synthetic coding sequence
  source 1..657: mol_type = other DNA
atgtgggtgccggttgtgtttttaacactttccgttacgtggataggcgctgcgcctcttatcctgagcagaatagtcggcggttgggaatgcgaaaagcactcccagccatggcaggtgctggttgcaagtagaggacgggcagtttgcggaggggtcctggtgcacccccagtgggtgctgaccgcggctcattgcatccgcaagcctggagacgattctagtcacgatctgatgctcctgagattatcagagccagctgaactgacagacgccgtgaaggtgatggatcttccaacacaggaacccgctctgggtaccacgtgctatgccagcgggtggggatcgatagagccagaagaatttctgacaccgaaaaagctgcagtgcgtagatctgcacgtaatcagcaacgatgtgtgcgcccaggttcacccgcaaaaagtgacaaaattcatgttatgcgccggacgctggactgggggaaaatctacctgcagcggagactccggcggacccctggtgtgcaatggggtgcttcagggcattacgagttggggcagcgagccatgcgcactgccggagcggccatctctctacaccaaggtggtccattaccgcaagtggatcaaggacactatcgtggccaacccatag

SEQ ID NO: 227555 - DNA, 210 bp, synthetic construct
  misc_feature 1..210: note = Description of Artificial Sequence: Synthetic coding sequence
  source 1..210: mol_type = other DNA
atgtgggtaccagttgtgtttctgacgctgtctgtcacttggatcggagccgctcccttgattctgtccagaatcgttggcggttgggagtgcgagaaacatagtcagccctggcaggtcctcgtcgcatcaaggggtagagcagtctgcggcggtgtgctcgtgcaccctcagtgggttctcaccgcagcccactgcatccggaagtag

SEQ ID NO: 227556 - DNA, 765 bp, synthetic construct
  misc_feature 1..765: note = Description of Artificial Sequence: Synthetic coding sequence
  source 1..765: mol_type = other DNA
atggctaccgccggaaacccatggggctggtttttgggatatctaatcctgggagtcgctggctctctggtctccggaagctgttcccagatcatcaatggggaggactgcagccctcactctcagccctggcaggccgctctagtgatggagaacgaattgttctgttcaggcgtgctcgttcaccctcagtgggtcctatctgccgctcactgttttcagaactcttacacaatcggtttaggacttcattcacttgaggctgatcaggaaccaggttctcagatggtggaagccagcttgtcagtgcgccacccagagtacaataggcctcttctagcgaatgacctgatgctgataaaattggatgaaagtgtttccgagtccgacaccattaggagtatttccattgctagtcaatgtcccaccgcgggaaactcttgcttggtctctggctggggcctcttggccaacggcagaatgcctactgtcttgcaatgcgtcaatgttagtgtggtctcagaggaggtctgtagcaagctatacgatccactttaccaccctagcatgttttgtgccggaggtggacatgatcagaaggattcctgcaatggagactctggtggtccgctgatctgtaatggatacctccaggggctggtgagcttcggcaaagcaccctgcggccaggtgggggtgcccggtgtttacactaatctgtgtaagttcactgagtggatcgagaagaccgttcaggccagttag

SEQ ID NO: 227557 - DNA, 333 bp, synthetic construct
  misc_feature 1..333: note = Description of Artificial Sequence: Synthetic coding sequence
  source 1..333: mol_type = other DNA
atggaaaacgagctgttttgcagtggcgtcttggtacatccccaatgggttttgtctgccgcacactgttttcagaatagttacacaatcgggctgggcctacattcccttgaagcagatcaggagccagggtcacagatggttgaggccagcctgtcagtaagacaccccgaatacaatagacctctgctcgccaatgaccttatgctgattaagctggacgaaagtgtcagcgagtctgataccatacgatccatttccatcgcttctcaatgccccacggctggcaattcctgtctggtgagcggttggggactgttggctaacggctag

SEQ ID NO: 227558 - DNA, 735 bp, synthetic construct
  misc_feature 1..735: note = Description of Artificial Sequence: Synthetic coding sequence
  source 1..735: mol_type = other DNA
atgaaaaaattgatggtggtcctgtccctaatagcggctgcttgggcagaagagcagaacaagcttgttcacggaggcccttgcgacaagacaagccatccgtaccaggccgcattgtacacaagcggacatttgctgtgtgggggagtactgatccaccccctctgggtactcactgctgctcactgtaagaagccaaacttacaggtgttcctgggtaagcacaatctacggcaacgggaaagctctcaggagcagtcatctgtcgtgagggccgttattcacccagattacgacgcagcctcccatgatcaagacatcatgctcttacgtcttgcccgacctgctaagctgtccgagctgattcagcctcttccactggagagagactgttccgctaataccacttcatgtcatatcctgggctggggcaaaaccgctgacggcgatttccccgatacgatacagtgtgcctacattcatttagtatcccgggaagaatgcgagcatgcttacccaggtcagattactcagaatatgctctgtgcgggagacgagaaatatgggaaggatagctgccaaggggactcaggcggacccttagtttgtggagatcaccttcggggtctggtgtcgtgggggaacataccctgcggcagcaaagaaaagcccggtgtgtacacaaacgtgtgtaggtacacaaactggatccagaagaccatccaagccaagtag

SEQ ID NO: 227559 - DNA, 735 bp, synthetic construct
  misc_feature 1..735: note = Description of Artificial Sequence: Synthetic coding sequence
  source 1..735: mol_type = other DNA
atgaagaagctgatggtggtacttagtctgatagcagccgcatgggccgaggaacaaaataagctggttcacggtggtccctgcgataagacaagccatccctatcaagctgctctgtacacttctggtcacctactgtgtggaggtgtactgatccaccccttatgggtgctcaccgcagcccactgcaagaagccgaacctccaagtgttcttaggaaaacacaacctgagacaaagagagtcctcacaggaacagtcatccgtcgtgcgcgcagtcattcaccctgattacgacgctgctagccacgaccaggacattatgctgcttcgcttagccaggcctgcaaaactcagcgagctgatccagccactgccgctcgagcgggattgtagcgccaataccacttcctgtcacatcttggggtggggcaagaccgcggatggggacttcccagacaccattcagtgcgcctatatccatctggtgtctagggaagaatgcgaacatgcataccccggtcaaattacccagaacatgctttgcgcaggcgatgagaaatacggcaaagatagctgtcagggagacagtggtggcccattagtctgcggtgaccatctgcgaggtctcgtgtcctggggtaacatcccttgcggctctaaggagaaacccggagtatacaccaatgtttgccggtataccaattggatacagaagacgattcaggccaaatag

SEQ ID NO: 227560 - DNA, 363 bp, synthetic construct
  misc_feature 1..363: note = Description of Artificial Sequence: Synthetic coding sequence
  source 1..363: mol_type = other DNA
atgaagaagctgatggtggtcctctccctcattgccgctgcctgggccgaggagcagaacaagctcgtacatggcggaccctgtgataagacttcccacccctaccaagcagctttgtacacatcagggcacctgctgtgcggcggtgtgttgatccatcccctctgggtgctaacggccgctcattgtaaaaagcccgtcatcttgggcgtaaggtggtacgtggagacaacaagcgaggctctgtgtcacggcgtcacctctcccgtggatcagaggcggtcccaggagagcacccccacttctgctgacactcgtacaggttccaagaagccgttcaggccctctgatcccgatatgtag

SEQ ID NO: 227561 - DNA, 414 bp, synthetic construct
  misc_feature 1..414: note = Description of Artificial Sequence: Synthetic coding sequence
  source 1..414: mol_type = other DNA
atgttgctgagactggcaaggccagcaaagctgagtgagttaatccagccactgccactggagcgtgactgtagcgccaacaccacaagctgccacattctaggctgggggaaaaccgctgatggagacttcccagatacgattcagtgcgcttacatccatcttgtcagccgggaagaatgtgagcatgcctaccctgggcagattacccaaaacatgctgtgtgccggagacgaaaagtacggcaaggatagctgtcagggggatagcggaggcccactcgtgtgcggcgatcacttgcgcggtctcgtgagctggggcaatattccctgcggatctaaagagaaaccgggtgtttatacaaatgtgtgtcgctatactaactggatccagaaaactattcaggcgaagtag

SEQ ID NO: 227562 - DNA, 123 bp, synthetic construct
  misc_feature 1..123: note = Description of Artificial Sequence: Synthetic coding sequence
  source 1..123: mol_type = other DNA
atgaagaagctgatggtagtacttagtctgatcgctgccggtatcttccgctcgagctggggatctatcacgttcggaaaggggagagtccctcggtcacgcgttttgctgagtggtctgtag

SEQ ID NO: 227563 - DNA, 414 bp, synthetic construct
  misc_feature 1..414: note = Description of Artificial Sequence: Synthetic coding sequence
  source 1..414: mol_type = other DNA
atgctgctgagactggccagaccagccaaattatccgaactgattcagccgctccctctggagagagactgcagcgccaacacaacctcctgccatatcctgggctggggtaaaacagccgatggggatttccccgataccattcaatgtgcttacatacacttggtgtcgcgcgaagagtgcgaacatgcctatcccggtcagattacgcaaaacatgctgtgcgcgggagacgagaaatacggcaaagatagttgtcaaggggattcaggaggtcccctggtttgtggtgaccacctacgcggactggttagttggggtaatatcccctgtggctcaaaagagaaaccaggagtatacacaaacgtgtgtcgctataccaactggattcagaagaccatccaggcaaaatag

SEQ ID NO: 227564 - DNA, 783 bp, synthetic construct
  misc_feature 1..783: note = Description of Artificial Sequence: Synthetic coding sequence
  source 1..783: mol_type = other DNA
atggggcgtcctaggcccagggccgcaaaaacctggatgtttctcttgctacttggaggcgcttgggccggtcactctcgcgctcaagaagacaaggttctcgggggacacgagtgtcagccccattcacaaccatggcaagccgctctctttcagggccagcagttactttgtggaggggtgctcgtgggcggaaactgggtgctcactgctgcacattgcaaaaagcccaagtatacggtacgactcggcgaccactcattgcagaacaaggacggacccgagcaggagatcccagttgtgcagagcattccccacccctgctataattcttccgatgtagaagaccataaccacgacctgatgcttttgcagctgcgcgatcaggccagtctaggcagtaaagtaaaacccatctctctggccgatcactgcacccagccaggtcagaagtgtaccgtgtccggctgggggactgtcacgtccccgagagagaattttccagatactctcaattgcgcagaggtcaaaatcttcccacaaaaaaaatgcgaggacgcgtaccccggacagataacagacgggatggtgtgcgccggaagctctaagggcgctgacacatgccagggcgatagcggcggacctctcgtttgtgatggcgcactgcaaggcattacatcatggggctcggacccatgcgggagaagcgacaagcccggagtgtacactaatatctgccgatacctggactggatcaaaaaaattattggctccaagggctag

SEQ ID NO: 227565 - DNA, 99 bp, synthetic construct
  misc_feature 1..99: note = Description of Artificial Sequence: Synthetic coding sequence
  source 1..99: mol_type = other DNA
atgggacgaccccgtcccagggcagccaagacatggatgtttctgctgctcctgggcggagcctgggccggtagattttggcggccaccaggcgtgtag

SEQ ID NO: 227566 - DNA, 360 bp, synthetic construct
  misc_feature 1..360: note = Description of Artificial Sequence: Synthetic coding sequence
  source 1..360: mol_type = other DNA
atgggcaggccaaggcctcgcgcagctaagacttggatgttcctgttgttactgggtggggcttgggcggaaaactttcctgacactctaaactgcgcagaagttaagatcttcccgcagaagaagtgtgaggacgcataccccggtcagattacggacggaatggtgtgcgctggtagcagcaaaggagccgacacctgccagggagatagcggcggaccactggtctgtgatggtgcgctgcaggggatcaccagctggggctcggacccgtgcggtagaagcgacaagcctggagtttataccaacatatgtcgataccttgattggatcaaaaagattataggtagcaagggctag

SEQ ID NO: 227567 - DNA, 918 bp, synthetic construct
  misc_feature 1..918: note = Description of Artificial Sequence: Synthetic coding sequence
  source 1..918: mol_type = other DNA
atgggacggcctcggcctagggctgccaaaacctggatgttcctgttactcctggggggagcgtgggccgcatgcggatccctggatctcttgacaaaattatatgctgagaatctgccttgcgtacacctgaatccacagtggcccagccagccgtctcattgccctcggggttggcgcagcaacccgttgcctccagctgccggtcattcgagagctcaagaggacaaagtcctcggagggcatgagtgtcagccccacagtcagccttggcaggccgcactgtttcagggccagcagttgctctgcggcggtgtgcttgttggcggaaattgggtcctgacggccgctcattgtaagaagccgaaatatactgtccgtctgggagatcatagtttacaaaataaagacggtcccgaacaggagatccctgtggttcaatcgattccgcacccttgctataactcttctgacgtcgaggaccacaaccatgatcttatgttgttacagctgcgagaccaagctagtctggggtcaaaggtcaagcccatcagcctggctgatcactgtacacagcccggtcagaagtgtactgttagcggttggggtacagtaacatcccccagggagaactttccagatactctcaattgtgctgaggtgaaaattttccctcagaaaaagtgcgaggacgcgtaccctggtcaaatcaccgacggaatggtttgtgctgggtcaagtaaaggcgctgatacctgccaaggcgatagcggcggacctctcgtgtgcgatggggctctacagggaatcacctcttggggaagcgacccatgcggcagatctgacaagcccggtgtgtacactaatatctgtcgctacctagactggattaaaaagatcatcggatcaaagggatag

SEQ ID NO: 227568 - DNA, 783 bp, synthetic construct
  misc_feature 1..783: note = Description of Artificial Sequence: Synthetic coding sequence
  source 1..783: mol_type = other DNA
atgggtagacccagaccacgtgccgcaaagacatggatgttcttgctactattggggggagcctgggccggacattcgcgggctcaagaggacaaggtcctcggagggcacgaatgccagccccacagtcagccctggcaggcggctcttttccagggccaacaactgctctgcggcggtgttctcgtcggaggcaattgggtgctcaccgccgcacattgtaagaagccaaagtacacagtaaggctgggggatcacagtctccaaaataaagacgggcctgagcaggagattcctgtggtccagtccatcccccacccctgctataatagtagcgacgtggaagatcataaccatgacctgatgctgctacaactccgggatcaggctagcctcggaagcaaggtaaagcccattagtttagccgatcactgcactcagcctggtcagaagtgcaccgtctctggttggggcaccgtcacatctcctcgtgagaacttccccgacaccctgaattgcgcggaagttaagatcttccctcaaaaaaagtgcgaagatgcctatccgggtcagatcacagacggtatggtgtgcgccggttcatctaagggggcagatacctgtcaaggcgactccgggggacccttggtctgcgatggcgcattacagggtataacatcatgggggagcgacccatgtggtagatccgacaaacctggggtatatacaaacatttgccggtacctagattggataaaaaagatcatagggtctaagggctag

SEQ ID NO: 227569 - DNA, 753 bp, synthetic construct
  misc_feature 1..753: note = Description of Artificial Sequence: Synthetic coding sequence
  source 1..753: mol_type = other DNA
atgaaactagggctgctatgcgcgttgctgagtcttctggctggccatggctgggctgacacacgcgcaattggggcagaagaatgccgccctaacagtcagccctggcaagccggactgttccacctgactaggctcttctgtggggctactctgattagtgatcgctggctcctcacagcagcacattgtcggaagccttatctgtgggttagattaggggagcatcatctctggaagtgggaaggcccagagcagctgttccgggtgacggattttttccctcatccgggttttaataaggatttaagcgccaatgaccacaatgacgatatcatgctcatccgacttcccagacaggctcgactgtcgcccgctgtacagcctttgaacctgtctcagacttgcgtgtctcctggcatgcagtgcctcatttctgggtggggagccgtcagcagtccaaaagccctcttccctgtgacgctgcagtgtgccaatattagcattctcgagaacaaattgtgtcattgggcataccccggacacatctccgatagtatgttatgtgccggtctgtgggaaggcggacggggatcgtgtcaaggcgattcagggggtccactggtctgcaatgggaccctggccggagtggtgtcgggcggtgcagagccttgtagtaggcccagacgtcctgcggtgtacacttccgtgtgtcactatctggactggattcaagaaattatggaaaattag

SEQ ID NO: 227570 - DNA, 753 bp, synthetic construct
  misc_feature 1..753: note = Description of Artificial Sequence: Synthetic coding sequence
  source 1..753: mol_type = other DNA
atgaagctgggcttgctatgtgcgcttctctccctgcttgccggtcacggctgggccgataccagagcaatcggcgctgaggagtgcaggcctaatagccaaccatggcaggctggcctctttcatctgacccgcctgttctgcggcgctaccctcatctctgaccggtggcttctgaccgctgctcattgcagaaaaccgtatctttgggtccggctgggagaacaccatctgtggaaatgggagggaccagagcagctgtttagggtcacggattttttccctcaccccggtttcaacaaggatctcagcgcaaacgaccacaacgatgatatcatgttgattaggctcccccgacaagcaaggttgtctcctgcagttcagcctctgaatttgagccaaacatgcgtaagccctggaatgcagtgcctcatctccggttggggggctgtgtcctcaccaaaggccctctttccagtaactctgcagtgtgctaatataagcatattagaaaacaaactatgtcattgggcatacccaggacatatcagtgatagcatgttgtgtgctggcctgtgggaagggggaagaggttcgtgtcagggagacagtggcggtcctctcgtctgtaacgggacactcgccggtgtcgtgtcaggcggagccgagccgtgcagccggcctagacggcctgctgtttatacctctgtgtgccactacctggactggatacaggagattatggaaaactag

SEQ ID NO: 227571 - DNA, 186 bp, synthetic construct
  misc_feature 1..186: note = Description of Artificial Sequence: Synthetic coding sequence
  source 1..186: mol_type = other DNA
atgaagctgggactgctgtgcgcactcttgtctctcctggctggaatctgcggctctgcgcttgagtcaaccactagcggcaatggacgcgtgcgttcatcctgttctggcttaagaacctctagccccacacttgcctcaacacggaccagcgccccaatgacaacaatgatgactagctgctag

SEQ ID NO: 227572 - DNA, 2043 bp, synthetic construct
  misc_feature 1..2043: note = Description of Artificial Sequence: Synthetic coding sequence
  source 1..2043: mol_type = other DNA
atggtgcccggagtgccgggagccgtcctgactctgtgcctttggctcgcagccagctcgggctgtctggccgcaggtcccggagccgcagcagctaggcgactggatgaaagcctgtccgcagggtctgtccagagggctcgctgcgcctccaggtgcctctcactgcaaatcacccggatatctgctttcttccaacactttcaaaataacgggtccctggtttggtgtcagaaccataaacagtgctcaaaatgtctagagccctgtaaagaatcaggagatcttcgaaaacaccaatgccagtcattttgcgagcctctcttcccaaaaaagtcttacgagtgtttgacaagttgtgaattcctgaaatatattctgcttgtgaagcagggggactgcccagcgccagagaaagcaagcgggtttgctgctgcttgtgtagaatcctgtgaggtggacaatgagtgtagcggagtgaaaaagtgctgcagtaacggctgcggccatacatgccaagtcccaaaaacactctataagggcgtgccattgaagcctaggaaggaactgcgcttcaccgaactgcaaagcgggcagctggaggtcaagtggtcaagtaagtttaatatttcaatcgagcccgttatatatgtagttcagcggaggtggaactatggcatccatccatctgaggatgatgccacacattggcaaacggtcgctcaaacgactgatgaacgcgtccagctgaccgacatccggccaagtcggtggtatcaattccgagttgcagcagtgaatgtacacgggacgcgcggttttactgcaccaagcaagcactttcgatcttcaaaagacccgtccgctccccctgcacctgcgaatctgcgcctggctaactcaaccgtgaatagcgacggcagcgtgacagtcactatcgtgtgggacctgcccgaagagcctgacatccctgtgcatcattataaagtgttttggagctggatggtaagctctaagtctttggtgcctaccaaaaagaagcggcgaaaaactacagatgggtttcaaaactcagtgatccttgagaagctgcagcctgactgcgattatgtcgtggaattgcaggctattacctactgggggcagacacgcctgaagagtgccaaagtttccttacacttcacaagtacccacgctaccaataataaagagcagctcgttaagacccgtaaggggggtatccagacccagctgccttttcaaaggaggcgaccaactaggcccctggaggttggagctcccttttaccaggacggacagctccaggtcaaggtctattggaagaagacggaggatcccacagtaaatcgttaccacgtgcggtggttccctgaagcctgcgcccacaaccggacaacaggatcagaagctagctctggaatgacacacgagaactatataattctacaggatctgtcattctcttgtaaatacaaggtgactgttcagccaatcagacctaaatctcactctaaagccgaggccgtgtttttcaccaccccaccctgttccgcactgaaaggcaaatcccacaagccagttggctgtctgggggaggcaggtcacgtgctctccaaggtgttggcgaagcctgagaatctgtccgcctcattcatcgttcaggatgttaatattactgggcactttagctggaaaatggccaaggccaatctttatcagcctatgacgggatttcaagtcacctgggccgaggttactacagaatctaggcagaactccctccccaacagtatcattagccaatcacaaatcctgccttccgaccactatgtgttaacagtgcccaacctgagacccagtacgctgtacaggttggaagtacaggtccttacccctggcggtgaaggcccagccactatcaaaactttccgcactcctgaattgcccccatcatcagcacaccgaagccacctgaaacaccgacaccctcatcactataagccgtcccccgaacgatactag

SEQ ID NO: 227573 - DNA, 2631 bp, synthetic construct
  misc_feature 1..2631: note = Description of Artificial Sequence: Synthetic coding sequence
  source 1..2631: mol_type = other DNA
atggagctgattactattctcgagaagaccgtgtcacctgacaggctggaacttgaggcggctcagaagttcctcgaaagggcggcagtggaaaacctgcctacatttctggtggagctctcccgcgttctcgctaatccgggaaattctcaagtcgccagagtagcagccggattgcaaatcaagaattctttgacttctaaagacccggacattaaggctcagtaccaacagagatggttggctatagatgccaacgccaggcgcgaagtcaaaaactacgtccttcagacactaggtaccgaaacctatcgtccaagctccgcaagccagtgtgtagctggcattgcctgtgccgagatcccagtaaaccagtggccggaactcatcccccaattagtggccaatgttactaatcctaactcgacggaacacatgaaggagagcactctggaagccatcggatatatatgccaggacattgacccagagcagctgcaggacaagtcgaatgagattcttacagccatcattcagggcatgaggaaagaggaaccgtccaacaacgtcaagcttgctgctacgaatgcacttcttaactctctcgaattcaccaaggctaacttcgacaaagagagcgagagacatttcatcatgcaggtggtgtgtgaggcaactcagtgcccggatacccgagtccgggtggccgcactgcaaaacttggtcaaaataatgagtctatactaccagtacatggaaacttacatgggacctgctctgttcgccattaccattgaggcgatgaagtccgacatcgatgaggttgcgctgcagggaattgagttttggtcaaacgtctgcgatgaagaaatggacttagctatcgaagcatccgaggccgctgaacaggggcgtcctccagaacatacatccaaattctacgctaaaggcgcactgcagtatttggtgcccatcctgacccagaccctcacgaagcaagacgagaacgatgatgatgatgactggaatccatgtaaagccgctggagtgtgcctgatgcttttagctacttgttgcgaggacgacatcgtgcctcatgtcttgccttttatcaaagagcacattaaaaaccctgactggcggtatagggacgctgctgtcatggctttcgggtgtattctggaaggtccggagccgtctcaactgaagcctctggtcattcaagccatgcccacactcattgaattaatgaaagacccttcagtggtagtcagagatacagcagcctggaccgtcggacgaatatgtgaactgttgcctgaggccgcaattaacgacgtctacttggccccactcctgcagtgtctcatcgaaggcctttcagcggagccccgagttgccagtaacgtgtgctgggctttcagttccctggcagaggccgcatatgaggcagcggatgttgccgacgatcaagaagagccagctacttattgcttaagttcctccttcgaactgatcgtgcagaagctacttgagacgacagacagacccgatggacaccagaacaacctgaggagctccgcttacgagtccctcatggagatcgttaagaattcagcaaaggattgctacccagcggtgcagaagaccaccctcgtgattatggagagattgcagcaggtactgcagatggaatcacacatacaatccacgtctgacagaatccagtttaatgacttgcagtcactgctgtgtgccacactgcagaacgtgttgaggaaggtgcagcaccaggacgcccttcagatcagcgatgtggtgatggctagtctgctccgaatgtttcaaagcaccgctggctccggcggagtccaagaggatgcgctcatggcagtatctacactcgtcgaggtgctgggaggagagttcttgaagtacatggaagcgttcaagccgttcctgggcatcggcctgaagaactacgctgaataccaagtatgcctggcggcagtggggctcgttggagatctttgtagggcactccagtcgaatatcattcctttctgtgatgaggtgatgcagctgctgttagagaatctcggcaatgagaatgtccataggtccgtgaaacctcaaatcctgagtgtttttggcgacatcgccttagcgatcgggggagagttcaaaaaatacctggaagtcgtgctgaatacgctgcagcaagcatcccaggcacaggttgataagagcgactacgatatggtcgactacctgaatgaattgagggaatcctgcttggaagcatacacaggtattgtacagggactcaagggagaccaggagaacgtgcatccggacgtgatgctggttcagcccagagtggaattcattctatccttcatcgatcacatagccggagacgaagaccacaccgatggcgtggtggcctgtgccgcaggattgattggtgatctgtgtaccgccttcggtaaagatgtgttgaagctggtggaagccaggccaatgatccacgagctgctcaccgagggacggagatctaagactaacaaggcaaagacattggcaacctgggcgactaaagaactgaggaaattaaagaatcaagcctag

SEQ ID NO: 227574 - DNA, 2196 bp, synthetic construct
  misc_feature 1..2196: note = Description of Artificial Sequence: Synthetic coding sequence
  source 1..2196: mol_type = other DNA
atgaaggaatcgaccctggaagccattgggtacatatgccaggacatagatcccgaacagctccaggataaatccaacgagatcctgactgcgataattcaaggcatgaggaaagaggaaccttccaacaacgtaaagctggcagctacgaatgctctgctgaacagtcttgagttcactaaagctaacttcgataaagagtccgagcgacacttcatcatgcaggtcgtttgcgaagcaactcaatgccccgatacaagagtgagggtcgccgctttgcagaacctggtaaaaatcatgtcattgtattaccaatatatggaaacatatatgggacccgctttattcgctataactatcgaagccatgaagtccgacattgatgaggttgccctgcagggaatcgaattctggtcaaatgtgtgtgacgaagagatggatcttgccatagaggccagcgaggccgctgaacaaggccgaccacccgagcatacgtccaagttttacgcaaagggggcactgcagtacttggtgcccatcctgactcaaacactaactaagcaagacgaaaatgacgatgacgacgattggaacccgtgtaaggccgctggcgtgtgcttaatgctcctcgctacttgctgtgaggacgatatagtgccccatgttcttccgtttatcaaggagcatattaaaaaccccgattggagataccgagacgccgctgtgatggctttcgggtgtattctcgagggacctgaacccagccaactgaaaccgttagtcatccaagccatgcccaccctgatcgagcttatgaaggacccaagcgtggtagtccgggacactgctgcctggacggttggccgtatctgcgaactactgcccgaggcagcaatcaacgatgtctacctggccccactgctgcagtgccttattgagggactgtccgctgaacccagagtggccagtaacgtttgctgggcattctcatccctcgccgaagccgcttacgaggcagcggacgtagccgacgaccaggaagagccagctacctactgcttaagcagctccttcgaactcatcgtgcagaagcttcttgaaacaacagaccgccctgatggacaccagaacaatctccggtcaagcgcctatgaatctttgatggagatagtgaaaaacagcgccaaagattgctacccagcagtacaaaagaccacactcgttatcatggaaaggctgcagcaggtactgcaaatggaaagccatatacagagtacatcagatcggatccagttcaacgatttacaaagtctcctctgcgctacactccagaacgtactgaggaaggttcaacaccaggatgcgctccagatctctgatgtagtgatggcttcactcttgcgcatgttccagtcgacggccggaagcgggggagtgcaggaggacgccctaatggctgtgtccactctcgttgaagtgctgggcggtgagttcctgaagtacatggaagccttcaagccgttcctcggaataggcctaaaaaattacgctgagtaccaagtttgccttgccgctgtgggattggtgggagacctctgccgggcactgcagagcaatattatccctttttgtgacgaagtcatgcaactgctactcgaaaacctcggcaatgaaaatgttcatagaagtgtgaagccgcagattctctcagtttttggcgatatcgccttggcaattggcggagaatttaagaaatatctggaggtggtgctaaacactttgcagcaggcaagccaggctcaggtagacaagtcagactacgacatggttgactacctgaacgaattgcgcgagagctgtctggaggcatacacgggtatcgtgcagggattgaagggcgaccaggagaatgttcacccagacgtgatgttggtgcaaccgagggttgagttcattctgtcgttcatcgaccacatcgccggagacgaagaccatactgacggggtggtggcatgtgctgccggacttattggagacctgtgtactgccttcgggaaggacgtcctgaagttggtggaggccagacccatgattcatgaactgctgaccgagggcagaagatctaagacaaacaaagccaaaactctagcaacatgggccactaaggaactgcggaagttaaaaaatcaggcttag

SEQ ID NO: 227575 - DNA, 1983 bp, synthetic construct
  misc_feature 1..1983: note = Description of Artificial Sequence: Synthetic coding sequence
  source 1..1983: mol_type = other DNA
atgaaggagtccactcttgaggcaatcggttacatctgtcaagatatcgatcctgagcagctgcaggacaaatccaacgagattcttaccgcaattatccaaggcatgcggaaagaagaaccctccaacaatgtcaaactcgccgctactaatgccttactcaactctctggagtttacgaaggctaattttgataaggaaagcgagaggcactttataatgcaagtcgtatgtgaggcaactcagtgccctgacacacgcgtgagagtggcggctcttcagaacctagtgaagatcatgagtctgtactaccagtatatggaaacatatatgggccctgccctgttcgctgacgagaacgacgacgacgacgactggaacccttgcaaggctgccggagtttgcctgatgctccttgcaacatgttgcgaggatgatatcgtaccccacgtgctcccgttcatcaaggagcacataaagaatcctgactggaggtatcgagacgccgcagtgatggcctttggctgcatcttggaaggtccagagccaagccagctgaagcctttggtgatacaggccatgcccacgctcattgagctgatgaaagatccgtccgtggtcgtgagagatacagccgcttggacggtaggccgtatttgcgagctgttacctgaagctgctattaacgacgtgtacctggccccactgcttcagtgcttaattgagggcttatcagcagagccccgagtagcctcaaacgtgtgctgggctttctcgtcattggcggaggctgcttacgaagcagctgacgtcgctgacgatcaagaggaaccagccacctactgtctgagctctagctttgaactgatcgtgcaaaaactcctcgaaaccactgaccgccctgatgggcatcagaacaatttgaggtcatctgcgtacgaatctctcatggagatcgtgaagaactctgctaaggattgttaccccgctgttcaaaaaacaaccttagtgattatggaaaggttgcagcaggtacttcaaatggagagccatatccaatccacgtctgaccgaatacaatttaacgatttgcagtccctcctgtgtgccaccctgcagaatgtactccggaaggtgcagcatcaggatgccctgcagattagcgacgtggtgatggcttcccttctgaggatgtttcagtctactgctggatccggaggggtgcaggaggatgccttaatggctgtgagtaccctggtggaggtgctcggaggagaatttctgaagtacatggaagcctttaagccatttcttgggattgggctgaaaaactatgcagaatatcaggtgtgcttagctgctgtggggttggtcggcgatctgtgtcgggctctgcagtcaaacatcatacctttctgcgatgaggttatgcagttgctgttggaaaacttgggaaacgaaaatgtccataggtcagtaaaaccacagatcctgagcgtttttggggatatcgctctggccattggaggtgaattcaagaagtatctggaggtggtgctcaacacactgcaacaggcctcacaagcccaggtcgataaatccgactatgatatggtggattacctgaatgagctgagggagagctgtcttgaggcctacacaggcattgtgcagggactcaagggggatcaagaaaacgttcatccagatgtcatgttagtccagcctagagtcgagttcatcctctccttcattgatcacatagccggagatgaggaccacaccgatggagtcgtggcttgtgcagcaggactgatcggggacctgtgcaccgcattcgggaaagacgtccttaagctcgtggaagctcgacctatgattcacgagctgctgacggagggcaggagatctaagaccaacaaggcaaagacactggccacgtgggcgactaaagagctcagaaaactcaagaaccaggcgtag

SEQ ID NO: 227576 - DNA, 2196 bp, synthetic construct
  misc_feature 1..2196: note = Description of Artificial Sequence: Synthetic coding sequence
  source 1..2196: mol_type = other DNA
atgaaggagtctaccctagaagccatcgggtatatttgtcaggacatagatcctgagcaactacaagataagagtaatgagatcctcacggcgattatacagggcatgcgcaaggaagagcctagtaataatgtaaaactcgcggcaaccaatgccctgctgaactctttggagttcacgaaggccaactttgacaaggagagcgaacgccactttatcatgcaggtggtttgtgaggccactcagtgccctgatacacgcgtgcgcgtagctgccctgcagaacttagtcaagatcatgagcctgtactaccaatacatggagacttatatggggcctgccttgttcgccattacaatcgaagccatgaagagcgacatagatgaggtggcactgcagggcattgagttctggagtaatgtgtgtgatgaagagatggatctggcaattgaagctagcgaggctgctgagcagggccgacccccagagcatactagtaagttctacgcaaaaggcgctctgcagtacttggtgccaattcttacgcaaactctcacaaagcaggacgagaatgacgatgacgacgattggaatccatgcaaagccgctggggtgtgcctaatgctgctggccacctgctgcgaagatgacatcgtgccacacgtgctgcccttcataaaggaacacatcaaaaatccagactggaggtatcgggatgctgctgtaatggcattcggctgcattctggaagggcctgagccctcacaattgaaaccactggtcatccaggccatgccaaccctgatcgagttaatgaaagatcccagcgtagtggtgcgtgacactgctgcctggacggtcgggagaatttgtgagctcttgccagaggccgctattaatgacgtctatcttgcacctctactacagtgcttgatagaagggttgtccgccgagcctagagtggcaagtaacgtatgctgggcgtttagcagtctcgccgaggccgcttatgaggcggcagatgttgcagacgaccaggaggagccagctacatactgtctgtccagctccttcgagcttatagtccagaagcttcttgagaccaccgataggccagacggtcatcagaataacctgagaagctcagcgtacgagtccctgatggagatcgtgaagaatagcgcaaaagactgctacccggctgtgcagaagaccaccttggtgatcatggaaaggctccagcaagtgcttcaaatggaatctcatattcagtccacatctgatcgcattcagttcaacgaccttcaatctctgctctgtgccaccctccagaacgtgctaagaaaggtacagcaccaggatgctctgcagatttccgacgtggtgatggcctcgctattgagaatgttccagtccacggcgggaagcggcggagtgcaggaggatgcgctgatggctgtctctacattggtagaggtccttgggggtgagtttctgaaatacatggaagcatttaaaccctttcttggaattggccttaaaaattacgcggagtatcaggtctgcttggcggcagtgggcctggtgggagacctttgccgcgcactgcaatcaaacataatcccattctgcgatgaggttatgcaattattattagagaatctcggaaatgaaaacgttcatcgaagcgtgaaaccacaaatcctgagtgtgttcggcgacattgcgttagccattggtggagaatttaaaaaatatcttgaagtcgttctgaatactctgcagcaggcgtcacaggcccaggttgacaagagtgattatgacatggtggattacctgaacgagctgagggaatcctgccttgaggcgtataccgggatcgttcagggactaaaaggcgaccaggagaacgtgcaccccgacgtcatgctggttcagccccgtgtggaattcatcctgagcttcattgatcatatcgcaggcgatgaggatcacacggacggcgtagtagcgtgcgccgctggcctaattggagatttatgcacggccttcggcaaagacgtgctgaagctcgtcgaggctaggccaatgattcacgaattactgaccgaaggacgacggtctaagacgaacaaggccaagactctggccacttgggccacaaaggagctcagaaaactaaagaatcaggcctag

SEQ ID NO: 227577 - DNA, 1617 bp, synthetic construct
  misc_feature 1..1617: note = Description of Artificial Sequence: Synthetic coding sequence
  source 1..1617: mol_type = other DNA
atgacaacccctggaaaagagaacttcagattgaagtcttataagaacaaatcactaaatcctgatgaaatgcggcgtagaagggaagaagagggccttcagctgaggaaacagaagagagaagaacaactgttcaagcgaagaaatgtggcgaccgcagaggaagaaaccgaggaggaggttatgtccgatgggggtttccatgaggcccagattagtaacatggagatggcccctggcggagttatcacaagcgacatgattgagatgattttctctaagagtccggaacagcaactgagtgccacccagaagttcaggaaactcctttctaaggagcccaaccctccaatagatgaggtgatctctacacccggagttgtcgcacgatttgtagagttcctgaagcgcaaagagaactgcacgctccaatttgagagcgcatgggtgcttactaacattgccagcggaaactcattgcaaactaggattgttattcaggccggagcggtccctatctttatcgaactgctcagttcagaatttgaggacgtgcaagagcaggctgtctgggctctgggaaacatcgccggagattcaaccatgtgcagagactatgtgcttgattgcaacatcctgccacctctgttacaactcttcagcaagcagaatagacttactatgactcggaacgcagtgtgggctctctcgaacctgtgtcgcggaaagagccccccaccagaatttgcaaaagtgtcgccttgcctaaatgtgctctcctggctcctctttgtctcagacacggatgtgctggctgacgcctgttgggcactgtcatatctgtctgatggccctaacgacaaaatccaggccgtgatcgacgcaggggtttgcagacgcttagttgaactactcatgcataatgattacaaagtggtctctccagccctccgggctgtcggaaatatcgtcactggtgatgacattcagacccaagtgatacttaactgctcggctcttcagtccctgctgcacctcctgtcctcacctaaggagtccattaagaaagaggcatgttggacgattagtaatatcactgccggaaatcgagcccagattcagaccgtgatagacgccaacatctttcctgctctgatctccatcctgcagacagcggagtttcggacacgaaaggaagcggcttgggccataacaaatgcaacatccggagggagcgctgaacagatcaagtacttggtggaactgggatgtattaagccactgtgtgatctcttgaccgtgatggattccaagatagttcaagtcgccttgaacggcctggagaacatcctcagactgggggaacaggaggctaaaagaaacggcactggcattaatccatactgcgcgctcatcgaagaagcatacggacttgataagatcgagttccttcagagccatgaaaatcaagaaatctatcagaaggcgtttgatctcattgaacattatttcgggacagaggatgaagactcgagcatcgcaccgcaagttgacctgaaccagcaacagtacatcttccaacagtgtgaggctcccatggaaggcttccagctctag

SEQ ID NO: 227578 - DNA, 987 bp, synthetic construct
  misc_feature 1..987: note = Description of Artificial Sequence: Synthetic coding sequence
  source 1..987: mol_type = other DNA
atgacaacacctgggaaagagaattttaggctcaaatcttacaagaacaaatcccttaaccccgacgaaatgcggagacgacgagaggaggagggattgcaattgcgaaaacagaaacgtgaagaacaattgttcaagaggcgaaatgtggcaactgcagaagaggaaacagaggaagaggtgatgtctgacggcggatttcacgaggcacaaatttcgaatatggaaatggcccctggcggtgtaataacatcagacatgattgagatgattttctccaagtcacctgagcaacagctgtctgcgacacaaaagtttcggaaacttttaagcaaggaaccaaatcctcccatagacgaagtgatttctacacccggtgttgtggccagatttgtagaattcctgaagcgtaaggagaattgtacacttcagttcgaaagcgcctgggtactgacaaatatagcttccggtaacagtcttcaaacccggattgtgatccaagccggagcagtccctatctttatcgagttgctttccagtgaattcgaggatgtgcaggagcaggctgtgtgggcactgggcaacatcgccggagactcaaccatgtgccgtgactatgtcctcgactgtaacattcttccaccactccttcagctgttttccaagcagaacaggctcacaatgacgcgcaacgctgtttgggctttgagcaacctctgtcggggaaaaagcccacccccagaattcgctaaggtgagtccctgccttaacgtgctctcctggctcttgttcgtatccgataccgacgtgctcgcagacgcatgttgggcgctgtcttacctctccgatggccctaacgataaaatccaggcagtgattgatgctggagtttgtagaaggctggttgagctgctgatgcacaacgattacaaggtcgtctcccccgctctccgggctgtgggcaatatagttacgggggatgattag

SEQ ID NO: 227579 - DNA, 648 bp, synthetic construct
  misc_feature 1..648: note = Description of Artificial Sequence: Synthetic coding sequence
  source 1..648: mol_type = other DNA
atgactacacccggtaaagagaattttcgtctgaagagttacaagaacaaaagtctgaatcctgacgagatgcggagacgtcgggaggaggagggactgcaattgcgcaagcagaagcgcgaggaacagttattcaaaagacgcaatgtcgccacggccgaggaagagacagaagaagaggtcatgtctgatgggggtttccatgaggcccaaatcagtaatatggagatggctcccggaggagtgataacctctgatatgattgagatgatattttctaagagccctgaacagcagctgagtgctacacagaagtttcgcaagttgttgtccaaggagcctaatccaccgatcgacgaggtgatcagcaccccaggtgtggtagcaaggtttgtcgaatttctgaaaaggaaggagaattgcactctgcagtttgaaagcgcctgggtactcaccaacatcgcttctgggaacagtcttcaaacacgcatcgtgattcaggccggagcagtgccaatctttattgagctcctgtcatccgaatttgaggacgtgcaggagcaggcagtctgggccctgggtaatattgcaggagacagtacaatgtgcagggactatgttctggattgcaacatacttcctccctag

SEQ ID NO: 227580 - DNA, 525 bp, synthetic construct
  misc_feature 1..525: note = Description of Artificial Sequence: Synthetic coding sequence
  source 1..525: mol_type = other DNA
atgactacacccggtaaagaaaattttcggctgaagtcctataagaataagagtctcaaccccgacgaaatgcggcgtcgaagggaggaggaggggctgcagctgcgtaaacagaaacgcgaggaacaactattcaagaggcgcaatgtcgccactgcagaggaagagaccgaagaagaggtaatgagcgatggaggattccacgaagcacagataagcaatatggaaatggctcctggtggcgtgataacttcagatatgattgagatgatttttagcaagtcccctgaacaacagctgagcgctacacaaaagttccggaagctcctgtccaaagagccaaatccgcctattgacgaggtcatctcaacgccaggagtcgtagccaggttcgtggagtttctcaaaaggaaagagaactgtactttacagttcgagtcagcatgggtgctgactaacatcgcatccgggaactcccttcaaacccgcatagtgattcaggctggggctgttccaatcttctag

SEQ ID NO: 227581 - DNA, 1566 bp, synthetic construct
  misc_feature 1..1566: note = Description of Artificial Sequence: Synthetic coding sequence
  source 1..1566: mol_type = other DNA
atggccgaaaatcctagcctcgaaaaccacagaatcaagagctttaagaacaaaggaagagatgtggagacaatgagacgtcaccgtaatgaggttacagtcgagctgaggaaaaacaaacgggatgaacatctcttgaagaaaaggaatgtcccacaagaggaatccctcgaagacagtgatgtagacgcagacttcaaggcccagaacgtgacgttagaggccattttgcaaaatgctactagcgataaccccgttgtccagttgtcggccgtgcaggcggctcggaaactgctgtcatcagaccgcaaccccccaattgacgatttgattaagtccggaattttgccgattctggtaaaatgtctagagcgagatgataatccctccctacagtttgaagctgcctgggcactgaccaacatcgcgagcggtactagcgcgcagacacaggcggtggtgcagagtaacgctgttcctcttttcctgcgacttctacgtagcccacaccagaacgtttgcgaacaggcagtatgggcgttgggcaacatcattggagacggtcctcagtgccgagactacgtcattagcctcggcgtggtaaagcctctgttatcatttatatcgccgtccattcccatcacctttctacggaacgttacatgggtgatcgttaacctctgtcggaacaaggacccacctccgccaatggaaacagtacaggaaatcctaccagcactgtgcgtgcttatctaccatacggatattaacatcttagtcgacactgtctgggcccttagctatctgactgacggaggaaacgagcagattcaaatggttattgactccggcgtcgtgccttttctggtacccctcctgtctcaccaagaagtgaaggtgcagacggcggctcttcgcgcagtcgggaacatcgtcaccgggactgatgagcagacgcaggtggtcctcaactgcgacgtgcttagccattttcccaacctcctgtctcacccaaaggaaaaaattaacaaggaggcagtgtggtttttgagcaacatcacagccggtaatcagcagcaggtgcaagccgtgatcgatgccggactaattccgatgattatccaccagctggcaaagggcgatttcggcactcagaaggaagccgcatgggccatctctaaccttactatctccggacgcaaagaccaggtcgaatatctggtgcaacagaacgtcatcccacctttttgtaatcttctctccgtcaaggattcccaggtcgtgcaggtcgtgctggatggcctaaaaaatatcctgatcatggcaggcgacgaagcctccacgattgccgagattatagaggaatgtggcggactcgagaaaatcgaagtcctgcaacagcacgaaaatgaggatatttataaacttgcctttgaaatcatcgatcagtatttctccggcgacgacatcgatgaggatccttgtttgatcccagaggcgacacaaggaggaacatataactttgatcctacggccaacctgcaaactaaagagtttaacttttag

SEQ ID NO: 227582 - DNA, 1566 bp, synthetic construct
  misc_feature 1..1566: note = Description of Artificial Sequence: Synthetic coding sequence
  source 1..1566: mol_type = other DNA
atggccgacaacgagaaactagataatcagcgcctcaaaaacttcaagaacaaagggagagacctggagaccatgcgcaggcagcggaacgaagtggtggtggagctgcgaaagaataagagggatgaacacctgctgaagcgacgcaacgttccacatgaagatatctgcgaagacagtgacattgatggcgattatcgtgtgcagaacacatcattggaggctatcgtgcagaatgcatcctcggacaaccaaggaatacagctcagtgccgtgcaggccgcaaggaagctcctcagcagtgacagaaaccctcctatcgacgaccttataaaatctggaattttgcccattttggtccattgcttagagagggatgacaatcccagtctacagttcgaggccgcttgggccctcacgaatatcgctagcggcacttcggaacagacccaggctgtagttcagagcaacgccgtgcctctcttcctccggttactgcacagcccccatcagaacgtctgtgagcaggccgtttgggcactcggcaacattataggcgacggcccacaatgcagggactacgttatttcactaggtgtcgtgaaacccctgctttcttttatctcgccctccatcccaatcacattcctgcgcaatgtgacctgggtgatggtgaacctgtgtaggcacaaggacccccctccccctatggagactattcaggagatcctgccggcattatgcgtgctgatacaccacacagacgtcaatatattggtggacaccgtgtgggcgttgagttacttaaccgacgctggaaatgagcagatccagatggtcatagattcagggatcgtaccccatcttgtgccacttctgtcccaccaggaagtcaaagtccaaacggccgctctacgtgctgtaggcaacatagtaactggaacagatgagcagactcaggtagtgctgaactgcgacgccctgtcccatttcccagcacttctcacacacccaaaggagaagatcaataaagaggccgtgtggtttctctcgaatataacagcaggtaatcagcagcaagttcaggccgttatcgatgccaatctcgttcccatgataatacatctactggataagggagactttgggacacagaaagaggccgcttgggcaatttcgaaccttactatctctgggagaaaggatcaggtggcatatttgatccagcagaatgtgattcctcctttttgtaatctgctgaccgtgaaagacgcacaggtggtgcaggtggtgttggacggcctgagcaatatactgaaaatggcagaagatgaggccgagaccatcgggaatctgatagaagagtgcggcggtctggagaaaatagaacagttgcagaatcacgaaaatgaggacatttacaaactggcctatgagattatcgaccagttcttcagcagtgacgacatagacgaggacccgagcctggtgcccgaagctatccagggcggaacctttggctttaactctagtgctaacgtgcctaccgaggggtttcaattttag

SEQ ID NO: 227583 - DNA, 1551 bp, synthetic construct
  misc_feature 1..1551: note = Description of Artificial Sequence: Synthetic coding sequence
  source 1..1551: mol_type = other DNA
atgccaactctcgatgcacctgaggaacggcgacggaagtttaaatatcgtggtaaggacgttagcttacgtcgccagcagcgcatggccgtgagccttgagctcagaaaggctaaaaaagacgagcagactctgaagcggaggaacatcacttctttttgcccagacacaccttcggagaaaacagccaaaggcgtggccgtgtcactgaccttaggcgaaattattaagggcgtgaatagctccgatcctgtgctttgtttccaggctactcaaaccgcaagaaaaatgcttagccaggaaaagaacccccctctgaaattggtgatcgaagccggtcttatccccaggatggttgaattcctgaagagctcactgtatccttgcctgcagtttgaagccgcatgggctctcacaaacatcgccagtggcaccagcgaacagactagagcagtggtagagggtggggctatacagccactgatagaattactttcctcttctaatgtggccgtttgtgaacaggccgtgtgggccctgggcaatatagccggagacggcccagagttccgtgataatgtgattacatccaacgccatcccccacctcttggcacttatctccccaaccctgccaataacctttctacggaacatcacatggacgctctcaaacctgtgcaggaataaaaatccatatccctgtgacacagccgtgaagcagatcctgccggcacttctgcacttactgcagcatcaggatagtgaggttttatctgatgcttgttgggctctgagctacctgaccgacggctcgaataaacggataggtcaggtggtgaacaccggggtgttgccccgattggtggtgctgatgacaagctctgaactgaacgtcctgacaccgagcctccgcaccgttggaaatatcgtgaccggcaccgatgagcagactcaaatggctatagacgctggtatgctgaatgttttaccccaactgctacagcacaacaagcccagtattcagaaagaagccgcttgggcgctcagtaatgtggctgcgggtccctgtcaccatatccaacagttgttggcttatgacgtgcttccacccttagtggcccttctaaagaatggcgagtttaaggtccagaaggaggctgtctggatggtggctaacttcgccactggcgcaaccatggatcagttgatccaattagtgcatagcggagtgctggaacccctagttaatctgctcactgcccctgatgttaagatagttctgatcatcttagacgtgattagttgtattctgcaggcggcagaaaaacgttccgaaaaggaaaatctgtgtttgctgattgaggaactgggaggtatcgacaggattgaagcactccagttgcacgaaaataggcagattggccagagtgcattaaacattatcgagaaacacttcggagaagaggaagacgaaagccagacactgttatcacaggtgatcgaccaggactatgaatttatcgattacgagtgtctggctaagaaatag

SEQ ID NO: 227584 - DNA, 3318 bp, synthetic construct
  misc_feature 1..3318: note = Description of Artificial Sequence: Synthetic coding sequence
  source 1..3318: mol_type = other DNA
atggccgctatggccccagccctgactgatgccgctgcagaagctcaccacatccgctttaaactcgcacctccttccagtacactctctccgggttctgcagagaataacggcaacgcaaatattctcattgccgctaatggtactaaaaggaaagcgattgccgctgaagacccttccttggattttaggaataatcccactaaagaagaccttgggaagttacagccgctggtggcgtcttacttgtgctctgatgtgacctctgtcccctctaaagagagcctcaagctgcagggcgtattcagcaagcagactgttctgaagagtcatcctctgttaagccagtcttatgaactcagagctgaacttctcggaagacagcctgtgctagagtttagtctcgaaaatctgaggactatgaatacgtccgggcaaaccgcgctcccgcaagccccagtgaacgggctggccaagaagttgacaaaatcttcaacccattctgaccacgataatagcaccagcctgaatgggggaaagagggctctcacctcctctgccctgcatggtggagagatgggcggtagtgaatcaggtgatctcaagggcggtatgacaaactgtaccctgcctcaccgaagtcttgacgttgagcatacgacactctattctaataacagtacagcgaataaatcaagtgttaactcaatggagcagcccgctctccagggatcatctagactttctccaggtacagactcctcgtccaaccttgggggagtaaaactcgagggtaaaaaatcccccctgagctcaatcctttttagtgccctggactccgacacccgaataaccgcactcctgcgtcggcaggctgatatagagtccagggctcgtagacttcagaagcgcctgcaggtggtgcaagccaaacaggtcgaacgccacattcagcaccagctaggcggatttctggaaaagacactctctaaacttcctaatctggagtccctccggccacgtagtcagctcatgctgacaaggaaggctgaagcggcactgaggaaagctgcctccgagacaactaccagcgaaggactaagcaatttcctcaaatctaattcaatcagtgaggagctcgaacgcttcactgcatccgggattgccaacctgaggtgctccgaacaagcatttgactcagacgttacagatagttcaagtggaggtgaaagtgatattgaggaagaagaactaacccgagccgatccagaacagagacacgtccctctccgccgacgaagtgagtggaagtgggccgctgaccgagctgcgatcgtgtctagatggaactggcttcaggctcacgtgagtgatctggaataccgtattcgccagcagaccgatatttacaagcaaatcagagccaacaaaggcctcattgtactgggggaagtccctcctccagagcacaccactgacctgttcctgcccttgtcctctgaagtcaagaccgatcacggcacggacaagctgattgaaagcgtcagccaacccttggaaaaccacggagctcgaattataggacacatcagcgaaagcctgagcaccaagtcctgtggtgccctgcgacccgttaacggggtgattaatacactgcagcccgttctcgcggaccatatcccaggcgatagcagcgatgccgaggaacagctgcacaagaagcaaagactgaatttggtctcaagttcatcagacggcacttgcgtcgctgctcgcacaaggccagtcttgagttgcaagaagaggcggctggttcgccctaacagcattgtgccactctcaaaaaaagtgcaccggaatagcacgattagaccaggctgcgatgtgaatcccagttgcgctctttgtgggagcgggtctatcaacaccatgcctcctgagatccactatgaggccccactgctagagcgcctgagccagctggactcctgtgtgcaccctgtgctggcattccccgatgatgtgccaacaagtctccactttcaaagtatgcttaagagccagtggcagaacaagcccttcgataagataaaaccccctaaaaagctttcgctgaaacaccgtgcgccaatgcctggttctttacccgattctgctcggaaggatcgacacaaattggtttcatccttcttgacgaccgccaagttgagccaccaccaaactagaccggatagaacacacaggcagcatctcgacgacgtgggagcagttccaatggtggagcgagttacagcccctaaagcagaaaggctgcttaaccctccacctccggtgcacgaccctaaccacagtaagatgcgactgagagatcactcaagtgaacggtcagaggtgctcaagcaccacacagatatgtcttctagctcatatcttgccgctactcaccaccctccacactctccccttgttaggcagcttagcacatcaagtgattccccggctcccgcatcgtcctcatcacaggttacagcgtctacctcgcagcagccggtgcgcagacggaggggcgagtccagtttcgacataaacaatattgtgattcccatgtctgtggcagcaacaacccgcgtggagaaattacaatataaagaaatactcacgccgtcgtggcgtgaggtggatctccagtccctcaaggggtcccctgatgaagagaacgaggaaatcgaagacctgagtgacgccgcttttgccgcacttcatgctaagtgtgaggagatggagcgtgccagatggctgtggaccaccagcgtacctccccagagaaggggctctaggtcttatcgatcatcagacgggaggacaactccccaattaggctctgccaaccccagtacccctcagccagccagccctgatgtgtccagctctcactccttgtcagaatacagtcatgggcagtcacctagaagcccgatttcccccgaactgcattctgctcctctgactcctgtcgcacgcgacactcctcgccacctggccagtgaggatactcggtgcagcacacccgaattgggcctggatgagcaaagtgttcagccatgggagaggcgaacttttccactggcccatagccctcaagctgaatgcgaagatcaactggacgcccaggaacgcgctgcccgttgtacacgcagaaccagcgggtctaaaacaggtagagagactgaagccgcaccgacgtctcccccaatcgttcccctgaaaagccgccacttagtcgcagcggctacagcacagagaccaacacacaggtag

SEQ ID NO: 227585 - DNA, 1200 bp, synthetic construct
  misc_feature 1..1200: note = Description of Artificial Sequence: Synthetic coding sequence
  source 1..1200: mol_type = other DNA
atgccgccagagatccactacgaagcgccactgctggaacgcctgtcccaactagattcatgtgtacacccagtgctggcctttccggacgatgtaccaacgtcccttcacttccaatccatgctgaaaagccagtggcagaacaagccattcgataagatcaaaccgccaaaaaaactgtcccttaagcaccgtgcccctatgcccggatctctgcctgacagcgcgcgtaaagaccgccacaaactggtgagctcctttctgactactgccatgctaaagcaccatacagacatgtcaagctcctcgtacctggctgctacccaccacccgcctcatagccctcttgtgcggcagctgtccacttccagtgatagcccggctccagcctcctccagcagccaggtgaccgcaagcacgtcccaacagcccgtgagaagacgcagaggagaaagctcatttgatatcaacaatatcgtgattcccatgtccgtggctgcaactaccagagtggagaagcttcagtataaagagatactgaccccgtcatggcgggaagtcgacctacagtcattgaaaggctccccagatgaggagaatgaggagattgaagatctttctgacgccgctttcgctgccctgcatgccaaatgcgaagaaatggagcgcgctcgttggttatggaccaccagcgtaccgcctcagagacggggtagccggagctacaggagctccgacggcagaactactccacagctgggcagcgccaatccaagcacgccacaacctgcctccccggatgtgagcagctcacactctctgtctgagtactcacatggtcaaagtcccagatctcccatctcaccagaactacacagtgcaccacttactccagtcgccagagacacacccagacatctggcctccgaggacactcgttgtagtacacccgagctgggtctggacgaacagtccgtacagccatgggagcggcgaacatttcccctggcccattctccacaagctgagtgcgaggatcagctggatgcacaggaacgggcagccagatgcacaaggcggacatctgggagtaagactggtagagagactgaggcagctcccacttcaccacctattgtccccctcaaaagccggcatttggtagccgcagccaccgcacagcgaccaacacacagatag

SEQ ID NO: 227586 - DNA, 3318 bp, synthetic construct
  misc_feature 1..3318: note = Description of Artificial Sequence: Synthetic coding sequence
  source 1..3318: mol_type = other DNA
atggctgctatggcgcctgctctgactgatgctgccgcagaggctcaccacatacggtttaagttggcccctccctctagtactttgtcccccggatccgcagaaaataacggtaatgccaacatcctaattgccgctaacggtacgaagcgaaaggcaattgcagctgaggatccctcgttggatttccgcaacaacccaactaaggaggacctcggtaaactccagcccctggtggcctcgtatttgtgctcagacgtcacaagtgtacccagcaaagagtctttgaagcttcagggggtgttcagcaagcagactgtcctcaagtcccaccccctcctctcccagtcttacgagctacgtgcagagttactcggcagacagccagtgttagaatttagcctcgagaatcttagaacaatgaacaccagcgggcagacggcactgccccaagcccctgtgaacgggctcgcgaagaaacttacgaaatccagtacccattccgaccacgataactctacctccctcaatggtggcaaaagagcgttaacatcttccgccctccacggtggcgagatgggcggtagcgagagcggcgatttgaagggagggatgacaaactgtaccctcccacaccgtagtctggatgtggagcacactacattgtattcgaataacagtacagccaacaaatccagcgtgaatagcatggagcagcctgctttgcaaggctcatcacggttgtctcccggaactgactcgtcctctaatctgggaggcgtgaaactggagggtaaaaagtcccccctgtcttcgatcctgttctccgccctggatagtgatactcgcatcacggctttactgagaagacaggcagacattgagtccagggcacggagactccagaaaaggctacaggttgtgcaggcgaagcaggtagagcgccatatccagcaccagttaggaggcttcctggagaaaacgctgtcaaagctgccaaatctagagtctctgcgccctaggtcccagctaatgctcacaagaaaggcagaggcggcacttagaaaggctgcttccgagaccacaacttctgaggggctgtcaaacttcctgaaatccaactcaatctcagaggagctggaacgctttacagcttccggaatagccaacctgcggtgttcagagcaggctttcgactccgacgtgacagacagtagcagcgggggagagtccgatattgaggaagaggagctgaccagggccgatccggaacagcgacacgtgccgcttagaagaaggtctgagtggaaatgggccgcagacagagctgccatcgtgtcaagatggaattggctgcaggctcatgtctccgatctggagtacagaatcagacagcagactgatatctacaagcaaatcagagcaaataaaggcctgatagttctcggggaagtgccacctccggagcatacaaccgatctattccttccgctgtcttcagaagtaaagactgatcacggaaccgacaaattgatcgagagcgtgagccagcctctcgaaaaccacggtgcgaggattatcgggcacatttccgagagccttagcaccaaatcttgcggagcccttagaccagtaaatggtgtaattaatactctacagccggttttggcagatcacattcccggtgacagctccgacgctgaagaacagttgcataagaagcagcggttgaatctggttagttcgtcatctgacgggacctgcgtagccgctcggacaagacctgttttgtcatgcaagaaacgccgtctagtcaggcctaactctattgtgccgttatccaagaaggtgcatcgaaactcaacaataagacccggatgtgacgttaacccgagctgcgcactgtgcggttctggctcgataaatactatgcctccagaaatacattacgaggccccactgctcgaacgcctttcccagctggatagctgcgtgcatcccgtgctggcttttcctgacgacgtccctaccagtctacatttccagagcatgcttaagagtcagtggcagaataagccgtttgataaaattaagcctccaaaaaagctgtcattgaagcacagggcccctatgcctggaagcctgcctgattcagcccgaaaggacagacacaagctggtgagcagtttcctgaccacggcaaaactgagccatcatcagacaaggcccgaccggactcacaggcagcacttagatgacgtcggcgctgttccgatggtcgagagggttacagcccctaaggcagaaagactgctcaatcccccacccccagtccatgaccccaaccattccaagatgcggctgagagatcactcaagcgaaaggtctgaggtcctgaagcaccatacagacatgtcatctagctcctacctcgctgccacacatcatccccctcacagtccactggtgcgccagctctcgaccagtagcgactctccagccccagcatcatctagcagccaggtgacggcaagcactagtcagcagccagttcgccgacgaagaggcgagagcagcttcgacatcaacaacattgtcatccctatgagcgttgccgcaaccacccgcgtcgaaaagctgcaatacaaagaaattctgacacctagctggcgggaggttgatttacaatcattgaagggatcccccgacgaggaaaacgaggaaattgaagacctcagtgacgcggcttttgctgccttacatgcgaagtgcgaggagatggaacgggcaaggtggctgtggacaacttctgttccccctcagaggagaggaagcagaagctacagatcttccgacggtcgtactaccccccagctggggagcgccaacccatcaaccccacaaccagcttccccggacgtcagctcctctcattccttgtccgaatattcccatggacagtctccgcgtagcccgatcagccctgaattacactcagcacccctgactcctgtggcgagggatactccacgtcatcttgcctcagaagacacgcgctgcagtacgccagaattggggcttgatgaacagagcgtgcaaccttgggagcgcaggaccttccccctcgcccatagccctcaggcagaatgtgaagaccaactggacgcgcaggagcgggctgcacgctgtacgaggcggacctcgggtagcaagaccggcagggaaacagaggctgcacccacctccccccctatcgtgccacttaagtcaagacacctcgtcgccgcagcaaccgctcagcgcccaacccatagatag

SEQ ID NO: 227587 - DNA, 3318 bp, synthetic construct
  misc_feature 1..3318: note = Description of Artificial Sequence: Synthetic coding sequence
  source 1..3318: mol_type = other DNA
atggccgcaatggccccagcattaactgatgctgcagccgaggcgcaccacatcagattcaaactggccccaccctcttcaactctctcccccggtagtgccgaaaataatggcaacgccaacattctcattgccgcaaatggcactaaaaggaaggcgatcgcagccgaagacccttcattagacttccgtaataatcctaccaaggaggaccttggcaaacttcagccattggtggccagttacctgtgcagtgatgtgacgtcagttccctccaaagagtcactcaagttgcagggtgtcttctctaagcaaaccgtgcttaagagccaccctttgttatcacaaagctacgagctgcgcgctgaacttctgggcagacaacctgtgttagagtttagcctggagaatctgcggactatgaatacctcgggccagaccgcccttccccaggctccggtgaacggcctggccaagaaactgactaaatctagtactcacagtgaccatgacaatagcacaagtctaaatgggggaaaaagggccctgacatcatccgcgctgcatggtggggagatggggggaagcgagtccggagaccttaaaggagggatgactaattgcacgctgcctcaccgaagtctggacgtcgaacacacaactctgtactccaacaactctactgcaaacaagagttccgtgaatagtatggagcagcccgctctgcaggggagctcaaggctgagtccagggaccgatagtagctcaaacctgggtggcgtgaagttagagggcaaaaaaagccccctctcctctatcctcttctctgcgctcgacagcgacacacgaatcacagctttacttaggcgtcaggcggacatagaatccagggcccgacgtcttcaaaaacggcttcaggtagttcaggcaaagcaggttgaaagacacatacagcaccagctcggtggatttttggagaagaccctctccaagcttcctaatctggagagcctacgcccaaggagtcagttgatgctgacccggaaagcagaggccgcactgcgcaaggctgcaagcgagactactactagcgagggcttgtcaaactttttgaagagtaattctatctccgaagagctggaacgttttacagcctccggcatcgcaaacctcagatgttctgaacaagcatttgatagtgatgtgactgatagctcaagcgggggagagagcgacattgaagaggaagaacttaccagggcggaccccgagcagaggcatgtacctctgcgccgacgtagcgagtggaagtgggccgcagaccgggctgcaattgtatcccggtggaactggctgcaagcccacgtatccgatctcgagtatcgtatccggcagcaaaccgacatttacaaacagatccgggcaaacaaaggtttgattgtgttgggcgaggtgcccccacctgaacatacaaccgacctctttttacccctgagtagtgaggtaaagacagatcacggtaccgacaaactgatcgagagcgtctctcagcccctcgaaaatcacggcgcacggattattgggcacatttctgagtctctgagcacgaaaagttgtggggctctgcgtcccgtaaatggcgtgatcaataccctccagcctgtcctcgcggatcatatccctggagattcatcagatgccgaggaacagctccacaagaagcagcggctcaatctcgtgagctcatcgagcgacggaacctgtgtggcagcccgaacgcggcctgtgctcagttgcaagaaaagaagactagtgcgacccaactccattgtacccctgagcaaaaaagtccacaggaatagcaccatcagacctgggtgcgatgttaacccttcatgcgccctatgcggatctggttccatcaacaccatgccacccgagatacattacgaggccccactccttgagagactgtcacaacttgactcttgcgtacatccggtacttgcctttcccgatgacgtgcctacaagccttcactttcagagcatgctcaagtctcaatggcagaataagccattcgataagataaaaccccctaaaaaactctccctgaaacaccgtgctccaatgcccggatccctgcctgattccgcgagaaaggaccgccacaagctggtgtcatcctttctcaccactgccaaactgagtcaccaccagacaagaccagataggacccataggcaacatctcgacgacgttggggctgtccccatggttgagcgggtgaccgcccctaaagcagagcggttgttaaacccacctccacccgtgcacgatcccaaccactctaagatgcgtctgagggatcactcctctgaaagatccgaggtgcttaaacatcacactgacatgagctctagcagctatctcgccgcaacgcaccaccctcctcattcgcccctggttcggcaattgagcaccagcagcgattctccggcaccagcctcctcctcctcacaggtaacggcctctaccagtcagcagccagtccggcgtcggcgaggtgagagcagcttcgatattaataatatagtcattccaatgtctgtagccgctacaacccgggtcgagaagctgcaatataaggagatcctcacacctagttggagagaagttgacctccaaagtctgaaaggatctcccgacgaagagaacgaggagattgaagatctcagtgacgcagcttttgccgctctgcatgctaagtgcgaagagatggagagggcccgttggctctggactacatctgttccgcctcagaggcggggatctcgttcctacaggtcgtctgatgggaggactactccccagctcggatccgccaacccaagcacgccacagcccgcttcacctgatgtctcaagctcccacagcctgtcggagtatagtcatggacagagcccccgatccccgatatcccctgaattgcacagtgctcccctcactccagttgctcgggatacccccagacatttggcctcagaagacacccgctgctcaacacctgaactgggtcttgacgaacaatccgtgcagccatgggaaagacgcactttccccttagctcattcccctcaggctgagtgtgaagatcaattagacgcacaggagagggcagcaagatgtacccggagaacttccggatcaaaaacagggcgtgaaaccgaagcagctcctacaagtccaccaatcgtacccctgaagtcacggcacctggtcgcagccgcaacagcgcaacgcccaacacatcgatag

SEQ ID NO: 227588 - DNA, 3318 bp, synthetic construct
  misc_feature 1..3318: note = Description of Artificial Sequence: Synthetic coding sequence
  source 1..3318: mol_type = other DNA
atggccgctatggcacccgctttgacagacgctgcggctgaagcacaccatatccggttcaagctagcccctcctagctcaaccctttcaccaggaagcgccgagaacaacggcaatgctaatattctgattgcagccaatggaactaagagaaaagcaattgccgcagaggatcccagcctggacttcagaaataacccaactaaagaggacctgggcaaactacaacctcttgtcgcttcatacttgtgctccgacgtcacaagtgtcccgtccaaagaatccctgaagctgcaaggcgttttcagtaagcaaaccgttttgaaatcccacccattgctcagtcagagttatgaacttcgagctgagctcctaggtcggcagccagtcctggaattcagtctcgagaatcttaggaccatgaatacctcagggcagactgcactcccccaggcaccagtcaatggactggcaaaaaagttgaccaaatcctccactcacagcgatcacgataattcgacaagtctgaacggcggaaagcgcgctctgacaagcagcgccctgcacggcggtgagatgggaggatcagaaagcggcgatctcaaggggggaatgaccaactgtacccttcctcatcgaagccttgacgtggagcataccaccctgtatagtaacaactcaacagccaataagagctctgtcaactctatggagcaacccgctctgcagggcagcagtaggctgtctccgggaaccgatagtagttcaaatttagggggagttaaattggaggggaagaaatcgccgctgtctagcatcctattctctgctttagacagcgatactagaatcactgcgcttctcaggaggcaggctgatatcgaatcccgcgctcgtagactccaaaagcggctgcaagtcgttcaggctaagcaagttgagcggcacatccagcaccaattaggtggattcctagagaaaactttgtccaaacttcccaacctggagtccctccgccctcgctcccagctcatgctgacccgcaaggcagaggccgcactcagaaaggctgcgagcgagaccactacttccgagggactgtctaactttctcaaatccaactccattagcgaggaactggagagattcacggcctcaggaatcgccaatctgagatgtagcgagcaagcttttgactcggatgtgactgactctagctcgggcggtgagtcagacattgaagaagaggaactgactcgcgctgatcccgaacagaggcacgtgccactccgtaggcggtcagagtggaagtgggccgcagaccgggctgccattgtgtctcgatggaactggctccaggcccatgtgagtgatcttgaataccgcattcgtcaacagaccgatatctacaaacagatcagggctaataaaggcctgatcgtcctcggggaggtaccacctccagaacacactaccgacctatttcttcccctctcaagcgaagtgaagaccgaccatggaacagacaaactgattgaaagtgtgagccagccactggagaaccatggagcacgcattataggccacatttcagagtcacttagtactaagagttgcggcgctttgcgacccgttaacggggttataaacaccttacagccggttctggcggatcacattcctggggattcttctgacgccgaggaacagctgcataagaaacaacggctgaatctcgtatcatcttcaagtgacggaacatgcgtggccgctcggacccgccctgttctgtcatgcaagaagagacgcctggtgcgcccaaacagcatcgtcccactgtcgaaaaaggtacacagaaacagcactatccgcccaggctgtgacgtgaacccctcatgcgctctctgtgggtctgggagcataaacacgatgcctcctgaaatccactatgaagcaccgttgctggaaagattgagccagctagattcatgcgtgcatcccgtcttagcgtttcctgacgacgttcctacttccctgcactttcaatcaatgcttaaaagccaatggcaaaacaaaccattcgataagatcaagcctcccaaaaaactgtcgctgaaacatagggcccctatgcccggatccctccctgattcagcaaggaaggaccggcacaagcttgtgagctcttttctcaccacagccaagctgtcccatcatcagaccagacccgaccgcacacaccgtcaacaccttgatgacgttggagccgtgccaatggtagagagagtgaccgcaccgaaagctgaacgtctgttaaacccccctcctccagtacacgaccctaaccactctaagatgaggctccgcgatcatagttcagaaaggtctgaggtcctcaagcaccatacagatatgtccagttcatcctaccttgcggctactcaccacccaccacattcccctctcgtaaggcagcttagcacctccagtgactcgcctgctcccgcttcctcaagctctcaggtgacagccagtactagtcagcaacctgtaaggaggaggaggggggagtcatcattcgatataaataacatcgtcatacctatgagtgtagctgccacaacccgggtcgagaaactgcagtacaaagaaatcttaacaccatcctggagagaagtggatctccagtcattaaagggttcacccgatgaggagaatgaagagatcgaggacctcagtgatgctgcattcgcagccctacacgccaagtgcgaggaaatggaacgtgctaggtggctttggaccacatccgtcccacctcagcgcagggggtcaagatcctaccgctcatccgacggcaggacaacccctcagttagggagcgccaaccctagtactccgcagccggcaagtccggacgtgtcctcgtcgcattctctgagtgagtatagccacggccagtcaccacggtcaccaatttccccggagttacactcagctcctttaacaccagtcgcgcgagatacaccgagacatctagcatccgaggacacccgatgttccaccccagaactaggtcttgatgagcaaagtgtccagccgtgggagaggaggacctttccactcgcacactcccctcaagccgagtgcgaggatcaattagacgcacaggaaagggccgctcgctgcacacggaggacctccgggtcgaagacagggcgagagacggaggctgccccaacgagcccccctatagtcccccttaaaagccgccacttggttgccgctgcgactgcacagcgccctacccataggtag

SEQ ID NO: 227589 - DNA, 936 bp, synthetic construct
  misc_feature 1..936: note = Description of Artificial Sequence: Synthetic coding sequence
  source 1..936: mol_type = other DNA
atgtccctccttatgattagtgaaaacgtgaagctagccagagaatacgctctgctcggtaactacgactcagccatggtgtactatcagggcgtgctggatcagatgaacaagtacctctatagcgtgaaggacacatatctccagcagaaatggcagcaggtgtggcaggagattaacgttgaagctaagcacgtgaaagatatcatgaaaactctggaatccttcaaactagacagcactccactcaaggcagcccagcatgacctgcccgcaagcgaaggagaggtctggagtatgccggtccctgttgagcggcgtccaagcccaggacctcggaaacggcagagttcccaatatagcgatccaaagtcccacggcaaccgaccaagtactactgttcgtgtacaccgatcttccgctcaaaatgtgcacaacgaccgcggaaaggcagtgaggtgtagagagaagaaggagcagaacaaaggtagagaggagaagggcgtcctgatggtcggccctccgggtactggtaaaacactcctggctaaagcggtggctactgagtgcaaaactacatttttcaacgtgtcttcttccactctgacctccaagtatagaggggaatctgagaaattggtgcgtcttctgttcgaaatggctcgattctacagtcccgcaacgatcttcatcgatgaaatcgactcaatttgctcacgccgtgggacatcagaggaacatgaagcaagcaggcgggttaaggccgaactcttggtgcagatggatggtgtaggtggcacatctgagaatgatgaccccagcaaaatggtgatggtgctggctgcaaccaactttccatgggacatcgatgaggccctacggcgacgactcgagaaaagaatttacatccctctccctagtggtatgcggccttag

SEQ ID NO: 227590 - DNA, 1476 bp, synthetic construct
  misc_feature 1..1476: note = Description of Artificial Sequence: Synthetic coding sequence
  source 1..1476: mol_type = other DNA
atgtcactcctcatgatcagtgagaacgtgaagttagcccgtgagtatgcactgctcggcaactacgattcagccatggtatattatcaaggtgtcctggaccagatgaataagtacctgtattcagtcaaggatacatacctgcagcagaaatggcaacaggtctggcaggagataaacgtggaggccaagcacgtaaaagacattatgaaaactcttgagagctttaagcttgactctacacctctgaaggcagcccagcacgatctgcccgcttccgagggggaggtgtggtctatgccggttcccgtcgagagacgccctagccctgggccaagaaagcggcagtcatcacagtattccgatcctaagtcccacggcaacagaccatctacaaccgtgagagttcataggtcctccgcccagaatgtccacaacgatcggggtaaggcggtacgatgcagagaaaagaaggagcagaacaaaggccgtgaagaaaagaacaagtcgcctgcggctgttactgagccagagactaataagttcgattctactgggtacgataaggatctggtggaagccctagaacgcgacatcattagtcagaacccgaacgtgcggtgggacgacatcgctgatctggtggaggccaagaagctcctgaaggaggccgtagtgctgcctatgtggatgcccgagttctttaaaggaataaggcggccttggaagggagtgctcatggtcgggcctccgggaacaggtaagacactgctggcgaaagcagtggccactgagtgtaagacaacatttttcaacgtgtcgagcagcacactcacatccaaataccgcggtgagtctgaaaagcttgtgcgcctgctgtttgagatggctcggttctactcccctgcaacaatatttattgatgagatcgacagcatctgctcccgaaggggcacctccgaggagcatgaagcttctcgcagagtcaaggccgagctgcttgtgcaaatggacggtgtgggaggcacttctgagaatgacgatccttcaaaaatggtgatggtgctggcagcaacaaacttcccatgggacattgacgaggcgttgcggaggaggctcgagaaaaggatttacatcccccttcccagcgctaaggggagagaggaactcctcaggatttcactcagagaactggagctggctgacgacgtggacctggcttccattgctgagaacatggaaggctacagtggcgctgatattaccaacgtgtgtcgggacgcctcgctcatggctatgagaaggaggattgagggcctcacacccgaagagatccggaacttatcaaaagaggaaatgcatatgcccaccacaatggaggattttgaaatggcactgaaaaaggtgagtaaatccgtctcagcggctgacattgagcggtacgaaaaatggatctttgaattcggcagctgctag

SEQ ID NO: 227591 - DNA, 1476 bp, synthetic construct
  misc_feature 1..1476: note = Description of Artificial Sequence: Synthetic coding sequence
  source 1..1476: mol_type = other DNA
atgagtctgttgatgatctcagaaaacgtgaagctggcgagggagtatgccttattgggaaactacgatagcgctatggtgtattatcagggtgttctggatcagatgaacaagtacctgtactcagtaaaagacacttacctgcagcagaagtggcagcaggtttggcaggagattaatgtagaagctaagcacgtaaaggacataatgaagaccctggagtcattcaaattggattccacacctcttaaggccgcacagcacgacttacccgcaagcgagggagaagtttggtccatgccagttccggtcgagcgaagaccttctcccggaccacgcaaaaggcagtcatcccagtattcagatcccaagagtcatggaaatagacctagtacaacagttagggtgcacaggtcatccgctcaaaacgtacataacgatcgcggtaaagcagtgcgctgcagagagaagaaagaacagaacaagggccgtgaggagaagaacaagtcgcccgcagccgtgaccgagcccgaaacaaataaatttgacagcactggttacgacaaagacttagttgaggccctcgaaagagacattatcagccagaaccctaacgtgcgctgggacgatatcgctgacctggtagaggcaaaaaaactgttaaaagaagccgtggtgcttcctatgtggatgccagagtttttcaaaggcatacggaggccatggaagggggtgttgatggtgggcccaccaggcacagggaagacattactcgctaaggcagtggctacagagtgtaagaccacattcttcaatgtgtctagcagtacactgacttctaaatacagaggtgaaagcgagaaattagtgcgattacttttcgaaatggcgcgattttacagccctgctaccatatttattgatgagatcgacagcatctgcagccgcagaggcaccagcgaagaacacgaggccagccgacgcgtgaaagccgagctgctcgtgcagatggacggagtcggaggaaccagcgagaacgacgaccccagtaagatggtgatggtacttgccgcaaccaatttcccctgggacatcgacgaggctctgagacgaagactcgaaaaacgcatctatatcccactgccaagcgccaaaggacgggaggagctgttgaggatcagtcttcgggagttggaattggctgacgacgtggatctcgcaagtatcgccgaaaatatggaaggctactccggcgctgacatcactaacgtctgccgcgatgcttcactaatggcaatgcggcgtcgcatcgaggggctcacacccgaggagatccgcaatctgagcaaagaggagatgcacatgccaaccaccatggaagatttcgagatggctcttaagaaagtcagcaaaagcgtcagcgcggctgatatcgaaaggtacgaaaagtggatttttgaatttggctcttgttag

SEQ ID NO: 227592 - DNA, 636 bp, synthetic construct
  misc_feature 1..636: note = Description of Artificial Sequence: Synthetic coding sequence
  source 1..636: mol_type = other DNA
atgtctctcttaatgatctccgagaacgtcaagcttgccagagaatacgctttgctgggcaactatgactccgctatggtctactatcagggggtgctagaccagatgaataagtatctgtacagcgtcaaggatacctatctgcagcagaagtggcagcaggtctggcaagaaatcaacgttgaagccaagcatgttaaggacatcatgaagacactagaatctttcaaactcgatagcacccctctgaaagcagcacaacacgatttgcctgctagcgagggagaggtgtggtctatgcccgtgccagtggaaagaagaccctccccaggaccccgaaagcgccagagttctcaatattccgatccgaaatcgcacggcaatcgcccatccaccacagttcgggtccacaggtctagcgcacagaacgtgcacaatgacaggggaaaggcagtgcggtgtcgggagaaaaaggagcaaaataaggggagggaggagaagaacaagtcaccggcagctgtgacggaacctgaaaccaacaaatttgattcgaccggctacgacaaggacctcgtcgaagctctagaacgcgacattatctcccagaatccaaatgttcgttgggacgacatctag

SEQ ID NO: 227593 - DNA, 843 bp, synthetic construct
  misc_feature 1..843: note = Description of Artificial Sequence: Synthetic coding sequence
  source 1..843: mol_type = other DNA
atgagtctattaatgattagcgagaacgttaaactcgctcgcgagtacgctctcttgggcaactacgactctgcaatggtctattaccaaggagttcttgaccagatgaacaagtacctctactcagtgaaagacacatatctgcagcagaagtggcagcaggtgtggcaggagatcaacgttgaggcgaagcacgttaaagatataatgaaaacactggaatcatttaagctggatagtacgcctctcaaggcggctcagcatgatctacctgctagcgaaggtgaggtatggagcatgcctgtgccagtggagaggcgtccgagccccggacctaggaaacgccagtcatcgcagtatagcgacccaaaatctcatggtaatagaccatctaccacggtacgagtccaccgcagctctgctcaaaacgttcataatgatagaggaaaagctgtgagatgtcgcgaaaagaaggaacagaacaaaggaagggaggaaaagaataagtcccccgctgctgtcaccgaacccgagaccaacaagttcgattctacagggtatgacaaagacctcgtcgaagctctcgagagggacatcatctcacagaatcctaacgtgcgatgggacgacatagcagatcttgtcgaagcgaagaaactactcaaagaagctgtcgtactcccgatgtggatgcccgaattctttaagggtataaggaggccatggaaaggcgtactaatggtcggccctccaggaacaggcaagacattgcttgctaaggcggtggccaccgaatgcaaaaccactttttttaacgtatcgtcatctaccctaacctcatag

SEQ ID NO: 227594 - DNA, 429 bp, synthetic construct
  misc_feature 1..429: note = Description of Artificial Sequence: Synthetic coding sequence
  source 1..429: mol_type = other DNA
atgaattgcagtgagagccagcggttgcggacattattgagccgactcctcttggagttacaccacagagggaatgcctcaggactaggcgcaggacctcgaccatccatgggaatgggcgtcgtgcctgacccgttcgtgggtcgtgaagtaacaagcgcaaagggcgatgacgcttacctgtatatcctactcatcatgattttctacgcttgcctagctggagggctgatcttggcgtacaccaggtcaagaaagctcgtggaagctaaagacgagcctagccaggcctgtgccgaacatgaatgggcgccagggggagccctcaccgctgatgctgaagcggcagctgggtcacaggccgagggacggaggcagcttgcctctgagggactccccgctttagcccaaggcgctgagagggtgtag

SEQ ID NO: 227595 - DNA, 1509 bp, synthetic construct
  misc_feature 1..1509: note = Description of Artificial Sequence: Synthetic coding sequence
  source 1..1509: mol_type = other DNA
atgtttgggacgctgctgttatactgcttcttcttggccacagttcccgcactagcagagaccggcggtgagcgccagctttcaccagagaagagcgagatctggggcccagggctgaaggcagacgtggtcctgccagcacgctacttttatattcaggcagttgatacttccggaaataagttcacgagtagcccgggagaaaaggtcttccaggtaaaagtatctgctcccgaagaacagttcactagagttggtgtgcaagtcctggacaggaaggatgggtccttcatcgtgcgctatcggatgtacgcgagctacaaaaaccttaaggttgaaattaagtttcaagggcaacatgttgctaagtctccatatatccttaagggaccggtttaccacgaaaattgtgattgtcccctgcaggacagtgcagcctggctgagagagatgaattgtccggagaccattgctcagattcaacgcgacctggcgcactttcccgctgtggaccccgagaagatcgcagtggagatccctaagcgctttggtcaacgccagtctctttgccattacaccctcaaagataacaaagtgtatatcaagactcatggggagcacgttggctttagaatttttatggacgccatacttctgagtctgaccagaaaggtaaagatgccggatgtagagttgttcgttaatttgggtgattggcctctggaaaagaagaagtctaactctaacatccatcctatcttcagctggtgcggttccactgacagtaaggatattgtgatgcccacttacgacttgactgattccgttctcgagactatgggcagggtgtcactcgatatgatgtcagtccaggccaacactgggccaccatgggagagtaaaaactctactgccgtgtggagaggtcgtgactctcgtaaagaacgtctcgagttggttaagctcagcagaaagcatccagaactaattgacgcggcattcaccaactttttcttttttaagcacgatgagaatttgtatggcccaatcgtgaagcacatcagtttttttgatttttttaaacacaaataccagatcaacattgatgggacagtggccgcttaccggctcccttatctcctggtgggcgacagcgtcgtactgaaacaagactcaatctactacgagcatttttataacgagctacagccatggaagcactacatccctgtgaagtcgaacctcagtgacctgctcgagaaactcaaatgggcgaaagaccacgatgaggaagccaagaagatcgcaaaagctggtcaggaattcgcacgcaacaatctaatgggcgacgacatcttttgttattactttaaactgtttcaggagtacgcaaatcttcaggtgagcgagccccagattcgtgaaggaatgaagcgggttgaaccccagactgaggatgaccttttcccatgcacgtgccacaggaaaaagacgaaggatgagttgtag

SEQ ID NO: 227596 - DNA, 1065 bp, synthetic construct
  misc_feature 1..1065: note = Description of Artificial Sequence: Synthetic coding sequence
  source 1..1065: mol_type = other DNA
atgtccgccggaggaggcagggcctttgcatggcaggtatttccacctatgccgacttgcagagtatacgggacagttgctcatcaagacggccacctgctggtcctcgggggatgtgggcgagctggccttcccttggataccgcggagacactggatatggcatcacacacttggctagcattagctcctttgccaacagctcgtgccggagcagcagctgtggtgctgggtaaacaagtgctggtggtcggaggcgtggatgaagtgcaatcccccgtcgccgctgtcgaggccttccttatggatgaaggacgatgggagcgtagagcgactctgccacaggccgctatgggcgtggctactgtagagcgagacggaatggtgtacgcactgggcggaatgggtcctgatactgcaccacaggcacaggttcgggtttacgaacctcggagggactgctggctgagtctcccatccatgcccaccccctgttacggggctagcacctttcttcacggcaacaagatttacgtgcttggtggtaggcaaggcaaactgcccgtaactgcatttgaagcctttgatctagaggccaggacgtggacacggcacccttctctgccttctcgccgagcattcgctggctgcgccatggcagaaggaagcgttttcagtctggggggattgcagcagcccggaccccataacttttattcccgccctcatttcgttaacactgtggagatgttcgacctagagcacggtagttggaccaaattgcctaggtccctccgtatgagggataagagggctgactttgttgtgggatcgctgggcggacacatagtggccataggcggtctgggcaatcagccctgcccactggggtccgtggaaagcttcagcctcgccagacgaaggtgggaggccttaccggcaatgcccaccgcacggtgctcatgttcctcccttcaggccggtcccagactgttcgtcattgggggtgtcgctcagggaccctcacaagcagtggaggctttatgtctgagggatggcgtgtag

SEQ ID NO: 227597 - DNA, 417 bp, synthetic construct
  misc_feature 1..417: note = Description of Artificial Sequence: Synthetic coding sequence
  source 1..417: mol_type = other DNA
atgtttgacctcgagcacggcagttggaccaaattgcctagaagtctgagaatgagagacaagcgagcggactttgtggtgggttccttaggcggtcatattgtcgcaatcggaggactagggaaccagccgtgccccctgggtagcgtggagagcttctcactagcaagaaggagatgggaagcactccctgcaatgcccaccgcaagatgcagctgttcaagcctgcaggcgggtcccagacttttcgttattgggggtgtagctcaggggccttcgcaggccgtggaggccctatgtttacgagatggggagggcttggtcggtgcagtgcattggagctcttcattgccagaagccgctatctctatggccccttttgctgccgaggacacccattgcggtagcgtcggatag

SEQ ID NO: 227598 - DNA, 1821 bp, synthetic construct
  misc_feature 1..1821: note = Description of Artificial Sequence: Synthetic coding sequence
  source 1..1821: mol_type = other DNA
atggactctcagagagagctggctgaggagctgcggctgtaccaaagcactctccttcaggacggtctgaaagatctacttgacgaaaagaagttcatcgattgcactctaaaggcaggagacaaatccctcccatgtcatcggcttatactgtccgcttgctccccttactttagagaatatttcttatccgagattgatgaagcaaagaagaaggaggtggtcttggataatgtcgatcccgctatactagatttgattatcaagtatctctatagcgcctctatcgatcttaatgatgggaatgtgcaggacatttttgcattagcttcgaggttccagattccgagcgtgttcactgtctgcgtgagttacctgcagaaacggctggcacccggaaattgcttggccattctgcgacttggcctactgctcgactgcccccgactggcaatctctgcgagagaattcgtatccgataggttcgtacaaatatgcaaggaagaggactttatgcagctgtctccacaggaactcatttccgtcatatccaacgacagcctaaatgtcgaaaaagaagaggccgtgttcgaagccgtcatgaagtgggttagaaccgacaaggagaatcgagtgaaaaacctgagcgaggtcttcgactgtattcggttccgcctgatgaccgaaaaatatttcaaggaccacgtcgagaaggacgacatcatcaagagtaatccggacttgcaaaagaaaattaaagtgctcaaagacgcttttgccggaaaactgcccgaaccctccaaaaatgcagccaaaacaggcgcaggcgaagtcaacggtgatgttggagacgaagatctgctccctggctacctgaacgacatcccccgacacggaatgttcgttaaagacctgattctcttagtaaacgatactgccgctgtggcctacgacccgactgagaatgagtgctacctgaccgcgctggcagagcagatacctcgtaaccacagctcgattgttacacagcagaatcagatctacgtggtcgggggattgtatgtggacgaggagaataaggatcagcctctgcagagttacttctttcaactcgattctattgcttctgagtgggtaggattacctcccctgccgtcggcaaggtgcttgttcggattgggcgaggttgatgacaagatctacgtcgtggctggcaaggatctgcagaccgaagccagtctggacagcgtgctttgttacgaccctgtcgcagccaaatggaatgaagtcaaaaagctgcccattaaggtttatggtcataacgttatctcccacaagggaatgatctactgcttgggtggaaagactgacgacaagaaatgtaccaaccgtgtttttatatttaatcctaaaaaaggcgattggaaagacctggctccaatgaaaataccaagatcaatgttcggagtagccgtccataagggcaaaattgtcatcgcgggtggcgtcaccgaggatggactcagcgcatcagtcgaagccttcgacctgactacgaataagtgggacgtaatgacagagttccctcaagagaggtcgtccatcagccttgtatccctagcaggttcactgtacgctatcggaggattcgcaatgattcagttggagagtaaagaattcgcaccgactgaggtcaacgatatctggaaatatgaggacgacaagaaagaatgggcaggaatgctgaaagagatacgttacgctagtggtgcctcctgcctcgccactaggttaaatcttttcaagctgagtaaactctag

SEQ ID NO: 227599 - DNA, 1377 bp, synthetic construct
  misc_feature 1..1377: note = Description of Artificial Sequence: Synthetic coding sequence
  source 1..1377: mol_type = other DNA
atggcgagaggaccacagaccttggtgcaagtgtgggtcggcggacagttgttccaggccgacagagccttgctggttgaacattgcggctttttcagaggattgttcaggtctgggatgcgcgagacccgggcagccgaggtccggttaggagtgctgtccgctggcggtttccgcgcaactctacaggtgctgagaggggatcgtccagcactggccgctgaagatgaactcctgcaggccgtggagtgtgccgcattcctccaggctcccgctttggctaggtttcttgagcataacctgacgtccgataactgtgcactactgtgtgatgccgctgccgcttttggcttacgagatgttttccactccgccgctctgttcatttgcgacggggaacgggaactggcagccgagctggcacttccggaggcccgagcatacgttgcggctctcaggcctagtagttatgccgcagtgagtacacatactcccgctcctggtttcctggaagatgccagtagaactctgtgttatttagatgaagaagaggatgcctggagaacgctcgctgccctgccattggaagcatcgaccctattagctggggtggcaaccctggggaataagctgtacattgttggcggagtgcgaggagcatcaaaagaagtggtggaactggggttctgttacgatccggacggaggcacctggcacgagttccccagtcctcatcagccccgatatgataccgctttagccggtttcgatggtagactctacgctataggcggagaattccaacgtactcccatttctagtgtggagcgttatgaccctgcagcaggttgctggtccttcgtagcggatctgcctcaacccgctgcaggtgtcccctgtgcacaggcttgcggcagattattcgtttgtctctggagacccgcagataccactgccgtggtggaatacgcagtccgaaccgacgcctggcttccagtcgccgagctccgaagacctcagtcatacggacattgcatggtggcccatagagactccctttatgtagtgcggaatgggccatcagatgattttctgcactgcgctatagactgccttaacctggctactggacagtggacagcacttccaggacagtttgtgaatagtaagggagctctgttcaccgctgtggtgcgaggggatacagtgtataccgtgaaccggatgttcactcttttgtatgctatcgaaggcggaacgtggagactgttaagggagaaggcagggttccctaggcctggtagcttacagacctttctgctcagactgcccccaggtgcgcctggtccagtgacctcaacaactgcggaattatag

SEQ ID NO: 227600 - DNA, 2247 bp, synthetic construct
  misc_feature 1..2247: note = Description of Artificial Sequence: Synthetic coding sequence
  source 1..2247: mol_type = other DNA
atgtcggggagcggcagaaaggatttcgatgtaaagcacattctccgcctacgctggaaactgtttagccaccctagcccttccacgggaggccctgccggtggcggatgcttacagcaggacggctctgggagctttgagcactggggaccaagccagtctaggctccttaaatctcaggagagatctggagtgtctactttctggaagaaaccctcctccagttcatcgagctccagctctccgtctagctccagttctagttttaacccactcaatggaacattactaccagtggccactcggttacagcagggcgctcccggacagggcacccagcagcccgcaaggactcttttttatgttgaaagcttagaagaggaggttgtgcccggaatggatttcccaggtcctcatgagaagggcctggtgctgcaggaattaaaggtggagccggataactcctctcaggctaccggggaagggtgtggacaccggctgagttcaacgggccacagtatgaccccgcaatccgatctagactcctcatcaagtgaagagttctatcaggccgttcaccacgccgagcagaccttccggaaaatggagtcctaccttaagcagcaacagctgtgtgatgtaatccttatcgtgggtaatcgtaaaataccagctcatagactggtcctgtctagcgtcagtgactactttgccgctatgtttacctctgatgtttgtgaagcaaagcaagaagaaatcaagatggaaggcatagaccctaacgccctctgggacttggtgcagttcgcctatacgggatgcttggaacttaaggaagacaccattgaaaaccttctggcggctgcctgcctgctgcaactgccacaagtcgtggaggtgtgttgccactttctgatgaagctgctgcatccaagcaattgcctgggaatcagggctttcgcagacgcccaaggatgcatcgagcttatgaaggttgcgcactcatacactatggagaacattatggaggtgataagaaaccaagaatttctgcttctgccagctgaagagttgcacaagctgctggcaagtgatgacgtgaacgtcccggatgaagaaaccatttttcatgctttgatgatgtgggttaagtatgacatgcaaagccggtgtaatgatctgtctatgctgctcgccttcattagattacccctgctgcctcctcagatactggccgatctggagaaccatgcgctgttcaagaacgacttggaatgtcagaaactgatcctggaggccatgaaataccatctcctgccggagcgtcgtacccttatgcaatccccaaggacaaaacccagaaaatcaactgtgggcacgttgtacgccgtgggtggcatggacaacaataagggagctaccaccatcgaaaaatatgacctgaggaccaacctgtggatccaagctgggatgatgaatgggaggagactccagtttggagtcgcagtgattgacgataaattgttcgtcatcggaggtcgggacggacttaagaccttgaacactgtggaatgttacaacccgaagactaagacatggactgtgctgccaccgatgtcgactcacagacatgggctgggcgtaacagtgctggaaggccctatctatgccgtgggtggccacgacggatggtcctatctcaataccgttgaaagatgggatccccaaagccagcagtggacatttgtagctagtatgagcatcgcccgatccacagttggagttgccgctttgaatggaaaactctactcagtcggcggtagggacggaagttcatgtctcagttcaatggaatattatgatccccacacaaataagtggaatatgtgcgcacctatgtgcaagcgcagaggcggagttggagtcgctacatgtgacggatttctctacgccgtggggggacacgatgctccggcaagcaatcattgttccaggttgctggactacgtcgagcgttacgaccccaagaccgacacttggaccatggtggcacccctcagcatgcctagagacgccgtaggcgtctgtctgctcggcgacaggctttacgcagtggggggatacgacggacaaacctatcttaataccatggaatcctacgacccccagaccaacgagtggacccaaatggcctctttgaatattgggagagctggagcttgtgtggtggtgattaagcagccctag

SEQ ID NO: 227601 - DNA, 1668 bp, synthetic construct
  misc_feature 1..1668: note = Description of Artificial Sequence: Synthetic coding sequence
  source 1..1668: mol_type = other DNA
atggatttcccaggaccccatgaaaaaggattggtactgcaagagcttaaagtcgaacccgataactcgagccaggcaactggcgagggatgcgggcaccggcttgttctctcctctgtgagtgactatttcgcagcgatgttcacgagtgatgtgtgcgaggctaaacaagaggaaatcaagatggaggggatcgaccccaacgcactgtgggatctcgtgcagtttgcctacactggctgcctggagctgaaggaagataccattgagaacttgcttgctgctgcttgtctgctgcagctgccccaggtggtggaggtctgctgtcatttcttgatgaagttgttgcacccttcgaactgcctgggcatacgcgcattcgctgacgcccagggatgcattgagcttatgaaagtagcccattcatataccatggaaaatatcatggaggtcattcgcaatcaagaattcttactgttgcctgctgaggaactgcataaactgctcgccagcgacgacgtaaacgttcctgatgaggaaacaattttccatgccctgatgatgtgggtaaagtatgatatgcagtctaggtgtaatgacctgtctatgctgctcgccttcatcaggctccccctcttaccccctcaaattttagctgacttggagaatcacgccctattcaaaaacgacttggagtgtcagaagcttattttagaagccatgaagtatcacctccttcccgagaggcggacccttatgcaatcgcccaggaccaagccgaggaagtccacagtcggaaccctctatgccgttggcggtatggataacaacaagggggcaaccaccatcgagaaatatgatttacgtacaaatctgtggatacaggccggtatgatgaatggccgtcgcctccagttcggagttgcagtgattgatgacaaactgttcgtgatcgggggtcgggatggactgaaaacacttaataccgtcgagtgctacaatcccaagacaaaaacatggaccgtgttaccccctatgtccactcatcggcacggtcttggagtgactgtcttggaaggcccaatctacgctgtgggaggccacgacggctggtcctacttgaacaccgtggagagatgggacccgcagtctcagcagtggacattcgtggccagtatgagtatagccaggtctactgtaggtgttgccgctctcaacgggaagttatattccgtgggaggacgcgatgggtcctcgtgcctcagctccatggaatactacgaccctcatacaaacaaatggaacatgtgtgcgccaatgtgtaagagaagaggaggcgtcggagtcgcaacctgcgatggtttcctgtatgccgtaggaggacacgacgctccggcatccaatcattgcagtagattacttgactacgtggagaggtacgatcccaagacagacacatggacaatggtggcgccactgagcatgcctcgcgatgccgtgggggtttgtctcctgggcgatcggctctatgccgtcggcggttacgatgggcagacatatctgaatactatggagagctatgatccacagaccaacgaatggacacaaatggcgagcctgaacatcggaagggcaggcgcatgtgtggtagtgataaaacagccatag

SEQ ID NO: 227602 - DNA, 1167 bp, synthetic construct
  misc_feature 1..1167: note = Description of Artificial Sequence: Synthetic coding sequence
  source 1..1167: mol_type = other DNA
atgagcagatcaggcgatcgcacctccacctttgatcctagccattctgacaacctcctccacggcttaaatcttttgtggagaaaacagctgttctgtgacgtgactttaaccgcccaggggcagcaatttcactgccacaaagccgtgctggctagctgcagccagtactttcgctctctgtttagttcacatccccctctgggcggaggcgtagggggacaggacggtctcggagccccaaaagatcagcaacagcctccgcagcagcagcccagccagcagcagcagcctccaccgcaggaggaacccggtaccccatcgtccagccctgatgataaactgctgacctccccaagagccatcaacaacctcgtgttgcaaggatgctcatctattggcctccggctggtgctggaatatctgtacactgcaaacgtgacactctccctggatacagtcgaagaagtgttatccgtgtccaaaatactccacattcctcaggtcaccaagctttgtgtgcagtttctgaatgaccagatctccgtacaaaactataaacaggtctgtaagattgccgcactgcatgggttggaggagacaaagaagttggccaataaatacctggtagaagatgtcctgcttctcaactttgaagaaatgcgcgctttgctggattccctccccccaccggtagagtccgaattagcactgtttcagatgtctgtgttgtggcttgagcacgaccgtgagactcggatgcagtatgctccggacctaatgaaacggctacggttcgctctgatccccgcacctgaactggtagagcgcgtccaaagcgttgactttatgcgtactgacccggtgtgccaaaaattgctactggatgctatgaactatcacctgatgccattccgccaacactgtcggcaaagcttggcatcacgcatccgctctaataagaaaatgctcctgctcgtaggcggtctgcctcccggacccgacaggcttccttcaaatcttgtgcagtactatgatgatgagaagaagacttggaagattcttacaatcaccggcccacatccgatttcaggcaaacaggagtccgcgtctagccctgagtttagaaggcgtaagactcgcgagttcagcaacaatacaatgtag

SEQ ID NO: 227603 - DNA, 1887 bp, synthetic construct
  misc_feature 1..1887: note = Description of Artificial Sequence: Synthetic coding sequence
  source 1..1887: mol_type = other DNA
atgagtcggagcggtgatcgtaccagcactttcgaccccagccactccgataatctgctgcatggattaaatctgctgtggcgcaagcagctgttctgtgacgtgacactgactgctcagggccaacaattccactgtcataaagccgttctggccagttgctctcagtatttcaggtccctgttctcatctcatccccctctgggtggcggagtggggggtcaggacggactcggtgctccgaaggatcagcagcagccgcctcagcagcagcccagtcagcaacaacaaccacctccccaagaagagccaggaacccctagttccagccccgacgataagcttctcacctctcctagggcaatcaataatctggtgctgcagggatgctcaagtatagggctgcgtctggtcctagaatacctgtatacagctaatgtcaccttgagcttggacaccgttgaggaggtcctctccgtaagcaagatcctgcacatcccgcaggtgacaaagctgtgcgtgcagttcctgaatgatcagatatccgtgcagaactacaagcaggtgtgtaagattgccgcattgcacggtcttgaggagacaaaaaaattagccaataagtatcttgtggaggatgtcctgctgctgaattttgaggagatgagagctctcttagattcactgccaccgccagtggaaagtgagcttgccctatttcagatgagtgtcctgtggttagagcacgatagggaaacacgaatgcagtacgctcccgacttaatgaaaagactgcggtttgccctgatccccgcaccggaactggtggagcgggtgcagtctgtcgactttatgagaaccgatcctgtgtgccagaagttactgcttgatgccatgaactaccaccttatgccctttagacagcactgtcgtcagtctctcgcgtccaggataagatctaacaagaaaatgttgctattggtagggggattgcctcctggtcccgacagactgccgtcaaaccttgtacagtattatgacgacgaaaagaagacttggaagatcctgacgatcatgccctacaattccgcacatcattgtgtggtggaagtcgagaattttttgttcgtgctgggtggcgaagatcagtggaaccctaacggtaagcattctactaattttgtgagcagatatgacccacggttcaatagctggattcagttaccccctatgcaggagaggagagcctcgttctacgcttgtcggttggacaagcacctttacgttattggcggaaggaatgagacaggctatctgtcttctgttgaatgttacaacctggagaccaacgaatggagatacgtcagttcactgccacagccattggcagcccacgcgggtgctgtgcacaatggtaaaatttatataagcggcggagtgcacaatggggagtacgttccctggctgtattgctacgatccagtcatggatgtgtgggctaggaagcaggatatgaatacaaaacgggcaatccacacattggcagtgatgaacgatcgactttatgcaattggcggtaatcacctgaaaggattttcgcatcttgacgtgatgctcgtcgagtgctatgacccaaagggagaccagtggaatatcctgcaaactcccatccttgaagggcgttctggacccggatgtgctgtgctggatgactcaatctatctcgtgggaggatattcttggtcaatgggagcttacaagtcatccaccatctgctattgcccagagaaaggcacctggacagaattggaaggcgatgtcgccgaaccgctggcaggtcccgcttgcgtgactgtgatcctgcctagctgcgtcccgtacaacaagtag

SEQ ID NO: 227604 - DNA, 1794 bp, synthetic construct
  misc_feature 1..1794: note = Description of Artificial Sequence: Synthetic coding sequence
  source 1..1794: mol_type = other DNA
atggtctggctagaggccagaccacagatactcttcgtgtgtacaaaacagggccaccaaaaacccctggacagtaaggatgataataccgagaaacactgccccgtcacggttaatccgtggcacatgaaaaaagcgttcaaagtgatgaatgaattaagaagccagaatctactgtgtgatgtcacaatcgtcgcagaggacatggagatctctgctcatagggtggttctggcagcgtgttcaccatactttcatgccatgtttaccggcgaaatgagcgagtctcgggctaaacgcgtgcgcattaaggaagtggacggctggaccctcaggatgctaattgactatgtgtacacagccgaaattcaggtcaccgaggagaatgtgcaggttctactgccggctgccggtctcctgcagctgcaggacgtgaaaaagacctgctgcgagtttctcgagtcgcagctccatcctgtcaattgccttggcattcgggcttttgccgacatgcacgcctgcacagatctcctgaataaagctaacacctacgcagaacagcactttgcagacgtggtccttagcgaagagtttctgaaccttggcatcgagcaggtgtgttcactgatttccagtgataagctcacgatcagtagtgaggagaaagtattcgaggccgtgattgcttgggtgaaccacgacaaggatgtgaggcaggagttcatggccagacttatggagcatgttcgcctgcctctcctgcctagggaatatttggtgcagcgcgttgaagaagaagcactcgttaagaattccagcgcctgcaaggattacctgatcgaagcgatgaagtaccatctcttgcccactgaacaacggattttaatgaagtccgtcagaactaggctgcgaaccccgatgaatctgccaaaattaatggtcgttgtggggggacaggccccaaaggcgattagatccgtcgaatgctacgactttaaagaagagaggtggcatcaggttgctgaactgcctagcaggagatgcagggctggcatggtttacatggccggtctcgtgtttgcagtcgggggtttcaacggaagtctgagggtcaggactgtagacagctacgaccccgtcaaggatcaatggacctctgtggctaacatgcgtgaccgtcggagcactctcggcgcagctgtgctgaatggactcctctatgcagttggcggattcgacggtagcaccggtctctcatcagtggaggcttataatattaaaagcaacgagtggtttcatgttgctcctatgaacaccaggagatcaagtgtgggcgtcggcgttgtaggtgggctgttatacgccgttgggggttatgacggcgcttcccgccaatgtctatctactgtggagtgttacaacgcaacaacaaacgagtggacctatatcgccgaaatgtccacacgacgtagtggtgccggagtcggggtactcaataacctgctgtatgcagtgggcggtcacgatggtccactggtccgcaagtcggttgaagtgtacgatccaaccactaacgcctggaggcaggtagccgatatgaacatgtgtcgacggaatgctggcgtgtgtgccgttaacggactactgtacgtcgtgggcggagacgatggaagctgcaacctggcttctgttgagtactataacccgacaactgataaatggacggtggtttccagctgtatgagcacgggaagatcatatgcgggtgtcacagtgattgacaagcccttgtag

SEQ ID NO: 227605 - DNA, 2640 bp, synthetic construct
  misc_feature 1..2640: note = Description of Artificial Sequence: Synthetic coding sequence
  source 1..2640: mol_type = other DNA
atgaggctgcacctgttattattgctggcactgtgtggagctggaactacggcggctgaactttcctactcactgagaggtaactggagcatctgtaatggtaacggcagcctggaattaccgggagctgtacccggttgcgttcactctgccctgtttcagcagggactcattcaagacagttactatcgctttaacgatctgaattatcggtgggtgtcattagacaactggacgtattcaaaggagtttaagatcccattcgagataagtaagtggcagaaagtgaacctcattctggagggcgtggacaccgtgagtaagattctcttcaacgaggtcacgataggagagactgacaacatgtttaacaggtatagtttcgatattaccaacgtggtacgggacgtgaattctatcgagttgagatttcagagcgccgttttgtatgcggctcagcagtccaaggcacacaccagataccaggtgccccctgactgtcccccactggttcagaaaggagaatgtcatgtgaatttcgttagaaaagagcaatgcagcttttcctgggactggggtccgagcttccccacccaggggatttggaaggacgttcggatcgaggcgtacaacatctgtcacctgaattatttcactttcagtccgatctacgataaaagcgcacaagagtggaacctagagattgagtcaacattcgatgtagttagctccaagccagtaggcggacaagtgatcgtggccattccaaaactccagactcagcaaacgtatagtatcgagcttcaacccggaaaacggatcgtcgagctgtttgtgaatatttccaaaaatattactgtggagacctggtggccacacggacacggtaaccagaccgggtacaatatgactgttctgtttgagttggacggaggactgaatattgagaaatctgccaaggtgtacttccgaacagtggaactgatcgaggagccaattaagggcagtcctgggctctctttctatttcaagattaatgggtttcccattttcctaaaagggagcaactggataccagccgattcattccaggacagggtgacttcagagttgttgcgtttgcttttgcaatctgtcgtcgacgcaaacatgaacacccttcgcgtgtggggcggaggtatctatgagcaggacgagttctatgagctgtgtgacgagctgggcatcatggtgtggcaggacttcatgtttgcctgcgcgttgtacccgactgatcaggggttcctagacagtgtcacggccgaggtggcctaccagatcaaaaggctcaagtcacacccatcgatcataatctggtctggaaacaatgagaacgaagaagcgctgatgatgaactggtaccatatctcgtttaccgaccgtccaatatacattaaagattatgtgaccctgtatgtgaagaacattcgcgagctcgttttggcaggcgataagtcccgcccatttatcacctcttccccgacaaacggcgcagaaaccgtggctgaagcttgggtgtcccaaaatccaaattcaaattactttggagacgtccatttttacgactacatatcggactgttggaactggaaggtgtttcccaaagctagatttgcctctgaatacggctatcaatcctggccctcattcagtaccctggagaaagtatctagtaccgaagactggtctttcaactcaaaattttccctccacaggcagcaccatgagggtgggaataagcaaatgctgtaccaggcagggttgcactttaagctgccacaatctaccgatcctcttaggacattcaaggatacgatatatctcacccaggtcatgcaagcgcagtgtgtcaaaacagagaccgaattctaccgcaggagccggtctgaaattgttgaccagcaggggcacacaatgggagcactatattggcaactgaatgatatttggcaggctcccagttgggcttccttggaatacggaggaaaatggaagatgctgcactattttgcgcaaaatttttttgccccacttctgccagtgggctttgagaatgagaatacgttttacatctatggagtctctgaccttcactcagattattctatgacactctctgtcagagtacacacatggagcagtttggagcccgtgtgcagtcgggtgacagaaagattcgttatgaaaggaggtgaggcggtctgtctgtacgaggagcccgtgtccgagcttctgagacgctgcggtaactgtacaagagaatcttgcgtggtaagtttttacctgagtgctgaccacgagttgctctcccccactaactaccactttctgagcagccctaaagaagcagtgggcctctgcaaggcccagatcaccgcaatcatctcgcagcagggtgacatctttgtctttgacttggaaacatctgcagtggctccattcgtgtggctggacgtaggcagcattccaggtcggtttagcgataacggattcctgatgactgagaagactcgtactatcttattctacccatgggaaccaacaagcaaaaatgaattagagcagagctttcatgtgaccagcctgacggacatctactag

SEQ ID NO: 227606 - DNA, 1518 bp, synthetic construct
  misc_feature 1..1518: note = Description of Artificial Sequence: Synthetic coding sequence
  source 1..1518: mol_type = other DNA
atgagcgagtcgcgcgctaagcgggtacgaatcaaggaagtggacggatggacccttagaatgctgattgactacgtgtatacggctgaaattcaggttactgaggagaatgtccaggttctccttccagctgcagggttacttcagttacaggatgtgaaaaaaacctgttgcgagttcctcgagagtcagcttcaccctgtaaattgccttggaatacgagccttcgctgacatgcatgcatgtaccgatctcttaaacaaggctaacacatatgctgaacagcactttgccgacgtcgtcctttctgaggagtttctcaatctcggcatcgaacaggtgtgttcactgattagtagcgataagctaaccatcagctccgaggagaaggtctttgaagccgtaatcgcttgggtaaatcatgacaaggacgttaggcaagagtttatggcaaggctgatggaacacgtcagactgcccctgctaccacgcgagtatctcgtgcaaagggtggaagaggaagccctggttaagaacagcagcgcgtgcaaggactatttaattgaggccatgaagtaccaccttttacccactgagcaacgcattttaatgaagtcagttcgtaccaggctcagaactccaatgaacttgccaaaactcatggtggtggtggggggtcaggcaccgaaagccattcggagtgttgaatgctatgactttaaagaagagcggtggcaccaggtcgctgaattgccatccagacggtgtagagctggcatggtttatatggccggattggtttttgccgtggggggatttaacggctccctgcgtgtgcgcacagtggactcgtatgaccccgtcaaagatcagtggacaagcgtcgctaatatgcgggacagacgttctactctgggcgcagctgtgctcaatgggctgctgtatgccgtggggggtttcgacggaagtaccggcttgtcttccgttgaggcatacaatatcaaatctaacgaatggttccatgtggcaccgatgaacaccaggagaagctctgtgggcgtcggtgttgtcggcggtctgctgtatgctgtcggaggctacgatggggctagccgacagtgcctgtctaccgtggagtgttacaatgcaaccaccaacgagtggacgtacatcgcagaaatgtctacgcgtcgatcaggagccggtgtgggggtcctcaacaacctgctgtacgccgtgggagggcacgatgggcctctcgttcggaagagcgtggaagtctatgatccaacaaccaatgcatggcgtcaggtggcagatatgaacatgtgccggagaaatgcaggtgtttgtgccgttaacggtctgctatatgttgtcggtggtgacgacggatcttgcaacttggcgtccgttgagtactacaatccaacgaccgataagtggacagtagtatcctcatgcatgagtacagggcgttcctatgccggtgtgactgtgattgataaacccctctag

SEQ ID NO: 227607 - DNA, 1764 bp, synthetic construct
  misc_feature 1..1764: note = Description of Artificial Sequence: Synthetic coding sequence
  source 1..1764: mol_type = other DNA
atggaaggcgagtccgtcaaactgtcatctcaaacactaatccaagcaggagacgacgagaagaaccaaagaaccatcactgtcaaccccgcacacatggggaaggcgtttaaggtcatgaacgagctcaggtctaaacagctcctttgcgacgtgatgatagtggccgaggatgttgaaattgaggcccacagagtcgtcctcgccgcatgcagcccttacttctgcgccatgtttactggcgacatgagtgaaagcaaggccaagaaaattgaaattaaggatgttgacggacagacactctccaaactgatcgactatatttacactgctgagatcgaggttactgaggaaaacgtgcaagtgttactaccagcagcctctctgctgcagttgatggacgtgaggcagaactgttgcgactttttgcagtcgcagctgcacccaacaaattgtctaggcatcagagcctttgccgacgtccacacttgcactgatctcctgcagcaggccaacgcttatgctgaacagcacttcccagaggtcatgttgggggaggaattcttgtctttgagcttggatcaggtgtgctccctgatcagttcagacaaactgactgtgagctccgaagaaaaagtgtttgaggcagtaatctcctggatcaactacgaaaaggagacaagacttgagcacatggcaaagctcatggaacatgtgagacttccattgctgcctagggattacttagttcagaccgtcgaagaagaggccctgataaagaacaataatacctgtaaagactttctaatcgaagccatgaagtatcacctgttgcccttagaccaacggctgttgatcaaaaacccacgaaccaaaccccgaactcctgttagtttgcccaaagtcatgatagtggttgggggacaggctcctaaggccatcagatctgtagaatgctatgattttgaagaagaccggtgggatcagatagcggagctccccagcaggcggtgcagggcaggcgtggtttttatggccggacatgtatacgcagtggggggatttaatgggagcttacgggtgaggacagtggatgtatatgacggcgtgaaagaccagtggacctctatcgctagcatgcaggagagacgatccactctgggggctgcagtcctgaatgatctcctgtacgctgtggggggttttgatgggtctacaggtctggccagcgttgaggcctactcttataagaccaatgaatggttttttgttgcccctatgaatacacgcagatccagtgtcggagtgggcgtggtcgaggggaagctgtatgctgtggggggttacgacggcgctagccggcagtgtctgtctactgtggaacaatataatccagccacaaacgaatggatctatgtcgcagacatgtccacacgtaggtcgggcgcaggtgtgggagtgctaagcggacagctctatgcaactgggggacatgatggcccactggtgagaaaatccgtagaagtatatgaccctggtactaatacatggaagcaagtcgctgacatgaatatgtgtcgacgtaacgctggggtttgcgcggtgaacggcctcttgtacgtggttgggggagacgatggttcttgtaatttggcatcagtcgagtactacaatcctgtcacagacaaatggacattgctgcccactaatatgagcacaggtagatcatatgccggagtcgcggttatccacaaatcactctag

SEQ ID NO: 227608 - DNA, 906 bp, synthetic construct
  misc_feature 1..906: note = Description of Artificial Sequence: Synthetic coding sequence
  source 1..906: mol_type = other DNA
atggagggggagagcgtgaagctctcttcccaaacactgattcaagccggtgacgacgagaaaaaccagagaactattacggttaatccagcccacatgggaaaagccttcaaggtcatgaatgaattaagatctaaacagctgctgtgcgacgtcatgattgtcgcagaagacgtggaaattgaagcgcatcgagtggttttggcagcatgtagtccatacttctgcgccatgtttaccggggacatgagtgaatctaaggcaaagaagatcgagatcaaggacgtcgacggacagaccttatcaaagcttattgactacatatacactgccgaaatcgaagtgactgaagagaatgtgcaggtgctgcttcccgcagcgagtctgctccaactcatggacgtgaggcagaattgctgcgactttctgcagagccaactccatccgactaattgtctcggtatccgcgcattcgccgacgtacacacttgcaccgacctacttcagcaggcaaacgcctatgccgaacaacacttccctgaggtcatgctgggtgaggaattcctgagcctgagcctggatcaggtgtgctctttaatctccagcgacaagctcactgtatccagtgaagaaaaagttttcgaggctgtcatctcctggataaattacgagaaggaaacacggctggaacacatggccaagctgatggaacatgtccgcctgccactattaccacgtgactacttggtccagactgtggaagaagaagctctgatcaagaataacaacacttgcaaagattttctaatcgaggctatgaagtaccatctgttgccactcgatcagcggctgcttattaagaacccgaggacaaagccgcgaacaccagtgtcccttccaaagtag

SEQ ID NO: 227609 - DNA, 1518 bp, synthetic construct
  misc_feature 1..1518: note = Description of Artificial Sequence: Synthetic coding sequence
  source 1..1518: mol_type = other DNA
atgtccgagtctaaggcaaaaaaaatcgagattaaagatgtggacggccagacattgagcaagctgatagactacatttataccgccgagatcgaggtgaccgaggagaatgtacaggtcctcttgccagccgcaagtctactacaactgatggacgtacggcaaaactgctgcgattttctccagtcacaacttcatccaaccaactgcctgggcatccgagcctttgccgatgtacatacatgcactgaccttctgcagcaggctaacgcttatgccgaacagcattttcccgaagtcatgttgggagaggaattcctgagcctgtccctcgaccaggtatgttcgctgatctccagtgacaaacttactgtatcttcagaggagaaggtattcgaagctgtaatatcctggatcaactatgagaaggagaccagactcgaacacatggccaagttgatggaacatgtacgactgcccttactcccaagggactatctggtacagactgttgaagaagaggctttaatcaagaacaacaacacttgcaaagactttctgatcgaggctatgaaatatcacctcttgcccctggatcaacgcctgctcatcaagaacccccgaactaaaccaagaactccagtcagtctgcctaaagtgatgattgtggtcggaggccaggctcctaaggctattcggtcggtggaatgttacgatttcgaagaggatagatgggaccagattgcagaactgcccagtaggaggtgtcgggctggtgtggtgtttatggccggtcacgtgtacgcagtgggtggattcaacggatccctgagagtgcgtacagtggacgtgtatgacggggtgaaagatcagtggacgagcattgctagcatgcaggaacgcagatccacactcggagctgcagtgctcaacgacctgctttacgccgtggggggtttcgatggaagcaccggcttagcaagtgtcgaggcttatagctataagaccaacgaatggttttttgtcgcaccaatgaacacgcgcaggagttctgtcggcgtgggcgtggtggagggtaaactctatgcagtggggggatacgacggcgcatcaaggcagtgtttaagtacagtcgagcagtacaaccctgctaccaatgagtggatctatgtggccgatatgtcaacaagacggtctggggctggagttggggttttgtccggccagctttatgcaacaggaggtcacgacgggccactggtgaggaagtccgtggaagtctatgatccaggaactaacacctggaagcaggtggctgacatgaatatgtgtagacgtaacgctggggtgtgcgctgttaacggcttgctttacgtggtcggcggagacgacggctcctgcaacctcgcatctgtggagtattataacccagtaacggataagtggactcttctccccactaatatgagtacagggaggtcctacgccggagtcgcagtaattcacaaatctctgtag

SEQ ID NO: 227610 - DNA, 603 bp, synthetic construct
  misc_feature 1..603: note = Description of Artificial Sequence: Synthetic coding sequence
  source 1..603: mol_type = other DNA
atgtcaaggtgttgcagtcgccaacctgcctgttgtagctcttggatgttcggcagaactgcggttactagctgttctctgtcctgcatccctccaattgcatgggccagtgtgcacttgcagatgtacactccagccctgaccttctgcagccgtccaatgccaacacagcattttcccgaggtgatgttgggggaagagtttctgtcactttctctcgatcaggtgtgttctctcatcagctccgacaaactgaccgtcagctccgaagagaaagtttttgaggccgtgatatcctggatcaactatgaaaaagaaacccggctcgaacacatggccaaactgatggaacatgtgagactgccattgcttccaagagactacctcgtccagactgtcgaggaggaggccctgattaaaaataataatacttgtaaggattttctaattgaggcaatgaagtatcacctgctgcctctggatcagcggcttcttatcaagaacccccgaacgaagcccagaacccctgtcagcctcccgaagggcttggagtgtctggcggacagttgcactccacaggtgggaatgatggggctttggtag

SEQ ID NO: 227611 - DNA, 1668 bp, synthetic construct
  misc_feature 1..1668: note = Description of Artificial Sequence: Synthetic coding sequence
  source 1..1668: mol_type = other DNA
atggggaaggcattcaaggtcatgaatgaactgagatccaagcagctactatgcgatgttatgattgttgccgaggatgtggaaatcgaagcacacagagtggtccttgctgcatgttccccgtacttttgcgctatgttcaccggggacatgagcgagtccaaggccaaaaaaatcgaaatcaaagacgtggacggccagactctgagcaaactaatcgactatatctatacagctgagatagaggtgacggaggagaatgtccaggtcctcctgcccgctgcgagcctcctacaattgatggacgtccggcagaattgctgtgattttctgcagtcccagcttcaccctacaaattgcctggggatccgagctttcgcggatgtgcatacctgtacggacctgttgcagcaggcaaatgcctacgccgaacagcacttcccggaggttatgcttggagaggagttcttgagcctgtccttggaccaggtctgtagcctgattagttctgataagctgaccgtaagctcagaggagaaggtgttcgaagcagtgatcagttggatcaactatgagaaggagaccaggttggagcatatggccaaactgatggagcatgttagattgcctttgttgccgagagattacctggtccaaactgtcgaggaggaggccctgatcaaaaacaacaatacttgtaaagacttcctgatcgaagccatgaaatatcatttactgcctttggaccagagactgctcatcaagaaccccagaacaaaacccagaactccagtcagtctgcctaaggtcatgattgtcgtcgggggacaggccccaaaggccatacgcagtgtcgaatgttacgattttgaggaagataggtgggatcaaattgcagagcttccgagtcgacgctgtcgcgctggtgtggtctttatggctggccacgtgtacgccgtgggcggatttaatgggtccctacgtgtgagaacagtggatgtgtatgacggagtgaaagaccagtggaccagtatagcttccatgcaggagaggcgatccactctgggcgcagccgtcctgaatgacctgttatacgcggtgggaggctttgacgggagtactgggcttgcatcggttgaggcctattcctataagacgaacgaatggtttttcgtcgcacctatgaatacgcggcgatccagtgttggagtcggcgtcgtagagggcaaactatatgcagtgggcggttatgacggcgctagtcgtcaatgtctcagtaccgtcgaacagtataaccctgctaccaatgaatggatttatgtcgcggacatgagtacaagaaggagtggcgctggtgttggagttttgagtgggcagctgtatgctacagggggacatgatggtcccctggttcggaagtctgtagaggtgtacgaccctggaactaatacctggaaacaggtggccgatatgaatatgtgcaggcggaatgccggtgtgtgcgcagtgaatggcctgctgtatgtggtcggaggcgacgacgggagctgtaatctggcaagcgttgaatactataaccccgtgaccgacaaatggactctgctccctaccaacatgtcgacgggccgtagctacgcaggcgtggccgtcatccataaatctttgtag

SEQ ID NO: 227612 - DNA, 1905 bp, synthetic construct
  misc_feature 1..1905: note = Description of Artificial Sequence: Synthetic coding sequence
  source 1..1905: mol_type = other DNA
atggccccaaagaaaaagatcgtaaagaagaacaaaggagatattaacgagatgaccattatcgtggaggacagcccgctgaacaagttaaacgctctaaatggactgctggaagggggaaatgggttgtcttgcattagttccgagctgaccgatgccagttatggtccgaacctccttgaggggctctctaaaatgcgtcaagagaatttcctgtgtgacctagttatcgggaccaaaaccaagtcttttgacgtgcacaaatctgtgatggccagctgttctgaatatttctacaatatcctgaagaaggatccctccatccaacgcgttgatttaaacgacatatcccctcttggtctggccactgttattgcatatgcctacaccgggaaactgaccttgtcattatacaccattggatccatcatctctgctgctgtgtacctgcaaatacacactttggtcaagatgtgcagtgattttttgattcgggaaatgagcgtggagaattgcatgtacgtggtgaacatagctgagacctactctttgaaaaacgccaaggccgctgcgcaaaagttcatcagggataatttcctcgagtttgcagaaagcgatcagttcatgaaactgacttttgaacagatcaacgagctacttatcgacgatgacttgcagctaccctcagaaatcgtagccttccagatcgcgatgaaatggctcgagtttgatcagaagcgcgtcaagtatgccgctgatttgttgtctaacattcggtttgggacaatcagcgcacaagatctagtgaactatgtgcaatccgtgcccaggatgatgcaggacgcggactgccaccggttactcgtggatgccatgaattatcacctccttccctatcaccaaaatactttgcagtcacggcgaaccaggatccgtggcggatgccgggtactggtaactgttggaggcagaccagggcttaccgagaaatccctgagccgtgacatcctctatagagatccagaaaacgggtggtcaaaacttacagagatgcctgcaaaaagcttcaatcagtgtgtcgccgttatggacggctttctgtacgtagctggcggagaagaccagaatgacgcccgtaatcaggccaagcacgcagtctccaatttttgccgctatgacccgagatttaacacctggattcacttagccagtatgaatcaaaaaaggacccatttctcactgtccgtgttcaatgggctggtgtatgccgctggcggtcgtaatgccgaagggtccctggcttcgttagagtgctatgtacccagtaccaatcagtggcagcccaagaccccacttgaagttgctaggtgctgtcacgcaagcgccgtcgccgatggcagagtcctcgtgactggaggttacatcgccaacgcgtacagccggagcgtttgcgcttatgaccccgcatcagactcatggcaggaattgcctaatctcagtactcccagagggtggcactgtgctgttacactttcagatcgagtatacgtgatgggtggtagccaattgggtcctcggggagaacgggtggacgtgctcacagtggaatgttacagtcctgctaccggccagtggtcctacgcagctccactccaggtgggtgtgtccacagccggtgtgtcagcgctacacggaagggcctacttagtcggcggatggaatgagggggaaaaaaagtataaaaagtgcattcaatgcttttctcctgaactgaacgagtggactgaagatgatgagctgccagaggccactgtcggagtgtcttgctgtaccttgagcatgcctaacaacgttacacgcgaaagcagagccagcagtgtgtcttcagtccccgtgagtatttag

SEQ ID NO: 227613 - DNA, 1905 bp, synthetic construct
  misc_feature 1..1905: note = Description of Artificial Sequence: Synthetic coding sequence
  source 1..1905: mol_type = other DNA
atggcacctaagaagaaaatcgttaaaaagaacaagggtgacataaatgaaatgacaatcatcgtagaagacagccccctgaacaaacttaacgccttgaacggcctgctagagggtggaaacgggttatcttgtattagcagtgaactgactgatgcctcttacggaccgaatctcctcgagggcctgagcaagatgcggcaggaaaatttcctctgcgatctggtgatcggtacaaagacaaaatcgtttgatgttcataaaagcgtcatggcttcttgcagtgagtatttttataacattctcaaaaaagacccctcaattcagcgagtagacctcaacgacattagcccactgggactcgctacagtcattgcctacgcttacacaggaaagctgacactgtctctttatacgattggctccattatatctgctgctgtctacttgcagatccacactctggtgaaaatgtgctctgactttcttattagagaaatgtctgtggaaaactgcatgtatgtggtcaatattgccgaaacttattcacttaagaacgctaaggccgctgcacaaaagtttattagagacaactttctggagttcgctgagtccgatcagttcatgaagctgactttcgagcagattaatgagctgttgattgatgatgacctccagctgccgtcggagatcgtcgctttccaaatcgcaatgaagtggctggaattcgatcaaaagcgcgttaagtacgctgcagatctcctgtcaaacatcaggtttggaacaataagtgcacaggaccttgtgaactacgtacagagtgttccgaggatgatgcaggacgccgattgtcaccggctgctagtggatgccatgaactaccacctgctgccctaccaccaaaacacattacagagccggcgtaccagaattaggggcggatgtcgtgtgctggtcaccgtggggggtaggccagggctcacagaaaagtccctctctcgtgacattctatatcgggacccagagaatggctggagcaagctgaccgaaatgcccgctaagtcctttaatcagtgcgtggcggtgatggacggattcctctatgtggctgggggagaggaccagaatgatgcaaggaaccaggccaagcatgctgtgtcgaatttctgccggtacgatcctagatttaatacttggatccatctggccagtatgaatcagaaacggacccacttctccctgtccgtgtttaacggcctggtatacgcggcaggtggcaggaatgccgagggtagcctggccagtctcgaatgctacgttccctccacgaatcagtggcaaccaaagaccccactggaagtggcaagatgctgtcacgcctccgccgtagctgacgggagagtgctagtcaccggtggctatattgccaatgcctactcccggagcgtatgtgcctatgatcctgcaagcgactcatggcaggaactgcctaacctctccaccccacgtggttggcactgtgccgttaccctgtcggaccgcgtgtacgttatgggcggttctcagctcggacctagaggagaacgcgtggatgtgctgactgtggaatgctactcacccgctaccgggcagtggtcttatgccgctcccttgcaggtaggagtttccaccgccggagtgtccgccctgcacggccgagcttacctcgtcgggggatggaatgagggagagaagaaatataaaaagtgtatccagtgtttttccccagagctgaatgaatggacagaggacgacgagctgccagaagcgaccgttggcgtgtcttgctgcaccctgtcaatgcccaataatgtgacaagagaatcaagagcctcttctgtttccagcgtgcccgtaagcatctag

SEQ ID NO: 227614 - DNA, 2313 bp, synthetic construct
  misc_feature 1..2313: note = Description of Artificial Sequence: Synthetic coding sequence
  source 1..2313: mol_type = other DNA
atgaatgtcatctactttcctcttcacatctttgttgtgtactcccgggcttacacgtccctcgtgctggttgggtgtactaatctttgcgcagtactgtttgcaagatgcttagatgatcacctggtatctctgcgcatgagcggaagtcgcaaagaatttgatgtgaaacagattttgaagatcaggtggcgttggttcggacaccaagcctcaagtcccaactctacagtagactctcagcagggagagttctggaaccggggtcagacaggagctaatggagggaggaagttcctggatccctgctctctccagttacctctggcgagtattggctacaggcgatctagtcaactagattttcaaaacagcccctcgtggcctatggcttccaccagcgaagtacccgcattcgagttcacagcggaagattgtggcggagctcattggctcgacagacccgaggtggacgatggcacaagcgaggaagagaatgaaagtgattcttcctcatgccgtacttctaacagtagtcagacgctgagttcgtgtcatacaatggagccatgcacctcagacgagttctttcaggcactgaatcacgccgaacagacgttcaaaaagatggagaattacctcaggcacaaacagttgtgtgatgtgatcctggtcgccggtgatcggaggattcccgcacacagactcgtgctgtccagcgtatctgactattttgcagcaatgttcactaatgacgtgagggaagccaggcaggaggagataaagatggaaggcgtcgaaccaaacagcctgtggtcgctcattcagtatgcctacacaggacgtttagagctgaaggaagacaatattgagtgtttgctaagcacggcctgcctgctgcagctaagccaagtcgtggaggcatgctgcaagttcctcatgaagcagctgcacccctcaaactgtctggggatcaggtccttcgcagacgcccagggctgcaccgatctgcataaagtggcacataactatacaatggaacactttatggaggttattaggaatcaggaatttgtcctgctccccgcttctgagatcgccaagctgctggcttcagatgacatgaatattcccaacgaggagactattctgaatgctctgctgacctgggtcagacacgacctggaacagcgccgaaaggacctgtctaaactgctcgcctatattcgactgcccctcctggctcctcagttcctggccgacatggaaaacaatgtcctgtttagggatgatattgaatgtcagaaactcattatggaggccatgaaatatcatttgcttccagaacgacgaccaatgttgcaatccccgaggaccaagcccaggaagtcgacagtgggcactttattcgcagtgggcggaatggatagcactaaaggcgctactagtatcgaaaaatatgatctgaggaccaacatgtggaccccagtagccaatatgaatggacgcaggctgcagtttggcgtggcagtgctggacgacaagttatacgtggttggagggcgtgatggtcttaaaacattaaacacggtcgagtgttacaaccccaagacgaaaacgtggtcggtcatgcccccaatgagcacacatcgccatggactgggggtcgcggtattggaaggtcctatgtacgctgtggggggacacgatggttggtcctatctaaatacagttgaaaggtgggaccctcaggccaggcaatggaacttcgtcgccacgatgtcaacaccacgctcgaccgttggagtagccgtgcttagtggaaaactgtatgccgtgggtggcagggacgggtcctcctgtctaaagtccgttgagtgcttcgacccccacacaaacaagtggaccctttgtgctcagatgtcaaagagacggggaggcgtgggtgtgacaacttggaacggactcctgtatgccattggcggacatgatgctcctgcgagcaacttgacaagtaggctttccgactgtgtcgagaggtacgaccctaaaactgacatgtggacagcagtagcctcaatgagcatcagccgcgatgccgttggagtgtgcctgctcggtgacaagctatatgccgttggagggtacgacggacaggcttacctcaacaccgtggaggcctacgatcctcagactaacgagtggacccaagtcttctctcacacttttgaggattccaaagatcacctggtcgcgatcaaacagaccatttggcgccagaacagtctcagcgaggaattcagaagccattag

SEQ ID NO: 227615 - DNA, 2274 bp, synthetic construct
  misc_feature 1..2274: note = Description of Artificial Sequence: Synthetic coding sequence
  source 1..2274: mol_type = other DNA
atgaacgtgatctatttccctcttcacatcttcgttgtttactctcgggcttacacctctcttgtcctggttggatgtacaaacctgtgcgcagtcctattcgctagatgtctcgacgatcacctagtaagtctaaggatgagcgggtctcgtaaggaattcgatgtgaaacagatactgaaaatccggtggaggtggtttggacaccaagcgagcagcccaaatagcactgtggatagtcagcagggagagttttggaatcggggacagaccggtgcaaacgggggtcggaaattcctggatccatgttcactgcagctgcccctagcatcaattggatacagaagatctagccaattggatttccagaattcccctagctggcctatggctagtacgtccgaggttcctgcgttcgaattcacagcagaggattgcggcggtgcccactggcttgacaggcccgaggtggacgacggaaccagtgaagaggagaacgagtccgactcctccagttgtagaacttctaactcctcccaaaccctcagtagttgccacaccatggaaccctgcacctctgatgagttctttcaggcgttgaaccacgctgaacagactttcaaaaagatggaaaactaccttcgccacaagcagttgtgtgacgtgatcctggtagccggtgatcggagaatccccgctcataggttagttctcagcagcgtctcagattacttcgctgcaatgtttaccaatgacgtccgcgaggcacgccaagaggagatcaagatggagggagtggagcccaacagcctctggagcctcatccagtatgcctataccggtaggctggaactcaaggaggataatatcgagtgcctcctttctactgcgtgtctgctccagctttcacaggttgttgaggcctgttgtaaattcctgatgaagcagctgcacccttccaattgtttaggcattcgtagcttcgctgacgcccagggatgcaccgaccttcacaaggtggcccacaactacactatggaacactttatggaggttatccggaaccaggagtttgtcctgctccccgcaagtgagatcgccaaactgttagcctctgatgatatgaacataccaaacgaggagaccatcctaaatgcattgctgacttgggtacgacacgatttggaacaacgaagaaaagatttgagcaagctcctagcttacattcgcttacccttactggcaccccagttcctcgcagacatggagaataacgtgctgtttagggacgacatagaatgccagaagcttataatggaggcgatgaaatatcatttgctccccgagcggcgaccaatgctgcaatctcctagaactaagcccaggaagtcgactgttggcactctgtttgccgtcggcggaatggatagcaccaagggagcaacatccatagaaaaatatgatttacgaaccaacatgtggaccccagttgctaatatgaacggtcggagactgcaatttggagtggcagtcctcgatgacaagttatatgtggttggcggacgggacggtctgaaaactctcaatactgtcgagtgctataatccaaaaactaagacatggagcgtaatgcccccaatgtcaactcatcgccacgggctcggtgtcgccgtcctcgagggccctatgtatgccgttggtggccacgatgggtggagctatctgaacacggtcgagagatgggacccccaggcccgtcaatggaattttgtcgcaaccatgtcaactcctcggtctaccgtgggagtcgccgtgttatctgggaagctgtacgcagtggggggaagggatggctctagctgtttaaagtccgttgagtgtttcgacccccacacgaacaaatggaccctgtgtgctcagatgtcaaagcgcagaggaggggtgggcgttaccacgtggaacgggctcctgtatgccatcggtggacatgacgcacccgcttcgaatcttacctcacggctgtctgattgcgtggagcggtatgaccctaagaccgacatgtggacagctgtcgctagtatgagcatttcccgggatgccgtgggggtctgcctgctcggagacaaattgtatgcagtgggcggatacgatggccaggcttacctgaatacagtggaggcctacgatccacagaccaatgaatggactcaggtctggcatagctgtttcattatcaccctgaccctgttcctgctcaagcagttcctatggtag

SEQ ID NO: 227616 - DNA, 2268 bp, synthetic construct
  misc_feature 1..2268: note = Description of Artificial Sequence: Synthetic coding sequence
  source 1..2268: mol_type = other DNA
atgaatgttatctatttcccattgcatatctttgttgtatattccagagcgtacacatcgttagttctcgtgggatgtactaatttatgcgctgtattatttgccagatgccttgatgaccacctcgtgtcattaagaatgtctggtagcagaaaggagtttgacgttaaacagatcctgaagattcgctggcggtggttcggccaccaggccagctcacctaatagcactgttgatagccaacaaggggagttctggaatcggggacaaacgggggcaaacggcggtcggaaattccttgacccttgctctctgcaactgccgctggcttcaataggttaccggcgttcaagtcaacttgacttccagaactcgccctcctggccaatggcatccaccagcgaagtgcctgcattcgagtttaccgctgaggattgcggtggggcacactggctggatagaccagaagtggacgatggaactagcgaggaggagaacgaaagtgactcatctagctgcaggacttcaaatagctcccagactcttagcagttgtcacacgatggaaccttgcactagtgacgagttctttcaggcactgaatcacgctgaacaaacattcaagaagatggagaattatctccggcataagcagctgtgtgatgttatcctggtggccggagacagaaggattccggctcacaggttggtactgagctccgttagcgactactttgcagccatgttcaccaatgatgtgcgggaagctcgccaggaggagattaaaatggagggcgttgaaccaaattcattatggtctctgattcagtatgcctacactgggagactggagttgaaggaggacaatattgaatgcctgctctccactgcatgtcttcttcaattatcccaggtggtggaagcttgctgcaaatttttgatgaaacagctccatcctagcaactgtctgggaatcagatccttcgcagatgcgcaggggtgtacggacttgcataaggtcgcacataactacaccatggaacacttcatggaggtcatcaggaaccaagaatttgtcttgcttcctgcctcagagatcgccaaacttctcgccagtgacgacatgaacattcccaacgaggagacgattctcaacgctcttctcacctgggtgaggcatgatctcgaacagcgacgtaaggatctctcaaagttgctggcatatataagactgcctctgttggcccctcagttcttagccgatatggagaataatgttctcttcagggacgatattgagtgtcagaaacttatcatggaggccatgaagtatcatctcctaccagaacgcagacccatgctgcagagccctagaactaagcctaggaagtccacagttgggacactttttgccgtggggggaatggactccactaaaggagccaccagtattgagaagtacgacctccggacaaacatgtggacccctgtcgccaacatgaatggtaggcggctgcagttcggcgtcgccgtccttgacgacaagctgtacgtcgtgggtgggcgagatggactgaagactctgaatacggtggagtgttataacccaaaaacgaagacgtggtcagtcatgccccctatgtccacacacagacacggcttaggtgtggccgtgttggagggcccaatgtacgctgtcggcggtcacgacggatggtcctacctgaataccgtggaaaggtgggacccccaggcgagacaatggaacttcgtcgccaccatgtctactcctagaagcaccgtgggcgtggcggtcctgagtggcaaactgtatgccgttggcggacgggacggttcctcatgtctcaaatcggtagagtgctttgatcctcataccaataaatggaccttgtgtgcacagatgtctaagaggagaggaggcgtcggagtgacaacatggaatggcttgctctacgcaatcgggggacacgatgcgcctgcctccaacctgacgagccgattgtctgattgcgtggagagatacgacccaaaaacggacatgtggaccgctgtcgccagtatgtcaatttctcgtgatgctgtgggagtctgcctcctgggggacaagctttacgctgtgggaggatatgacgggcaggcataccttaatactgtggaggcatacgacccacagacaaacgagtggacccaagtggcacccctgtgccttggtcgggcaggagcatgtgtcgtaactgtaaagttatag

SEQ ID NO: 227617 - DNA, 849 bp, synthetic construct
  misc_feature 1..849: note = Description of Artificial Sequence: Synthetic coding sequence
  source 1..849: mol_type = other DNA
tagaggacgaatatgtggacgcctgtggccaacatgaacggcagaaggttacagtttggggttgccgtgctcgacgacaaactgtacgtcgttggtggacgggacgggttgaaaacactaaatacagtggaatgttacaacccgaagacgaaaacttggagcgtgatgcctcctatgtcaacacaccgtcacggcctgggagttgcggtccttgaaggcccaatgtacgctgtcggaggacacgacggatggtcatacctcaatactgtcgagcgttgggatccgcaagccaggcagtggaattttgttgcaacaatgtcgacacccaggagcacagtgggagtcgcggtcctgtccggaaaactttacgccgtcggcggtcgggatggctcttcctgcctcaaaagtgtggagtgcttcgacccccacacaaataagtggaccttgtgtgcacagatgtccaaaaggagggggggtgtgggagtcactacctggaatggactcctatatgccatcggtggacacgatgccccagcaagtaatcttacatccaggttgtcggattgtgtcgagcgatacgatcctaaaacggatatgtggacagccgtcgccagtatgtccattagtcgagatgcagtcggagtctgtctcctcggcgataagctgtacgctgtggggggatatgacggtcaagcctatctgaatactgtcgaggcttacgatcctcaaacaaatgaatggacccaggtattttcccacacgttcgaggatagcaaagatcatctcgtcgccattaagcagactatctggaggcaaaactccctgtcagaggagttccgctcccactag

SEQ ID NO: 227618 - DNA, 2370 bp, synthetic construct
  misc_feature 1..2370: note = Description of Artificial Sequence: Synthetic coding sequence
  source 1..2370: mol_type = other DNA
atgcgccttcccggacagggcctcggggctagggaggggccatctatccccctctcttccccagcccctgcaccagccagtcccgcaccccctgcatggcccccacggcctgccgtcactcacggaagacttcgttctccaacaaggcgagcctacacatctctggtgttggtggggtgtacgaatctgtgcgcagtgctgttcgctcggtgcctagacgaccatctggtgagcctgcgaatgagtgggtctagaaaggaattcgacgtaaagcaaatattaaaaatccgttggcgctggttcgggcatcaagcaagttcccctaacagcacggtggatagccagcagggtgaattctggaaccgcggacagacaggagctaatggagggagaaagtttttagacccatgttccctacaacttccccttgcctcaatcggctatagaagatccagccaattagattttcagaactctcccagctggcccatggcctctacttcagaagtgccagcttttgagtttacagccgaggattgtggcggagcacattggctagaccgccctgaagtcgatgacggcacaagtgaagaggaaaatgaaagcgacagcagcagctgccgcactagcaactcttcccagacactaagctcctgccacacaatggaaccgtgtactagcgatgaattttttcaagccttgaatcatgccgagcagacctttaaaaaaatggagaactacctccgacataaacaactgtgtgacgtgattcttgtggctggggaccgccgtatcccggcacacaggttggttctgagttctgtgagcgattacttcgcagccatgttcacgaacgacgttagagaggcacgccaggaggagatcaagatggagggggtagagcctaacagcctgtggagccttatccagtacgcctacacagggcgtcttgagctcaaagaggataacatagaatgtttgctgagcacagcctgtcttttacagctgagtcaggtagtggaggcctgttgcaagttcctgatgaaacagctgcacccttccaattgtctggggattcgctctttcgccgacgcccaaggctgcacagacctgcacaaagtagctcataactataccatggagcattttatggaagtcatccggaatcaggaatttgtactgctgcccgctagtgagatcgccaaactgttagcgtcagacgatatgaacattccaaatgaagaaacaattctcaacgctttgctgacatgggtgcggcacgatctcgagcagcggaggaaggatctatccaaacttctggcttacattcgactgcccctgctggcccctcagttcttggcagatatggagaacaacgtgctctttcgggacgacattgagtgtcaaaaacttattatggaggccatgaagtatcatctgctccctgagcgtcgtcctatgctccagagtccgcgaacaaagcctaggaagagcaccgtcgggacgctctttgccgtaggaggaatggacagcacaaaaggcgctacaagcattgaaaagtacgacctcagaaccaacatgtggacccctgtcgcgaacatgaatggacgtaggctacagtttggcgtggctgtgcttgacgataaactgtatgtcgtgggcggtcgcgacgggctaaaaaccctgaataccgtcgagtgctacaatcctaagaccaaaacatggtctgtcatgcctccaatgtctacgcaccggcatgggcttggtgtagctgttttggaaggccctatgtacgctgttgggggacatgacggctggtcatatctaaatactgtggaacggtgggatccccaagccagacagtggaactttgtggctacaatgtctacacccagatccaccgtcggtgtcgcggtgctatccggcaagttgtacgcagtaggcggacgcgacggttcatcctgtttgaaatccgtggagtgcttcgatccacatactaacaagtggactctctgcgcccagatgtccaagcggaggggcggagttggtgtgacaacctggaatgggctcttgtatgccatcgggggacacgatgcccctgcgtccaatctgacaagccgactaagcgactgtgtcgagcgctacgaccccaagaccgacatgtggactgccgtggcctcgatgagtatcagtcgggatgccgtgggagtttgtctactgggtgataagttgtatgccgtgggtggatacgacggccaagcttacttaaatactgtggaggcttacgatccccagaccaatgaatggacccaagtcgcacccctgtgtctggggcgagccggagcttgcgtggtaacagtgaagctttag

SEQ ID NO: 227619 - DNA, 1050 bp, synthetic construct
  misc_feature 1..1050: note = Description of Artificial Sequence: Synthetic coding sequence
  source 1..1050: mol_type = other DNA
aaaaagcatccaagtaccgtgatggtgcctcagttcctggcagatatggagaataatgttctgttcagggatgacattgagtgtcagaagttaattatggaggctatgaagtatcacctgctccccgagaggaggccaatgctccagagtccccgaacgaaaccacgcaagagcaccgtcggtactttgtttgcagtgggcggaatggactcaaccaaaggcgcaacctctattgaaaaatatgatctgagaacaaacatgtggacacccgtggcgaatatgaatgggaggaggttgcagtttggtgttgccgtgcttgacgacaagttgtacgtggttgggggacgagacggactgaagaccctcaacactgttgagtgctacaatcctaaaaccaaaacatggtccgtaatgccgccaatgagcacgcacagacacgggctgggggtggctgtactggagggaccaatgtatgccgttgggggtcacgatgggtggtcgtaccttaataccgtggaaaggtgggaccctcaggcccgtcagtggaattttgtggcaaccatgtcaactcctagatcgacagtcggggtggccgtcctatctggtaagctttacgccgttggtggtcgcgacggcagcagctgtctaaaaagtgtagaatgtttcgacccacacacaaacaaatggactctctgcgcccaaatgtccaaacgacgagggggagtgggagttactacatggaatggccttctctacgctatcggtggtcatgacgctccagcatctaatctcacctcgagactcagcgattgtgtggaacgctacgatccaaaaaccgacatgtggactgcagtggcctcgatgagcatcagcagagacgccgtcggagtgtgtctgttgggcgacaagctctacgctgtaggcggatacgatggacaggcctatttaaacaccgtggaggcgtatgatccacagaccaacgagtggacgcaggtggcgcctctgtgtctgggccgagccggtgcatgcgtggtcaccgtaaaattgtag

SEQ ID NO: 227620 - DNA, 2130 bp, synthetic construct
  misc_feature 1..2130: note = Description of Artificial Sequence: Synthetic coding sequence
  source 1..2130: mol_type = other DNA
atgtccggctcgcggaaagaatttgacgttaaacagatactcaaaattagatggcgttggttcgggcaccaggcgagtagtccaaactcgactgtggacagccagcaaggcgagttttggaaccgcggtcagacaggcgcaaacgggggaagaaaatttctggatccgtgctccctgcagcttcccttggcaagtatcggttaccgcagaagttcacagctagattttcagaactctcccagttggccgatggccagcactagtgaggtgcccgcattcgaatttactgcagaggattgtggcggagctcactggcttgaccgcccagaagtcgacgatggaacatctgaggaggaaaacgagtcagattcaagctcatgccgcacatccaacagtagccaaacactgagctcctgccacacgatggaaccatgtacctctgacgagttttttcaggcactgaatcatgctgaacagacattcaaaaagatggaaaactacctcagacataagcagctgtgcgatgtcattctcgtggcgggagacaggaggatccccgcacacagattggtgctgagcagcgtgtccgactactttgctgccatgttcacaaatgatgtcagagaggccaggcaggaggaaatcaagatggagggcgttgagcccaacagtctgtggagcttgatccagtacgcgtatacagggagactggagctgaaggaagataatattgaatgtctgctcagtaccgcttgtctattgcagctttctcaggtggtagaagcttgttgtaagtttctgatgaaacagcttcatcccagcaactgcttaggcattagatcctttgccgacgcccagggctgtaccgacttacacaaggtcgcccacaactatacgatggaacacttcatggaggttatcaggaatcaggaattcgtcttgctccccgcttctgagatagcaaaactgctcgcgtctgacgacatgaatattcctaatgaggaaacaatcctgaacgccctgctgacatgggtacgccacgatctggagcagagacggaaagatctatctaaactgttggcctatattagattgccattacttgctccgcaattcctggcggatatggaaaacaatgtgctgtttagggatgacatcgagtgccagaaactgatcatggaggcgatgaaataccatctcttgccagagcgcagacccatgcttcagtcgcctaggaccaagccccgaaaatctaccgtgggtacactgttcgcagttggtggtatggactcaaccaagggagctacttcaattgaaaaatatgatctccggactaatatgtggaccccagtggccaacatgaatggaaggcggctgcagtttggggtggctgtgctggatgacaagctgtatgtcgttggcggtcgtgatgggctgaagacgctgaacacagtcgagtgctacaacccgaaaactaagacgtggagtgtaatgccacctatgagtacgcataggcacggcctgggggtggccgttctcgaaggccctatgtatgctgttggagggcacgatggctggtcttacttgaacactgtcgagcggtgggacccccaagccagacagtggaattttgtggctaccatgagcacccctagatcaaccgtgggggtggcggtgctgagcggcaaactgtacgctgtcgggggacgggatggaagctcctgtctgaagtcagtagaatgctttgatcctcacacaaacaaatggacattgtgtgctcagatgtcgaaaagaaggggcggtgttggggttaccacctggaacggcctgctctacgccatcggcggacacgatgcaccagcatcaaacttaacttccagactctccgattgcgttgagcgttatgaccctaaaaccgacatgtggactgcggtcgcttcaatgtccatcagccgagacgccgtgggggtctgcttgctgggtgataaactgtacgcggtcggtgggtatgatgggcaagcttacttgaacactgtggaggcatacgatccgcaaaccaatgagtggacacaggtagcccctctctgtctggggagagcgggagcgtgtgttgtcactgtcaagctgtag

SEQ ID NO: 227621 - DNA, 2085 bp, synthetic construct
  misc_feature 1..2085: note = Description of Artificial Sequence: Synthetic coding sequence
  source 1..2085: mol_type = other DNA
atgaatgtgatatatttccctcttcacattttcgttgtctactccagagcttatacctccctggttttggtcggctgcaccaatctctgtgccgtgctgtttgcaagatgcttggatgatcacctcgtgtcattgcggatgtccggctcgcgcaaagaatttgatgtcaagcagatactcaagattagatggaggtggttcggacaccaagcttcgtccccaaattctacagtcgatagtcaacagggcgaattctggaacaggggccagaccggggctaatggcggaagaaagttcctggacccatgcagcctgcagcttcctctcgcttcaattggttaccggaggtcatctcaacttgatttccagaatagcccctcctggcccatggcctctacctcagaggttccagccttcgagtttaccgctgaggactgtggtggcgctcactggctcgataggcctgaggtggacgatggcacatcagaggaggagaatgaaagcgacagcagcagttgcaggctggtgctttcgtcagtcagcgactacttcgccgcaatgttcaccaatgatgtgcgggaggcccgacaggaagaaattaagatggaaggagttgagccaaactccctgtggagccttatccagtacgcatatactgggaggctggagcttaaagaggataacattgaatgcttgttgtctaccgcttgtctccttcaattgtcccaagtggtcgaggcctgttgcaagtttctaatgaagcagctgcacccaagcaactgcttgggcataaggagcttcgctgatgcgcagggttgcacggatctacataaggttgcacataattacactatggagcacttcatggaagtgattaggaaccaagagttcgtactgctgcccgcatccgagattgcaaagcttctggcaagtgacgatatgaatatacctaatgaggaaaccatattaaatgccctcctcacctgggtccgtcacgatctcgagcagcggaggaaggacttgagcaaacttttggcctacatccggctgcctctccttgcaccgcagttcctagccgatatggaaaataatgttctgttccgtgacgacattgaatgtcagaaattaatcatggaagctatgaaatatcatctgctccccgaacgccgtcctatgctgcagtcaccaaggactaaacctcgcaagagcaccgtggggaccctgtttgcggtggggggaatggacagcaccaaaggagccactagcatagagaagtatgatctgagaacaaatatgtggacacccgtggcaaatatgaacggccgacgcctgcagtttggcgtcgcagtcttagatgacaagctgtatgtcgtcgggggaagagatggactgaagacactaaataccgtcgagtgctacaacccaaagaccaagacctggtcggtgatgcctcccatgagcacacatcgccacgggctgggtgtcgccgtcctggagggccctatgtatgctgtgggaggccacgacgggtggagctatctgaataccgtagagagatgggatccccaggctagacaatggaactttgtcgctactatgagcaccccgagatccactgtcggcgtggcggtgctaagcggcaagttgtatgccgtaggcggtagagacgggtcttcttgtctgaagtcagtagagtgttttgatcctcacacgaacaagtggaccctctgtgcgcagatgagcaaacggcgtgggggagtgggtgttactacatggaacggattattatacgctatcggagggcacgacgcccctgcaagtaacttgacctctcgactctctgattgtgtcgagaggtacgatcctaagacagacatgtggacagcagtcgcttcaatgtctataagccgcgatgctgtcggcgtttgtctgctgggagataagctatacgcggtaggaggctacgatgggcaggcttacctgaacactgtggaggcgtatgatccgcagacaaacgagtggacacaggtagccccactgtgtctggggagagcaggcgcatgtgtcgtgaccgtaaaactgtag

SEQ ID NO: 227622 - DNA, 1707 bp, synthetic construct
  misc_feature 1..1707: note = Description of Artificial Sequence: Synthetic coding sequence
  source 1..1707: mol_type = other DNA
atggagccctgtacaagtgacgagtttttccaggctttgaatcatgcagagcagacattcaagaagatggagaactatctacggcataagcagttgtgcgacgtcattctcgttgccggagaccgacgcatccccgctcacaggttggtgctctccagtgtaagcgattattttgccgcaatgtttacaaatgacgttcgagaggcacgtcaggaggaaattaaaatggagggggttgaaccgaactccctctggagcctaatccagtacgcgtacacgggcaggcttgagctcaaagaggacaatatcgaatgccttctctccactgcttgtctgctgcagctgagccaagtggttgaagcttgttgtaaattcctgatgaaacagctccacccttcaaactgcttgggcatccggtctttcgccgatgcacagggttgtaccgatcttcataaagtagctcacaactacacaatggagcatttcatggaggttatccggaaccaggagtttgttctactgccagcatcagagattgccaagctcctggccagtgatgatatgaacatacctaatgaagaaacaatcctcaacgccctactaacttgggtaagacacgacctggaacagaggaggaaagaccttagcaagctgctggcctacattagattgccactcctcgccccacagttcctggctgacatggaaaataacgtgctctttcgcgatgatatcgaatgtcaaaagttaatcatggaagccatgaagtaccacctgctgccagagcgacgccctatgttgcagtcgccacgaactaaacctaggaagtctacggtcggaaccctgtttgcagtcgggggaatggatagtaccaaaggtgccacatccattgagaaatacgaccttagaactaacatgtggacgcctgtggctaatatgaacggtagacgcctccagtttggcgtggccgttttagacgacaaactgtatgttgtgggcggaagagatggcctcaagacactgaacactgtggagtgttataatccaaagaccaaaacatggtccgtgatgcccccaatgtccactcacaggcatggactcggagtagcagtgttggaaggtccaatgtacgcggtcggaggtcatgatgggtggtcctatctgaacacggtggagcgatgggatccgcaggcgagacagtggaattttgtggccactatgagtacccctagatctacagtgggagtggccgtgttatccggaaaactctacgccgtcggaggcagagatggaagctcttgcctcaaatccgtggagtgcttcgacccccacactaacaaatggaccctgtgcgctcagatgagcaagcggcgagggggagtaggggtcactacatggaatggattattgtatgccattggaggccacgacgcaccagcttccaatctgacgtccaggttgtctgactgtgtggaacggtatgaccccaagaccgatatgtggactgccgtggcctctatgtccatctctagagacgcagtgggagtgtgtctgttaggagataagttatacgctgtgggcggatatgatggtcaggcgtacttgaacacagtcgaagcatatgacccccagaccaacgaatggacacaagtggctcctctgtgtcttggccgagccggagcttgtgtggtgaccgtgaagttgtag

SEQ ID NO: 227623 - DNA, 1866 bp, synthetic construct
  misc_feature 1..1866: note = Description of Artificial Sequence: Synthetic coding sequence
  source 1..1866: mol_type = other DNA
atgttaatggccggacagagaggcgcatggaccatgggggacgtagtagagaagtcactggagggacccctcgctccgtcaacagatgagccatcacagaaaacaggagatctggtagaaatcctcaatggagagaaggttaagtttgacgacgccggtctcagcctcatactacagaatgggctagagactctaagaatggagaacgctttgaccgatgttatcctctgtgtcgatatacaagaattctcttgccatcgcgtggtgctggccgctgcctccaattacttccgcgcaatgttttgtaatgatctgaaagaaaaatatgagaagcgaattatcattaaaggtgtggatgctgagacaatgcatacattgctcgactacacgtatacatcgaaagctctgatcactaagcagaatgtgcagcgggttctagaagccgctaatctcttccagttcctgcggatggttgatgcatgcgcgagctttctcaccgaagccctcaatcccgagaattgcgtgggcatcctgcgcctcgccgacacacactcattggattctcttaagaagcaggtgcagtcctacataattcaaaattttgtgcagattctgaactccgaagagttcctggatctgccggtcgataccttgcatcacattctgaagtctgacgacctgtatgttacggaagaggcacaggttttcgagactgtgatgagctgggtgaggcacaaaccaagcgaaaggttgtgtctgttaccatacgttctggagaatgtgcgactgcctctgttggacccctggtactttgtggagaccgtggaggccgaccctcttatccggcagtgccctgaagtattccctttgctacaggaggctcgcatgtaccatctcagcggtaacgagatcattagtgagcgcacgaaacctaggatgcacgagttccaaagtgaggtttttatgatcattggtggatgtactaaagacgagaggtttgtggcagaagtgacttgcctggacccactcaggagatctagactggaggttgcgaaactccctttgaccgagcatgagctggaatccgagaacaagaagtgggtggagttcgcctgcgtgactctcaaaaacgaggtctacatatctggaggaaaagagacccagcacgatgtgtggaagtataattccagcataaacaaatggatccaaatcgagtacctgaacattggcaggtggcgacataagatggttgtattgggcggaaaggtctacgtgatagggggattcgacgggctgcagcgcattaacaatgttgagacttacgacccatttcacaattgctggtctgaagcggctcctcttctggtccacgtgtcctccttcgccgctactagccataagaaaaagctgtatgtgatcggcggaggtcctaatggaaagctggccacagataaaacccaatgctatgacccctctacaaataaatggagtctcaaagcagccatgcctgtagaggccaaatgcatcaacgcagtttcatttcgcgataggatttatgtcgtcggaggagctatgcgggcactctacgcctatagccccttagaggactcttggtgtctggtcacacagctgtctcacgaacgggcatcctgcggaatcgctccttgtaataataggttgtacatcaccggcggacgggatgagaagaacgaggtgattgccacggtactttgttgggatcctgaagcccaaaagctaaccgaggaatgcgttctcccccgaggggttagccaccacggttctgtgactattcgtaaatcttatactcacattcggcgtatcgttccgggagcagtttctgtatag

SEQ ID NO: 227624 - DNA, 1695 bp, synthetic construct
  misc_feature 1..1695: note = Description of Artificial Sequence: Synthetic coding sequence
  source 1..1695: mol_type = other DNA
atgctcggaggcacagattgtcggacattcctaacttcccatatcaacctgaaaaaaaccctttgtgacgtgatcctgatggtccaggaaaggaagatccccgctcacagagtcgttttggcagcagcatcgcatttttttaacttaatgtttaccacaaacatgctggagtctaagtccttcgaagtggagctgaaagacgctgaacccgacattatagagcagctggtggaatttgcctacaccgcccgaatttccgtgaactctaataacgtgcagagtctactggatgctgcaaaccagtaccaaatagagccggtgaaaaaaatgtgcgtcgacttcttgaaggagcaggttgacgcttcaaattgcctcggtatctccgtgctcgccgagtgtttagactgtcctgaactgaaggctacagcagacgactttattcaccagcacttcacagaggtgtacaagacagatgaatttctgcagttagacgtgaagagggtcacccacctactaaaccaggacacccttacggtccgcgctgaggaccaggtgtacgacgccgcagtccgctggttaaagtatgacgagcctaatcgccagccattcatggtggacatcttggcaaaagtgaggtttccactgatcagtaagaatttcctaagtaaaactgtacaggccgagccccttatccaggataacccagagtgcctaaagatggtgatctcagggatgaggtaccacctgctctctccagaagaccgagaagaacttgtcgacggaacccggccacggaggaaaaaacacgattacaggatcgccctgtttgggggatcgcagccacagtcctgccgatactttaatccaaaagattactcctggaccgatatccgctgccccttcgagaagcggagggatgcagcatgcgtgttttgggacaatgtggtatatatcctcggaggatcgcagctgttcccaattaaaagaatggactgctacaatgtcgtgaaagacagttggtacagtaagctgggacccccaacaccacgcgattcactggcagcttgcgccgctgaaggtaaaatctacacaagcggcggatcagaggttggtaatagcgcactgtacttattcgaatgctatgacactcggacagagtcctggcacaccaaaccaagcatgctcacacagcggtgcagccacggaatggtagaagccaatggcctgatctatgtttgcggcggttcattgggcaataatgtttccggaagagtgctgaactcgtgcgaggtgtatgaccctgccactgagacttggacagagctctgccctatgatcgaagcgcgtaagaatcacggactcgttttcgttaaagacaagatctttgcagtgggcggacagaacggcctggggggactggacaatgtggaatattacgatatcaaactcaacgagtggaagatggtttctcccatgccatggaaaggagtgaccgttaaatgcgccgctgtcggatcaatagtgtatgtgttagccggatttcagggcgtggggcgtttaggccacatccttgagtacaacacagaaacagataaatgggttgcaaacagcaaagttcgtgcattccccgtgaccagctgcctgatttgtgttgtggacacctgtggcgctaacgaggagacccttgagacctag

SEQ ID NO: 227625 - DNA, 1761 bp, synthetic construct
  misc_feature 1..1761: note = Description of Artificial Sequence: Synthetic coding sequence
  source 1..1761: mol_type = other DNA
atggcagcctctggagtagagaaatcatcaaagaaaaaaacagagaagaagttagctgcccgagaggaagcgaagctgttggcgggatttatgggcgtgatgaacaacatgagaaagcagaaaacactgtgtgatgtaattttgatggttcaggaaaggaagattccagcccatagggttgtcctcgccgctgccagtcacttctttaacctgatgttcaccaccaatatgctggaatctaagagtttcgaagttgagcttaaagatgcggaacccgacattattgaacagctggtggagttcgcttatacagccagaatcagtgtgaatagtaataacgtgcagagcctactggatgctgccaatcaataccagatcgagccagtgaagaagatgtgtgtggactttctcaaggagcaagtcgacgcctctaattgtttagggatatccgtcctggcagagtgcctcgattgtccagaactcaaagccacagccgatgactttatccaccaacactttaccgaggtctataaaaccgatgagttcctacaattagatgtgaagcgggttacccatttactgaatcaggacacactgacagtgcgtgccgaggaccaggtctacgacgcagcagtccggtggttaaagtacgacgagccgaatagacagccatttatggtggatatactagctaaggtgagattccccctcataagcaagaattttctgtccaaaacagtgcaggccgaaccgttaatccaagataaccccgagtgtctgaaaatggtgatttccgggatgaggtaccacttgctgtcccctgaagacagggaagagcttgtggatggcactagacctaggcgtaaaaaacacgattaccgtatcgcattattcggcggatcccagcctcagtcatgccggtactttaatcctaaagactatagttggacagatatacgttgtccttttgaaaagaggagagatgctgcttgcgtgttctgggacaacgtcgtgtacattctgggcggatctcagctgttccctattaaaagaatggactgctataacgttgtcaaagattcatggtattccaagctgggtcctccaaccccccgtgactctctggctgcatgtgccgcagagggtaagatctacacgtccgggggatcggaagtcggtaattcagctctgtacctgttcgaatgttatgatacacgcaccgagtcgtggcacactaaaccctccatgctcacacaacggtgcagtcacggaatggtagaggcaaatggcttgatatacgtctgtggcggtagtctcggcaataatgtatccggacgcgttcttaatagttgcgaggtctacgatccagcaaccgaaacctggactgaactgtgcccgatgatagaggcacggaagaaccacggtttggtcttcgtgaaggacaagatcttcgcagtgggtggccagaacggtctaggcggactcgacaacgtggaatactacgacataaagctgaacgagtggaaaatggtgagtcctatgccgtggaaaggtgtgaccgtgaagtgcgcggcagtggggagcatcgtgtacgtgctcgccggttttcagggggtcggccgattgggacacatcctggaatacaatacagagacagataaatgggttgcgaatagtaaagtgcgagccttccccgtgacttcttgtctaatatgcgtggtagacacgtgtggcgcaaatgaggagactttggagacctag

SEQ ID NO: 227626 - DNA, 1617 bp, synthetic construct
  misc_feature 1..1617: note = Description of Artificial Sequence: Synthetic coding sequence
  source 1..1617: mol_type = other DNA
atggtccaggagcgcaaaatacccgctcacagggtggtgctggctgcagcatctcatttttttaatctgatgtttactacaaatatgctcgaatccaaaagcttcgaggtggagctcaaagacgcagaacccgatattattgaacagcttgttgaatttgcatataccgcaagaataagcgtgaacagcaacaacgttcagtccttgctcgacgccgctaatcagtatcagatagaacctgtaaagaagatgtgcgtggactttctaaaggaacaggtcgatgcgtcaaactgtctaggcattagcgtgctggctgagtgtttggactgtcctgagctcaaagccactgctgacgattttatccaccagcattttaccgaggtgtataagacggacgagtttctgcagctagacgtgaagcgggtcacccacctgctaaaccaggatactctcacagtcagggccgaagatcaggtgtacgacgctgctgtgcgctggctcaagtatgacgaaccaaatcgccagccattcatggtggacatcctggctaaggtgcgattccccctgatctccaaaaatttcctgtcaaagaccgtccaggcagagccgctgattcaagacaaccccgagtgccttaaaatggtcatatccggaatgcgctatcacctgttgtcccccgaggaccgggaagaactggtagacggtactcgtcctcgacgaaaaaagcacgactacaggattgcactgtttggtgggagccaacctcagagctgccggtattttaatcccaaagattactcatggaccgacatcaggtgccctttcgaaaagagaagggacgccgcatgcgtgttctgggataatgtagtgtatattctgggtggctctcagttgtttcctattaagcgtatggactgctacaacgttgtaaaggactcctggtattccaagctcggccctcctactccccgtgactctctcgccgcatgtgctgccgaaggcaagatctacacctctggcggtagcgaagttgggaatagcgcactctatctcttcgagtgctatgatacacggactgaaagctggcacaccaagccatcaatgctcacccagaggtgctctcatggtatggtcgaagccaatggattgatttacgtttgcggaggctcactggggaataacgtgtccgggcgtgttctgaactcttgcgaagtgtacgacccagccaccgaaacttggaccgaactgtgtccgatgattgaggctcgcaagaatcatgggcttgtgtttgtgaaggataaaatcttcgctgtgggcggacaaaatggcctgggtggattggacaatgttgaatactacgacattaagctaaacgagtggaagatggtgagtccgatgccatggaaaggcgtaactgttaagtgcgcagctgtcggtagtatcgtttacgtgctggctggctttcagggcgttggtcggctcggccacattttggagtataacacagagaccgacaaatgggtcgccaactccaaggtcagagcctttcctgtcacctcatgtcttatttgtgtggtcgacacatgtggcgctaacgaggagacactagaaacatag

SEQ ID NO: 227627 - DNA, 1161 bp, synthetic construct
  misc_feature 1..1161: note = Description of Artificial Sequence: Synthetic coding sequence
  source 1..1161: mol_type = other DNA
atggccgcatctggggtggagaaatcctctaagaagaagacagagaaaaagctcgccgctcgtgaagaagctaagctgcttgccggatttatgggggttatgaacaacatgcgaaaacagaaaactttatgcgacgttatactcatggtacaggaacggaaaatcccagctcacagagtggttctagccgctgcatcacattttttcaacttgatgttcacgacaaatatgttggaaagtaagtcgtttgaggtcgagctgaaggacgctgaacctgacatcatagagcagctgcttcactacaaatttttcaaaatgaaaaacagaaaggatggcagggtgtccgtctcctacgccatcctgatccaggggctcaaaatctacgaaatttatagcacgaattttccagaacactttacggaagtttataaaaccgatgaatttttacagttggatgtgaaacgggtcacccacctcctcaatcaggacacgttaacagtaagggcagaggaccaggtgtacgacgccgctgtgaggtggctcaagtatgacgaacctaaccggcagcctttcatggtcgacattctggcaaaggtgagatttccactgatcagcaagaactttctgagcaaaacagtgcaggcggagccacttattcaggacaaccctgaatgtttgaagatggtgatatctggcatgaggtatcatctgctgagcccagaggatcgggaggaactggtcgatgggacgaggccacggagaaagaagcatgactatcgaatcgctctcttcgggggatcccagccccaatcatgccgctacttcaatccaaaagactactcttggaccgatatacgctgtcccttcgagaagaggcgggacgccgcttgtgtgttttgggacaacgtggtgtatattctggggggaagccagctgtttcctatcaagcgtatggactgctacaacgtcgtcaaagatagctggtactctaaattaggacccccaacgcctcgagattcactggcagcctgtgccgcagagggcaagatctatacctccggcggttccgaagtggggaactctgctttgtatctgttctgcctgatccctgtgaagttcatgatcctgccacagaaacatggcttatcatgtgtgcagtag

SEQ ID NO: 227628 - DNA, 1284 bp, synthetic construct
  misc_feature 1..1284: note = Description of Artificial Sequence: Synthetic coding sequence
  source 1..1284: mol_type = other DNA
atggccgcatctggagtggagaagagttcgaaaaaaaaaactgagaagaaactggctgccagggaagaggccaaactactggctggatttatgggcgtgatgaacaacatgcggaagcaaaagacgctttgtgatgttattctcatggttcaggaacggaagatcccagctcatcgagtggtgcttgccgctgcatctcactttttcaacctcatgtttactacaaatatgcttgagtctaagaatttcttaagcaaaaccgtacaagccgaacctctgattcaggataacccagaatgcctaaagatggtgataagtggcatgcgataccatctgctcagccctgaagacagggaagaattggtcgacggcaccaggcctagacgtaagaagcacgattacaggatagccctgttcggcggaagtcagcctcaaagttgtcggtacttcaaccccaaagattattcatggaccgacattcgttgcccattcgagaagcggagggacgccgcttgcgtcttctgggacaatgtcgtctacattctgggtggcagccagctgttccctattaaacgcatggactgctacaatgtcgtaaaagactcatggtattcaaagttgggacctcccacgcccagagactcactcgctgcatgtgccgctgagggcaaaatctataccagcggcggttccgaggtgggaaattccgcactatatctgttcgaatgctacgatacccggacggaatcatggcatacgaagccctctatgctaactcaaaggtgctcacacggaatggtcgaggcgaacggcctcatttatgtgtgtggcggtagcctgggaaataatgtgagcggcagagtactcaatagctgtgaggtatacgacccggctaccgaaacctggacagaactttgccctatgatcgaggccagaaaaaaccacggcctcgtcttcgtgaaggataagatctttgccgtggggggtcagaacggcttggggggtttggacaacgtggagtactatgacatcaagctgaatgagtggaaaatggtaagtcctatgccgtggaagggggtgaccgttaagtgtgccgctgtaggctctatcgtgtacgtcctcgctggttttcaaggggtcggccgactgggacacattttggaatacaacacagaaactgataaatgggtggcaaattcaaaggtgagagcgtttcctgtgacctcctgtctgatttgcgttgttgatacctgcggcgctaatgaggagactctggaaacatag

SEQ ID NO: 227629 - DNA, 1533 bp, synthetic construct
  misc_feature 1..1533: note = Description of Artificial Sequence: Synthetic coding sequence
  source 1..1533: mol_type = other DNA
atgctcgaaagtaagagtttcgaggtcgagctcaaggacgcagagccagacatcatcgagcaacttgtggagttcgcctacaccgctcggatttcggtcaattctaataacgtacagagcctgctggatgccgctaaccaataccaaattgagccagtcaagaagatgtgtgttgactttctgaaagaacaggtcgacgcctctaattgtctgggcatatcggtactggctgagtgtttagactgccccgagctgaaagcaacagctgacgactttatccatcagcattttactgaggtctataagaccgatgaatttctgcagctcgatgttaagcgtgtcactcacctgcttaatcaggataccctgacggtcagagccgaggaccaggtttacgatgctgccgtacgatggttgaagtatgacgaacccaatcgccagccattcatggtggacattcttgccaaggtgcggttcccccttatctcaaagaacttcctgtcaaagacagtgcaagcagaacccctcatccaggataacccagagtgtttaaaaatggtcattagcgggatgcgataccatcttcttagccctgaagaccgtgaggagctcgtcgacggtaccaggccacgcagaaagaagcatgactatagaatcgctctgttcggaggctcgcagccgcagagctgtcgctatttcaacccaaaagactactcatggacagatatcagatgtcccttcgagaagaggcgagatgccgcttgcgtgttttgggataacgtggtgtacatcctgggtggtagccagctgtttcccatcaagcgtatggactgctacaacgtcgtgaaagattcctggtattcgaagttgggcccaccaacccctcgggattccttggcggcttgtgcggcagagggtaagatttacactagcgggggtagcgaggtgggaaactctgccttatatttgttcgaatgttacgacactaggacagaaagttggcacaccaaacctagcatgttaacccagcgatgctctcacgggatggtcgaggcgaatgggctgatttacgtctgcggcggatctctgggaaacaacgtttctggtagagtgttgaatagttgtgaggtttatgaccctgccaccgaaacgtggactgaactgtgcccaatgatcgaggctcgaaagaaccacgggctggtgtttgtgaaagacaaaatctttgccgtcggagggcaaaacggcttagggggattggataacgtagagtactacgatatcaagctcaacgagtggaagatggtgtcacctatgccttggaaaggagttaccgtgaaatgcgccgctgtgggatctattgtgtacgtgctcgcgggttttcagggtgtcggcaggttagggcacatcttggaatacaacacagaaaccgataagtgggttgctaactctaaggttagggcctttcctgtcacaagctgcctcatctgtgtagtggatacatgtggcgcaaatgaggagaccctcgaaacgtag

SEQ ID NO: 227630 - DNA, 1086 bp, synthetic construct
  misc_feature 1..1086: note = Description of Artificial Sequence: Synthetic coding sequence
  source 1..1086: mol_type = other DNA
atggttgacattctggccaaagtgcgctttccactcatttctaaaaacttcctgagcaaaacagtgcaagccgagccgttaatacaagacaatcccgaatgcctgaaaatggtgatctctgggatgagatatcatctcctgagcccagaggacagagaggagctggtggacggcacccgtccccgacgcaagaaacatgactatcgcattgccctgttcggtggaagccagccgcagtcgtgtaggtactttaatcctaaggactatagctggaccgatatccggtgcccattcgaaaagaggcgagatgcggcttgtgtgttctgggacaacgtggtttacatcctggggggaagtcagctttttcccatcaagcggatggattgttacaacgtggtcaaggactcctggtattcaaagctgggtcctccgacccccagggactcgctggcggcttgtgctgccgaaggtaaaatatacacctctggcggaagtgaggtaggaaactctgccctctatctgtttgaatgttatgatacaagaaccgaatcttggcacacaaaaccttctatgctgacacagcgctgctcccatggaatggtggaggccaatggcctgatttacgtttgcggaggtagcctcggtaataacgtgagtggacgcgttctgaattcatgcgaggtgtatgatcccgctacagagacgtggacagagttatgtccaatgatagaggccagaaagaaccacggactagtgttcgtgaaggacaagatctttgctgttgggggacagaatggcctcggaggcctggataacgtcgagtattacgatatcaaattgaatgagtggaagatggtgagtcccatgccgtggaagggtgtgaccgtcaagtgcgcagctgttgggagtatcgtttacgtgttggctggcttccagggagtcggccgtctcggacacatccttgaatataatacagagactgataagtgggtggctaacagtaaagttagagccttcccggttacttcctgcctcatctgcgtggttgacacctgcggcgctaacgaagaaacactggagacgtag

SEQ ID NO: 227631 - DNA, 1695 bp, synthetic construct
  misc_feature 1..1695: note = Description of Artificial Sequence: Synthetic coding sequence
  source 1..1695: mol_type = other DNA
atgctcggtggtactgattgtcggacttttctgacgagccacataaatctcaaaaaaactctgtgtgatgttatactgatggttcaggagcgcaagatccctgcccatcgtgtggttctggctgccgcatcccacttctttaatttaatgtttaccacgaacatgctagaatccaagagctttgaagtggagttgaaggacgctgaacctgacatcattgagcaactggtggaattcgcgtatacagcgaggatttcggtcaactcgaataatgtgcagagcctactggacgcggctaaccaataccagatcgaacccgtgaagaagatgtgcgtcgatttcctgaaggagcaggttgatgcgagcaactgcctcggaatctctgtactggcagaatgtctcgactgtcctgaactgaaggccaccgcagatgactttattcaccagcatttcaccgaggtctacaagactgatgaatttttacagctggacgtaaaacgcgtgacacaccttttgaatcaggacaccctgacagtcagagcagaagatcaagtctatgacgccgctgtgagatggctgaagtacgatgagccaaataggcagccgtttatggtggatatactggccaaggttagattccctctaattagcaagaattttctgtctaagaccgtgcaggccgagcctctcatccaggacaatccagaatgcttaaagatggtcatctccggcatgcggtaccacttgctgtctcctgaggatagggaagaactggttgatggtacgaggcccagaaggaagaagcatgattacaggatcgcgctgttcggaggcagccagccccagtcatgtaggtacttcaatcccaaagactacagctggacagatatcagatgtcccttcgagaagcgcagggatgccgcttgcgtgttctgggataacgtggtctacatactagggggaagtcagttattccccatcaagcgaatggactgttataacgtggttaaggactcatggtacagcaagctgggacccccaactccaagagattcgttagcagcatgcgcggcagagggaaaaatttatacgagcgggggaagcgaggtgggtaattccgccctatacctgtttgagtgctacgataccagaactgagtcttggcatacaaagcccagtatgcttacccagcgatgttcccatggaatggtcgaagccaatggcctcatttacgtgtgcggtggcagtcttggaaacaacgtgagcgggagggttttgaattcctgcgaggtgtacgacccggctaccgagacctggacggagttatgtccgatgattgaggctcgaaaaaaccatggcctcgtgtttgtaaaagacaagatctttgctgtgggcggacaaaatggacttggaggcctggataatgtggagtactacgatatcaaactgaacgaatggaaaatggtaagccccatgccatggaagggtgtgacagtaaaatgtgctgcggttggctcaatcgtctacgtgttggcaggatttcagggggtcggacgcctgggacacatcctcgaatataatactgagacagataagtgggtggcgaactctaaagtgcgcgcttttccagtgacctcatgtctgatctgtgtggtggatacctgtggcgctaatgaagaaaccctagaaacatag

SEQ ID NO: 227632 - DNA, 432 bp, synthetic construct
  misc_feature 1..432: note = Description of Artificial Sequence: Synthetic coding sequence
  source 1..432: mol_type = other DNA
atgctggggggaacagactgtaggacatttcttacctcccatattaacctgaagaaaactctgtgtgatgtaatcctgatggttcaggaacggaagatccctgcccatcgcgttgtgctggccgctgcaagtcacttttttaacctcatgtttaccaccaacatgcttgaaagcaagtctttcgaggtcgagctcaaagatgctgagcccgacatcattgaacaactcgtggagttcgcatacacggcccgtatttcagtgaatagcaataacgtgcagtctctcctcgacgccgctaatcaataccagatagagccggtgaaaaaaatgtgtgtagactttctgaaggaacaggtggatgccagcaattgcttaggcaagaagtaccaaattccagtggtttgtctcttctgcttcattctctacttctag

SEQ ID NO: 227633 - DNA, 501 bp, synthetic construct
  misc_feature 1..501: note = Description of Artificial Sequence: Synthetic coding sequence
  source 1..501: mol_type = other DNA
atggccgcatctggagtggagaagagctccaaaaagaagaccgagaagaagctcgccgctcgtgaggaggccaaactcctcgccggattcatgggtgttatgaacaatatgcgaaagcagaagaccctgtgtgatgttattctgatggttcaggagaggaagatccctgcgcatcgtgtggtcctggccgctgcatctcactttttcaatctgatgttcacaacaaacatgttggagtccaaatcattcgaggtcgagctgaaggacgcagaacctgatataatagaacagttggttgagtttgcatataccgctagaatctcagtaaattctaataacgttcagagcttgctggatgctgccaaccagtatcagattgaacctgtcaagaagatgtgtgtggacttcttgaaagaacaggtagacgcctccaattgcctcggtgaggccgaaaaggtggatcagtctctgcctgaatgcggtatgctgtttacggtgtag

SEQ ID NO: 227634 - DNA, 1863 bp, synthetic construct
  misc_feature 1..1863: note = Description of Artificial Sequence: Synthetic coding sequence
  source 1..1863: mol_type = other DNA
atggcgtccgactctatgtcctcgaagcaggctcgcaatcacattacaaagggaaaaaggcagcagcaacaccagcagatcaagaacagaagctccataagcgacggcgatggcgaagactctttcattttcgaagctaatgaagcctggaaagattttcatggctctctgctgaggttttacgagaacggagaactctgcgacgtgacattaaaggttggcagtaagttaatctcttgccacaaactggtgctggcttgcgtgatcccatatttccgggcaatgttcctgagcgaaatggcagaggctaaacagactctgatcgagatccgcgatttcgatggtgacgcaatagaggacctggtgaaattcgtgtatagttcccgcctcacactgaccgtggataacgtgcaaccactgctttacgccgcttgtatcttgcaggtggagctcgtcgcacgcgcttgctgtgagtacatgaagctacacttccacccttccaactgcctggccgtcagggcctttgccgagtctcataatagaatagacctaatggacatggctgaccagtacgcatgtgaccactttaccgaggtggttgaatgcgaggactttgtatccgtgtcaccccaacacctgcataagctcttgtccagttctgacctcaacatagagaacgaaaagcaggtgtacaatgcagctattaagtggctcctggccaatccccaacatcactctaagtggctggatgagacactggcgcaggtgaggttgccactcttgcctgtagatttcctgatgggtgtggtggccaaagaacagatagtgaaacagaacctcaagtgcagagacttgctggatgaagccagaaattaccacctgcatctgtcatcccgcgcagtgccggattttgagtactccatacgcaccactccacgtaaacacactgccggagtgctattttgcgtgggcggtagagggggaagcggcgacccgtttaggagtattgagtgctattcaatcaataaaaactcttggttcttcggtccggaaatgaactctaggaggaggcacgtgggagtcatttcggttgaggggaaggtttatgccgtcggtggccatgacggcaatgagcacttaggctccatggagatgttcgatcctctaacaaacaagtggatgatgaaagcctctatgaacactaagaggcgaggcatagccctcgcctctctcggtgggccaatatatgcaattggtggcctggacgataatacttgctttaacgacgttgaacggtatgacattgaaagcgatcagtggtcaactgtggctcccatgaacacgccaaggggtggggtggggtccgtcgccctcgtcaatcacgtgtacgccgtgggagggaatgacggcatggcatccctgtcctcagtcgagcgctacgacccacatctcgataagtggattgaggtaaaggaaatgggacagaggcgggctggcaacggcgtgagtaagcttcatgggtgcctctacgttgtcggaggcttcgatgacaattctcctctgtcatctgtggaaagatacgaccccaggagtaacaaatgggactatgtcgccgcactgaccacccctcgcggaggagtgggcattgcaaccgtgatgggtaaaatcttcgcggtcggtggccacaacggtaacgcgtacctgaataccgtggaagctttcgatccagttctgaatcgctgggaactggtgggaagcgtgagccattgtagggccggtgcgggagtagccgtatgttcctgcctaacttcacagattagggatgtcggtcacggttccaacaacgtggtggactgtatgtag

SEQ ID NO: 227635 - DNA, 1863 bp, synthetic construct
  misc_feature 1..1863: note = Description of Artificial Sequence: Synthetic coding sequence
  source 1..1863: mol_type = other DNA
atggcttcagattccatgagctccaagcaagctcgcaaccacatcacaaaaggaaaacgacaacagcagcaccagcagatcaagaacagatcatccatcagcgacggcgacggggaggacagctttatctttgaggccaatgaggcttggaaggactttcacgggtctctgctacgcttctacgagaacggcgagctgtgtgacgtgacactgaaggtcggatccaaactgatttcatgccacaaactcgtgctagcctgcgtgatcccgtatttcagagcaatgttcttatccgaaatggccgaggctaagcagaccctcatagaaatccgggattttgacggggatgcgattgaggacctggttaagttcgtgtacagtagccggctcacattaactgtggacaacgtccagccactcctctacgccgcatgcatcctgcaggtggaattagtggccagagcatgttgcgaatacatgaaacttcatttccatccatccaactgtttagcagtgagggcgtttgcggagtctcataatagaattgatctcatggatatggcagatcagtatgcctgcgaccattttactgaagtggtggaatgcgaagatttcgtgagtgtgagtccccagcacctgcataaactgctgtcaagtagtgacttgaacattgagaatgaaaagcaagtctacaatgcagcaattaaatggcttctggccaacccccaacaccactccaagtggctggatgagaccttggctcaggtgagattaccactgttacctgtggatttcctcatgggagtggtggctaaagaacagattgtcaaacagaaccttaaatgtagggatcttctggatgaggcaagaaactaccatcttcatctttcctctcgggctgtcccagacttcgagtattcaatccgcacaactccgcgaaagcacacagccggagtgcttttttgcgtgggagggaggggagggtcgggagatcctttcagatccattgagtgctacagcatcaacaaaaatagttggttcttcggacctgaaatgaattctcggaggcgtcacgtaggggtgatctctgtcgagggcaaggtgtacgccgtcggcggacatgacggcaacgagcacctcggaagcatggagatgttcgacccattgacgaataagtggatgatgaaggcttccatgaatactaagcgacggggaattgctctagcctcacttgggggtcctatctacgcaatcggtggcctcgatgacaatacttgtttcaacgatgtagagagatatgacatcgaaagcgaccaatggtctacggtagctcctatgaacacaccgcgtggaggtgtgggctcggtagccttagtgaatcatgtgtacgccgtgggcggaaacgacggaatggccagcttatcatccgtggaacgctacgacccgcatctggataagtggatagaggtgaaggagatggggcagcgtcgcgcaggtaatggagtctctaagctacacgggtgtctctacgtagtcggcggttttgatgataatagccccctcagttctgttgagaggtacgaccccagaagcaacaagtgggactacgttgcagctctgacaacaccaaggggcggtgtgggtatcgctacagtcatgggaaaaatctttgctgtgggagggcacaatggcaatgcttatctgaatacagtggaggcgttcgacccagtgctgaacaggtgggaactagtagggagcgtctcacactgccgtgccggagcgggtgtcgcggtgtgtagttgcctaacctcccagatcagagacgtcggacacggctcaaacaatgtagtcgattgcatgtag

SEQ ID NO: 227636 - DNA, 810 bp, synthetic construct
  misc_feature 1..810: note = Description of Artificial Sequence: Synthetic coding sequence
  source 1..810: mol_type = other DNA
atgaattcccgtcgaaggcacgttggtgtcattagcgtggaaggcaaagtttacgcggtaggcggacacgatggtaatgagcacctaggctcaatggagatgttcgaccccctgacgaataaatggatgatgaaggcctccatgaacaccaaacggaggggtattgcgttggcatcactcggcggtccaatctacgccatcgggggactggacgataacacgtgttttaacgatgtagagcggtacgatattgagtccgaccaatggagtacggtggccccaatgaacactcctcggggaggcgtcgggtcagttgcgttggtaaatcacgtctatgcagtcgggggaaacgatggcatggccagtctgagttccgttgagagatacgaccctcatctcgataagtggatcgaagtcaaggaaatgggccagagaagggcgggaaatggcgtttctaagctgcacggttgtctttacgtcgtgggcggattcgacgacaactcaccactgtcctccgtcgagcgctacgaccctcgctcaaataagtgggactacgtggctgctctgaccacccccagggggggtgtgggtattgctaccgtaatgggcaaaatcttcgctgttgggggacacaatggcaacgcctaccttaacaccgtcgaggcctttgatcctgtgctgaacaggtgggagctggtcggctctgtctcccattgcagggctggcgcaggggtggcagtatgcagctgcttgacatctcagatccgcgatgtgggccacggttctaataacgtagtggattgtatgtag

SEQ ID NO: 227637 - DNA, 1875 bp, synthetic construct
  misc_feature 1..1875: note = Description of Artificial Sequence: Synthetic coding sequence
  source 1..1875: mol_type = other DNA
atgcagcctgaccctagaccatcaggcgctggcgcttgctgtcggttcctccctctccagtcacaatgccccgagggcgctggcgatgcagtgatgtatgcctccaccgaatgcaaagccgaagttacaccttcacagcacgggaaccggacattcagctacaccctcgaggaccacacaaaacaggctttcggtataatgaacgagctgcggctgagtcaacagttgtgcgacgtaaccctgcaggtaaaatatcaggacgcaccagccgcacagttcatggcccataaagtggttctagcctcttccagccccgtctttaaggctatgtttaccaatggcctgagagaacagggaatggaggtggtgtcgattgagggcatccacccaaaagtcatggaacggctcatcgagtttgcatacactgccagtataagtatgggagaaaagtgtgtgctgcacgtgatgaacggcgcagtaatgtatcagattgacagcgtagtgagagcatgcagcgactttctcgttcagcagctcgatcctagcaacgctatcgggatcgcaaacttcgccgagcagatcggatgtgtggagctgcatcaacgcgctcgcgaatacatatatatgcacttcggcgaggtagccaaacaggaggaattctttaatctgtcccactgccagctcgtaacattgatctcgcgggacgacctgaatgtcagatgcgagtcagaggttttccatgcatgtattaattgggtgaaatacgactgcgagcagagacgattttatgtgcaagcgctcctgcgagccgtgaggtgccatagcctgacacccaacttccttcaaatgcagcttcagaaatgtgaaattctccagtccgactccagatgcaaggattatctggtgaagattttcgaggagttaacacttcacaagcctacccaagtgatgccttgccgggctccaaaggtgggtcgactgatctatactgccggaggctacttccgacagagcttgtcatatttggaagcttataatcctagtgacggaacctggctgcgcctggcggacctccaagtgccccgttctggattggcaggctgcgtagtagggggactgctttacgctgtggggggtcgcaacaatagtcccgacgggaacacagattcttctgccttagattgttataaccctatgacaaatcagtggagcccatgtgctccgatgagtgtgcctcgcaacagaatcggagtgggtgtaattgatggccacatctacgccgtggggggatcccatgggtgtatccatcacaattctgtggagcgatatgagcctgaaagggacgagtggcacttggttgctcccatgttaactcggagaataggcgtgggcgtggccgtgctgaaccgtctgctatatgccgtcgggggatttgacggcactaaccgcttaaactccgctgaatgttactatccggaaagaaacgagtggagaatgatcaccgctatgaatacaattcgatctggagcaggagtctgcgtgctgcacaattgcatctatgcggctggtggttacgacggccaggaccaactcaatagcgttgagagatacgatgtggagactgagacctggacctttgtggctcctatgaaacatcgtcgtagcgctttgggtatcactgtgcaccagggacggatctatgttctggggggatatgatggacacacctttttagactctgttgaatgctacgacccagatactgatacttggagcgaagtgacccggatgacaagcggcagatctggggtcggagtggccgtgaccatggagccatgtcggaagcagattgatcagcaaaattgcacttgctag

SEQ ID NO: 227638 - DNA, 1875 bp, synthetic construct
  misc_feature 1..1875: note = Description of Artificial Sequence: Synthetic coding sequence
  source 1..1875: mol_type = other DNA
atgcagcccgacccaaggccaagcggggcaggtgcatgttgtaggtttttgcctctgcaaagccaatgtccagaaggcgctggagacgcagtaatgtacgcaagcacagagtgtaaggccgaggtaactccctcacagcatgggaacagaactttttcttatactctcgaggatcataccaaacaggcatttggaatcatgaatgaacttcgtcttagtcagcagttgtgtgacgtaaccctgcaggtcaaatatcaggatgcccctgccgctcagttcatggcccacaaggtcgtgctggcatcctcatctcccgtgtttaaagctatgttcaccaatggattgagggaacaagggatggaggtggtgtctattgaaggaattcaccccaaggtgatggagcggctgattgaatttgcttacacagcttctattagcatgggggagaaatgcgtcctacacgtcatgaacggggcagttatgtaccaaatcgacagtgtggttcgcgcatgtagcgatttcctggtccaacagctggatcccagcaacgcaatcgggattgctaattttgccgagcagatcggatgtgtagagctgcatcaaagagcgagggaatatatatatatgcactttggggaggtagccaagcaagaagaattttttaatctgtcccattgtcagctcgtaactctcattagccgagatgacctgaatgtccgatgcgagtctgaggtgtttcacgcatgtatcaattgggtgaaatatgattgcgagcagcgcagattttacgtgcaagctctcttgcgggcagttagatgtcacagtctgactcctaacttccttcagatgcagcttcagaagtgtgaaatcctccaatcggactctcgatgcaaagactacctggtaaagatttttgaagaactcaccctgcacaaacccacccaggtcatgccatgtagggcacccaaagtgggtagactcatatataccgccggaggctattttcgacagagtctgtcctatctggaggcctacaacccttctgatggaacctggctgcgcctggccgacctccaggttcctcggagcggccttgcagggtgtgtcgtaggaggactcctctatgccgtgggcggacgcaacaactctcctgatggaaacaccgacagctcggccctggactgttataaccctatgactaatcagtggtcaccatgcgctccaatgtccgtgcccaggaaccgcattggagtgggggtgatagacggccacatttacgccgtggggggaagccacggttgcattcatcataattctgtggaacgctacgagcctgaacgggatgaatggcatctggtagctcccatgctaactcggaggataggtgtgggggtggctgttttgaaccgcctgctatacgccgtaggtgggtttgatggcacaaatcgcctcaacagtgcagagtgctactatcctgagcggaacgagtggaggatgattacagctatgaatacaatacgcagcggtgccggtgtgtgcgtgttacacaattgtatttacgccgcagggggatatgacgggcaggaccaactcaacagtgttgagcggtacgacgtggagactgaaacttggacgttcgtggcaccgatgaagcacagacgtagtgccttgggaattacagtgcaccagggacggatatacgtgcttggcggatatgatgggcacacgttcctggactcagtagagtgttatgatcccgacaccgatacctggagcgaggttacacgcatgaccagcgggagatctggcgtcggcgtagccgtgacaatggagccctgtaggaagcagatcgatcagcagaactgcacctgttag

SEQ ID NO: 227639 - DNA, 2199 bp, synthetic construct
  misc_feature 1..2199: note = Description of Artificial Sequence: Synthetic coding sequence
  source 1..2199: mol_type = other DNA
atggagggaggagatcagagtgaggaggagccccgagagagaagccaggccggaggaatgggtaccttgtggtctcaggaatcaacgccagaggaaagattgccagtggaagggtctcggccttgggcagtcgccaggcgcgtgctcacggcaattctaatcttgggccttcttctctgctttagcgtgttgttattctacaactttcagaattgcggtcctaggccctgcgagacgagtgtctgtctggaccttagagaccactatcttgcctcaggcaataccagcgtagcgccttgtacagactttttctcctttgcctgtggcagggccaaggaaactaacaatagctttcaagaactcgcaactaagaacaagaaccgcctgcggagaatcctggaagtgcaaaattcctggcaccctggctctggcgaagagaaggctttccagttctataacagctgcatggacactttggctattgaggccgctggaaccgggcctcttcgacaggttatcgaggagctgggtggttggcgcatctcaggaaaatggacatctctgaatttcaaccgaacactcaggctgctcatgtctcagtatggtcattttccgttctttagagcctacttgggcccacaccctgcctctccacatacaccagtcattcaaattgaccagccagagttcgatgtcccccttaaacaggaccaagagcagaaaatttatgcacaaattttcagggaatatcttacctacctgaaccagctcggcacactgctgggaggagatcccagcaaggtacaagagcatagctccttatctattagcattacctcacgcctgtttcagttccttcggcctctcgaacaaagaagagctcaggggaagttgttccaaatggtgaccattgatcagctgaaagagatggcccctgccatcgactggttgagctgtctgcaggcaacatttaccccaatgagtctctctccatctcagtccctcgtggtgcacgatgttgaatatctgaagaatatgtcccagctggtggaggaaatgttacttaaacaaagggatttcctgcaatcgcatatgattctcggcctagtggtgacgctttctccggcactcgactcacaattccaggaagcgaggaggaagctttctcagaaactccgtgagttaaccgagcagccacctatgcctgcaaggcccaggtggatgaagtgcgtcgaggagactggcacattcttcgaacctactttggccgcactgttcgttagggaagccttcggccctagtacacggagcgccgctatgaagcttttcacagcgatcagagacgcactgatcacacgtctgagaaacttaccatggatgaatgaggagacacagaacatggcccaggataaagtcgcccaattgcaagtggaaatgggggcttcagaatgggcgctcaaacccgagctagccagacaggaatataacgatattcagttaggatcttctttcctccagagtgttctgagctgtgtgcggagcctacgcgcacggatcgtccagtcatttctgcagccccaccctcagcacagatggaaagtctctccctgggacgtgaacgcatactatagcgtgagcgaccatgttgtcgtgttcccagctgggcttctgcagcctcccttcttccacccagggtaccctagggccgtgaactttggcgctgctggcagcataatggcccatgagttgctgcacattttctaccagttgctcctccccggtggttgtctagcatgcgataaccatgcactacaggaggcgcacctctgccttaagaggcactatgcagcctttcctctcccaagccggacctctttcaatgatagcctcacattcctggagaatgccgctgatgtgggcggactggcaatagccctgcaggcctattcaaaaaggctactgcgacatcatggggagaccgtgctgccaagcttagacctgtccccgcagcaaattttttttcgcagttacgcccaggtcatgtgccgcaaaccctctcctcaagactcgcacgacacccacagcccacctcatttgcgagtgcacggcccacttagcagcacccccgcatttgctcggtatttccgctgtgctcggggagctctgttgaacccctctagtagatgccaactttggtag

SEQ ID NO: 227640 - DNA, 1935 bp, synthetic construct
  misc_feature 1..1935: note = Description of Artificial Sequence: Synthetic coding sequence
  source 1..1935: mol_type = other DNA
atgagtagacagttttcatcacgatcaggataccgctcaggcggaggtttttcttcggggtctgctggaattattaattaccagaggagaactacttcaagcagcacaaggcgttccggcggaggcggtgggagattctcttcttgtggagggggaggcggttcctttggggcaggcggaggattcggtagcaggagtctcgtcaacctcggtggatctaagagtattagcatctcagtggccagagggggtggccgagggtcaggtttcggaggcggatacgggggagggggtttcggcggagggggatttgggggaggcggtttcgggggtggcggaatcggtggcggagggtttggcggttttggatcaggaggagggggatttgggggagggggatttgggggtggaggttatggaggaggatatggacccgtttgcccacctgggggtatccaggaggtgaccataaatcagtctctcctgcagcctctgaacgtcgagattgaccctgaaattcaaaaggtgaaaagcagagaacgagaacagataaagtctctgaataatcagtttgcctcattcatcgataaggtcaggttcttggaacagcaaaaccaggtgctacagaccaaatgggagctcctgcagcaggtagacacctccactaggacacacaatctggagccctatttcgaatcctttataaataatctccgaaggcgggttgaccagctgaagagcgaccaatcaagattagacagtgagctgaaaaatatgcaggacatggtcgaggactaccggaacaaatacgaggacgaaatcaacaagagaactaatgccgaaaacgagtttgtgactataaaaaaggacgtagatggagcttatatgacaaaggtcgacctgcaagcaaagttggataaccttcagcaggaaatcgatttcctaaccgccctataccaggccgagttgagccagatgcagactcaaataagcgagactaatgtcattctgtcaatggacaacaataggtctctggacctggatagtataatcgcagaggtgaaggcccaatacgaagatatcgcacagaagagtaaagccgaggccgaaagtttgtaccagagtaagtatgaggaactgcagatcaccgccggacggcacggcgactcagttaggaactctaagatagagatcagcgagcttaatagggtcatccagagactgcgatctgagattgacaacgttaaaaaacagatctccaacctacagcaaagtattagcgacgcagagcagaggggcgagaatgcacttaaggacgcaaaaaacaaactgaacgatctcgaagacgcacttcagcaagccaaagaggacttagcccgattattgagagactaccaggaactcatgaacacaaagctcgcccttgacttagaaatcgctacttatcggaccttgttggagggggaggagtcgcgcatgtctggcgaatgcgcgcctaatgtttctgtaagcgtgtccaccagtcacacaaccatcagtggcggagggagccgcggaggcggtggcggtggatacggaagtggcggatctagctatggctcgggcggtgggagctatggtagcgggggaggcggtggagggggacgcggatcatacgggtcagggggtagttcttacggaagcggaggagggtcttatgggtcaggaggcggaggagggggtcacgggtcatatggcagtggctcatcctcgggcggttatcgtgggggaagtggcggtggcggtggtgggtcttccggcggtagaggcagtggcggtggatcatctggaggcagtatcggaggcaggggtagcagcagtgggggagtcaaaagttcgggcggtagctcttcggtcaagttcgtgagcaccacttatagtggcgtaacaaggtag

SEQ ID NO: 227641 - DNA, 1755 bp, synthetic construct
  misc_feature 1..1755: note = Description of Artificial Sequence: Synthetic coding sequence
  source 1..1755: mol_type = other DNA
atgagtgtgcgctactcaagctcaaagcattactctagtagccgctctgggggtgggggtggaggcggaggctgcgggggaggcggaggggtcagcagtctgcggattagcagcagcaaggggtccctggggggtggcttctctagtgggggattttcagggggaagtttctcccggggaagctctggagggggttgttttggcggaagctccggagggtatggcggactgggtgggttcggtggcggttctttcaggggaagctacggaagctccagcttcggcggatcatatggaggcatttttggaggaggatcattcggtggcggatcattcggcggagggtcttttggcggaggtgggtttggagggggaggtttcggtggcggttttggaggcggattcggaggcgacggcggtctcttatcaggcaacgaaaaagtgactatgcagaacctcaatgatcgtctggcctcttacctggacaaagttcgggcattggaagagtctaattacgagctagaggggaagattaaggaatggtacgaaaaacacggtaacagtcatcagggcgaaccacgagattatagcaaatactacaagaccattgatgatctgaagaaccaaattctaaacctcactaccgacaacgcaaacatcttgctccaaattgataacgctcgactggcagctgacgacttcagactcaaatacgaaaatgaagtggctttgcgccagagtgtggaggcagatataaacgggcttcgccgtgttctcgatgaactcacattaactaaggccgatctggagatgcagatcgagtctctgaccgaggagctcgcctacctcaagaaaaaccacgaggaggaaatgaaagacctcagaaatgttagtaccggtgatgtgaatgtcgagatgaacgctgctccaggagttgacttgactcagcttctgaacaatatgaggagccaatatgaacagctggccgagcagaataggaaggatgcagaagcctggtttaatgagaagtccaaggagttgactactgagatagataacaacattgagcagatttcctcttataagagtgaaatcaccgaactgcggaggaacgtgcaagccttggagatcgagcttcagagtcagctagctctgaagcagtctcttgaagcctctctagcagaaacggaaggacgatactgtgtgcagcttagccagatccaggcacagatctccgctcttgaggagcagttgcagcagataagagctgagacagaatgccagaacacagaatatcagcaactcctggacattaagatccgcttagagaacgaaatccagacctacagatcactgttggagggagaggggtccagcggaggtggcggtagggggggaggctcttttggcggtggctatgggggtggatcaagcggcggaggatcgtccggaggaggccacggagggggtcatggaggctccagcggcggtggttacggcggagggtcaagcggaggaggtagttcaggcggagggtatggtggtggatctagtagtggaggacatggtgggtcctcttctggcggatacggcggtggcagctctggaggcggaggcggtgggtacggcggtggcagcagcgggggaggatcgagctcaggaggaggttacggcggtgggtccagttcaggcggacacaaatccagttcctccgggtcagttggcgagagtagtagtaagggcccacgctactag

SEQ ID NO: 227642 - DNA, 1485 bp, synthetic construct
  misc_feature 1..1485: note = Description of Artificial Sequence: Synthetic coding sequence
  source 1..1485: mol_type = other DNA
atggatctctcaaataacactatgtctctatccgtacgcacacctggcctgagcagacgtctcagctcacagtctgtgatcggcaggccccgtggaatgtccgcttcgtcggttggctctggctacgggggttccgctttcggctttggagcctcatgtggcggaggtttttccgcggcttccatgttcggctccagctccggattcggtggcggatcgggctcgtcaatggccggaggcctcggcgctggatatggcagagccctggggggtggttcattcgggggactgggcatgggctttggtgggagccccggaggaggcagtctggggattctgagcggaaatgatggcggtctgttaagtgggtccgagaaagaaaccatgcaaaatttgaacgatagattagcaagttatctcgataaggtccgcgctctcgaggaggcaaacactgaactggagaataagatccgggaatggtatgagacccgaggtacaggtacagcagacgcctctcagtcagattactccaagtattatccactgattgaagatcttcgcaataaaataatttccgcctctattggcaatgcacagctactgcttcagatcgacaatgccaggctggccgctgaggatttcagaatgaaatacgagaacgagcttgctttgcgtcagggagttgaagctgacatcaacggcctccggagggtgctggatgagctcacgctgaccaggacggacctggagatgcagatcgaatctctgaacgaggaactggcatatatgaagaagaaccacgaggatgagctgcaaagcttccgagtcggcggacccggtgaggtgtcagttgaaatggatgccgctccaggagtagatcttactaggctgctcaatgacatgcgcgctcagtatgagacaatcgccgagcaaaatcgcaaagacgctgaggcatggtttattgagaaatcaggtgaattacgtaaggagataagtacaaatactgagcaactccagtcctcgaaaagtgaggttactgacttgcgacgggctttccagaacctcgaaatcgagcttcagtcacaactggccatgaagaaatccctagaggattcactggcggaagccgaaggggattactgtgcacaactcagccaggtgcagcagctgatatccaaccttgaggctcagttgcttcaggtacgggcagacgccgagcgacagaacgtagatcatcagcgattgctcaacgttaaggcccgtctcgaactggaaatcgaaacatacagacgtcttcttgacggagaagcacaaggggatggactggaagagagtttattcgtgactgacagcaagtctcaggcccaatctactgactcaagcaaggaccctactaagacgagaaaaatcaagaccgtggtgcaagaaatggtgaatggtgaagtggtaagttctcaagttcaggagattgaagagctcatgtag

SEQ ID NO: 227643 - DNA, 1068 bp, synthetic construct
  misc_feature 1..1068: note = Description of Artificial Sequence: Synthetic coding sequence
  source 1..1068: mol_type = other DNA
atgtctctgcgccttcagagctcgtctgcgtcatacgggggagggtttggaggaggctcttgccagctgggaggcggtcgtggagtgtcaacctgcagcacgaggtttgtgtctggagggagcgccggtggatatgggggtggggtttcatgcgggttcggcggtggggcaggatcaggattcgggggtgggttggggggtggctttggtggcggatttgctggaggtttcgtggactttggagcttgcgatgggggattactcaccggcaacgagaagatcacaatgcagaacctgaatgacagactggcgagctacctcgagaaagtccgggctttggaagaagctaatgctgacctggaagtgaaaatccgagactggcacttgaagcaatccccagcaagtccagaaagagactacagtccctactataaaaccatcgaggaattacgggacaagattctcacagccacaatagagaacaatcgagttatcctggagattgacaacgctcgtctggcggcagacgacttccgactcaagtatgagaacgagttagccctcagacagagtgtggaggccgacatcaatggcctcagacgagtgctggacgagctgacactctctaagacagatctggaaatgcagattgagagcctgaatgaggagttggcctatatgaaaaaaaatcatgaggaggagatgaaagaattctctaatcaggtggtagggcaagtgaacgtagaaatggatgccaccccaggcattgacctcactcgggtgctggctgagatgagggagcagtacgaggcaatggccgagagaaatagaagagacgccgaagagtggttccataccaagtccgccgagctaaataaggaggtgtctacgaacacagctatgatacagacatcgaaaactgagattaccgagctgaggaggacactacagggactcgaaattgaacttcagtcgcagttatctatgaaggcgggacttgaaaacacagccgcagaccccggaacacaccagcagcaccgtggtcccgctgagcgtgcaccccagtag

SEQ ID NO: 227644 - DNA, 1377 bp, synthetic construct
  misc_feature 1..1377: note = Description of Artificial Sequence: Synthetic coding sequence
  source 1..1377: mol_type = other DNA
atgtccctcaggcttcagagtagctctgcaagctacggtgggggatttggtggcggatcatgccagcttggagggggtcgtggtgtttctacatgctcaacccggttcgtgagcggcggatccgctggcggttatgggggaggcgtgtcatgtggctttggtgggggagctggctctggattcggcggaggatatggcggtggtcttggtgggggatatgggggaggactggggggagggtttgggggaggcttcgcaggaggtttcgtggatttcggtgcctgcgacgggggtcttctgacgggcaacgagaaaatcaccatgcagaatttaaatgaccgactcgcctcataccttgaaaaagtgagggccctggaggaggccaacgcggatctcgaggtaaaaatcagagattggcatctcaaacagagtcccgcttctcctgagcgtgactactccccttactataaaaccattgaggaactccgagacaagatccttaccgcaaccatcgagaataatagggtcattttggaaattgataatgcgagacttgccgcagacgactttcgtctcaaatatgaaaacgaactggctttgcgacagtctgtggaggccgatattaacggtcttcggagggttctggacgaactaactctttccaaaaccgatctcgagatgcagatagaaagtctgaatgaagaactggcatatatgaaaaagaaccacgaagaggagatgaaggagttctcaaatcaggttgtcggccaggtgaacgtggagatggatgccacacccggtatcgatctgacgcgagtcctcgccgagatgcgagagcagtatgaagcaatggccgaaaggaaccggcgagatgccgaagaatggttccatacgaaaagcgcggaactgaataaagaagtctccaccaacacggccatgatccagaccagcaagacagaaatcaccgagctgaggcgcaccctgcagggcctcgagatcgaactccagtcccaattgagtatgaaagcaggtcttgagaacacggtagctgagactgaatgcaggtacgcccttcagcttcagcagattcaagggctcatctccagcatagaagcccagctgagtgagctccgaagcgagatggaatgtcagaatcaggagtacaaaatgctcttagacattaaaaccagactggagcaggagatcgcaacttatagatcgttattagaaggtcaggacgctaagatgatcgggttccccagtagcgctgggagcgttagccctagaagcacgtctgttaccacaacatcttccgcatccgtgacaacaacaagcaatgcgtccgggagaaggacatcagacgtccgcagaccatag

SEQ ID NO: 227645 - DNA, 1263 bp, synthetic construct
  misc_feature 1..1263: note = Description of Artificial Sequence: Synthetic coding sequence
  source 1..1263: mol_type = other DNA
atgagtctgcggcttcaatccagcagtgcctcttacggaggcggatttggtggcggaagttgccaactgggcggaggccgtggggtgagcacttgttctaccaggttcgtcagcggagggagcgctggtggctacggcggaggcgtgtcttgcgggtttgggggaggggctgggagcggcttcgggggtggttatgggggaggcctggggggagggtatggaggcggactcgggggaggattcggcggtggatttgccggagggttcgtcgactttggagcctgcgatggcggtcttctaacaggaaacgagaaaattaccatgcagaacctcaatgaccgacttgctagttatttagaaaaggtccgggctctggaagaagccaatgctgacctggaagtgaagatcagggattggcacctgaagcaaagtccggctagcccagaaagagactactccccatactacaagaccatcgaagagcttcgagacaaaatcctcacagcaactatcgagaataacagggtcatcctggagatcgacaacgcgaggctggcagccgacgatttccgactgaaatacgagaatgagcttgcgcttcgacagtcagtggaggcggacatcaacgggctgcggagagtacttgatgagttaaccctgtccaagacagatctggaaatgcagattgaatcactcaatgaggaactggcgtatatgaaaaagaaccatgaggaggagatgaaagagttctcaaaccaggtggtgggccaggtgaacgttgaaatggatgccactccgggaatcgacctcacccgcgtgctggcagagatgagagagcagtacgaagccatggcagagagaaatcgtcgggacgctgaggaatggttccatactaaatcagccgagctcaacaaagaggtttcaaccaacactgcaatgattcagactagcaaaaccgaaatcaccgaattgcggagaacattacagggcctggagatcgagttgcaaagccagctcagcatgaaagctggcttggagaacaccgtcgctgagactgagtgccggtatgcattgcagcttcagcaaattcagggcttaatatcttctatcgaggcccagctcagtgagctcagatcagagatggaatgccagaaccaggaatacaagatgctgcttgatattaaaaccaggctggaacaggaaatagccacctacagaagtctccttgaaggacaggacgctaagaagaggcaacctccatag

SEQ ID NO: 227646 - DNA, 1371 bp, synthetic construct
  misc_feature 1..1371: note = Description of Artificial Sequence: Synthetic coding sequence
  source 1..1371: mol_type = other DNA
atgaccactacatttctccagacttcctcatctacctttggcggtggcagcacccgcggaggctccctattggccggaggcggaggctttgggggaggcagcctttccggaggagggggaagtcgcagtatctcggcgtcaagtgctcgtttcgtgtcttccgggtccggcggaggctatggcggtggaatgcgagtatgcggcttcggtgggggagccggttccgtcttcgggggagggtttgggggtggtgtaggtgggggatttggaggaggcttcgggggtggagacggcggacttctcagcgggaacgagaaaattacaatgcaaaatttgaacgatcggctggcatcctatttggacaaagttagagccctggaagaagccaatgccgaccttgaagtgaagattcacgactggtaccagaagcagacgccgacatctccagagtgtgactattcacagtacttcaagaccatcgaggaattaagggataaaatcatggcgacaaccatcgataactccagggtaattctcgagattgataatgctcgactcgccgctgatgacttcaggcttaaatatgagaatgagctggccctgagacaaggagtggaggccgatatcaacgggctccgtcgagtcttggacgaattgacactggctcgcacggacttagagatgcagatcgagggactaaatgaagagcttgcgtatctgaagaaaaatcacgaagaagaaatgaaagaattcagcagtcagctcgctgggcaggtcaacgtggagatggatgcggctcccggagtggacttaactcgagtgctggctgagatgcgcgagcagtatgaggccatggccgaaaagaaccgcagggacgtggaggcctggttcttcagcaaaacggaagaactgaacaaggaagtagcatcaaataccgagatgattcagactagtaaaacagagataacagacttgaggagaacaatgcaggaacttgaaatcgagctccaaagccagctatctatgaaagctggcttggagaactccctggcagaaacagaatgtcgctacgccacccagctgcagcagatccaaggattaatcggcggtctggaggcccagctctctgagctgagatgcgaaatggaagctcaaaaccaggagtataagatgctcctggatattaagacccgtctggaacaggaaattgctacataccgcagcctgttggagggccaagacgcaaaaatggctggcatcgcaatccgagaagctagcagcggaggcggtggcagttcctctaacttccacatcaacgtagaggagtccgtcgatggacaggtggtgagctctcataagcgcgagatttag

SEQ ID NO: 227647 - DNA, 876 bp, synthetic construct
  misc_feature 1..876: note = Description of Artificial Sequence: Synthetic coding sequence
  source 1..876: mol_type = other DNA
atgaccggcaccaggtccagaccacaacctgcccaaaacgcaactaccgctaacacctcccgacccctcaaatcatccgggacacgatacgagaacgaattggccctcaggcagggggtggaagccgatatcaatggactgcggagggtcctcgatgaactgacactagcgagaacagatttggagatgcagatagagggcctaaatgaagagctggcctacctgaagaagaaccacgaagaggagatgaaagaattctccagccagctagcaggtcaagtgaatgtggagatggacgccgctcccggtgtggatctgaccagagttctggccgagatgcgagagcagtacgaagccatggccgaaaaaaatcggagggatgtggaggcatggttttttagtaagacggaggaactgaacaaagaggttgcttctaatacggagatgattcagacatccaaaaccgagataaccgatttacggaggacaatgcaggagctggagatagaacttcagtcacaacttagcatgaaggccggactcgagaactctctggctgaaaccgaatgtagatacgcaacccaacttcagcaaattcaaggacttattggagggcttgaggctcagttgtccgaactaagatgcgaaatggaggcccaaaatcaggagtacaagatgctgctggacatcaaaactagactggagcaagagattgcgacctaccggagcctgttggagggtcaggatgctaagatggctggcattgccattcgggaagcaagctcaggtggcggaggatcatccagcaacttccacatcaacgtcgaggaatccgtcgatggccaggtcgtgtcaagccataaaagggaaatctag

SEQ ID NO: 227648 - DNA, 1371 bp, synthetic construct
  misc_feature 1..1371: note = Description of Artificial Sequence: Synthetic coding sequence
  source 1..1371: mol_type = other DNA
atgacaaccaccttcctgcagacttccagcagcacctttggtggcggaagcaccagaggaggatccctgctggccggagggggaggctttggaggaggctctctttctggagggggtgggagtcgctcaatatccgcatcatcagcaagattcgtttcatccgggtcaggaggagggtatggaggcggaatgcgggtttgcggatttggtgggggagctggaagcgtgttcggtgggggattcggaggtggcgtcggcggaggatttggcggagggtttggcggaggcgacggcggtcttctctcaggtaacgagaagattacaatgcagaatttgaatgatcgattggcctcttacctggataaagtcagagccctggaggaggccaacgccgacctggaagtgaagattcatgactggtaccagaaacaaaccccaacctcgcctgaatgtgactatagccaatatttcaaaactattgaggaactaagagacaagattatggccaccacaattgacaacagccgggttatactggaaatcgacaacgctcggctggctgctgatgactttcgccttaaatacgagaatgagctcgcactgagacagggagtggaggccgatatcaatggtctgaggagggtgttagatgaactaactcttgctaggactgaccttgagatgcaaatagaggggctcaatgaagagctggcatatctgaagaagaaccacgaagaggaaatgaaagaatttagctcacaattggctggacaagtgaacgtcgaaatggacgcggcaccaggagttgatctgacaagggtcctggcggagatgagggaacagtacgaggctatggccgagaagaataggcgagacgtggaggcctggttctttagtaagaccgaggagctgaacaaggaagtggcatccaacacagagatgatacagacatcgaagacagagatcaccgatctgcgccgaactatgcaggaattggagatcgaattgcagtctcaactgtcaatgaaggccggtctggaaaactctctggctgaaacggagtgccgttacgcgactcagctgcaacagatacagggattaatcggagggctggaggcccaactttctgaactgcgctgtgaaatggaagcacagaatcaggagtataagatgctgctggacatcaaaaccaggttggagcaggaaattgctacgtataggagccttttagaaggccaggacgccaaaatggcgggaattgcaattcgcgaagcttccagcggtggcggagggtcatcatccaatttccacatcaacgttgaagagtctgtggacgggcaggtcgtgtcatcccataaacgcgagatctag

SEQ ID NO: 227649 - DNA, 756 bp, synthetic construct
  misc_feature 1..756: note = Description of Artificial Sequence: Synthetic coding sequence
  source 1..756: mol_type = other DNA
atgaccggaactcggagccgaccgcagcccgctcagaatgccaccactgccaatacgtccaggccactcaaaagttcagggacacggtatgaaaatgaactagccctgcggcagggcgtcgaggccgacatcaacggcctcaggagagtgctcgacgagctgaccttagctagaaccgacctcgagatgcagatcgaggggctgaacgaggaactcgcatacctgaaaaagaatcatgaggaagagatgaaggagttcagctctcagctcgccggtcaggtgaatgtggaaatggatgctgctcctggcgtcgacctcaccagggtgcttgccgagatgcgagagcagtatgaggccatggccgaaaaaaaccggcgagatgtcgaagcctggttcttttccaaaaccgaagagctgaacaaagaggttgcttctaataccgaaatgattcaaacctctaagacggagataacggacttgcggagaaccatgcaagaattagagatcgaacttcagagccagctgagcatgaaggcaggcctggagaactcgctggcggagacagaatgtagatatgccacgcagctgcaacagatacaggggctgattggcggactcgaggcccagctttctgagctgcgttgtgaaatggaagcacagaaccaggagtacaaaatgcttcttgatatcaaaacccgcttagagcaggaaatcgcaacatatcgctccttactagaaggccaggacgcaaaatag

SEQ ID NO: 227650 - DNA, 663 bp, synthetic construct
  misc_feature 1..663: note = Description of Artificial Sequence: Synthetic coding sequence
  source 1..663: mol_type = other DNA
atgacgggcactagaagtagaccgcagcccgctcagaatgccaccaccgccaacacatcaagacccttaaagtccagcgggaccagatacgagaatgagcttgcactgcgccagggcgtggaggccgacataaacggcctgcgcagagttctcgatgaactgacgctcgcgagaacagaccttgagatgcagatcgaggggctaaacgaggaactcgcctatttgaagaagaaccacgaggaggaaatgaaggaattctctagtcaactagcaggccaagttaatgttgagatggatgctgctcccggtgtggacctcacgcgtgtgctggcggagatgcgggagcaatatgaggctatggcagagaagaacaggagggacgttgaggcatggtttttttctaagactgaggaactcaacaaagaggtagcctccaacacagaaatgattcagacaagtaagaccgaaattactgatttacggaggaccatgcaggagctggagatagaactgcagtcccagctgtctatgaaggccggactcgaaaactctctggcagagacggagtgccgatatgccacccaactgcagcagattcagggtcttatcgggggactggaagctcaattatctgagcttcggtgtgagatggaagcccaatag

SEQ ID NO: 227651 - DNA, 1422 bp, synthetic construct
  misc_feature 1..1422: note = Description of Artificial Sequence: Synthetic coding sequence
  source 1..1422: mol_type = other DNA
atgacaacatgctcaaggcagttcactagctcgtcctctatgaaagggtcttgtggcattggcggaggcattggcggaggatccagccgcatctcctccgtcttggcgggagggagctgcagagcaccctccacttatggtggagggctgagtgttagttcccgcttttctagcggaggggcatgtggactaggcggaggatacggtggcggattcagctcaagcagcagtttcggatctgggttcggtgggggttatggtggtggcttgggagcaggttttggcggtggtcttggagccggatttgggggtggattcgctggaggggatggcttactcgttgggagtgaaaaagtaaccatgcagaacctcaacgatcggctcgcttcttatctggataaggtccgcgctctggaggaagccaatgctgaccttgaggtcaaaatccgagattggtatcagcggcagcggccatcagaaattaaggactattctccctacttcaagaccatcgaggatctgaggaataagataatcgcagccacaatcgaaaacgcacagcctatactgcagattgataatgcaaggctggctgcggacgacttccgcacaaagtatgagcacgagctggcactgcgccagacagtggaagcagacgtgaatgggctcagacgtgtgttagacgaactgacacttgcaagaaccgacctggagatgcaaatagaagggctcaaagaagagttggcctatctaagaaaaaaccatgaggaggaaatgctggcactcagaggtcaaactggaggagacgtcaatgtggagatggacgctgcaccaggcgtcgatttgagccgcatcttaaacgagatgcgagaccagtatgagcagatggcggaaaaaaaccgccgtgacgccgaaacgtggtttttaagtaaaacggaggagctcaacaaagaagtagcttcgaattcagagctcgtccaatcaagcaggtctgaagttactgagcttaggcgggtacttcaaggtctagagatagaactgcagtcacaactgagcatgaaagcttctctggagaactcattagaagaaaccaaaggtagatactgcatgcagctgagccaaatccagggtctcattgggtcggtggaggagcagttagcacagttgaggtgtgaaatggaacaacagagtcaggagtaccagattctgctcgatgtgaagacgcggctcgagcaggaaattgccacttatcgcaggctcctggagggtgaggatgctcatttatcctcacaacaggcctcaggccaatcatactcctcccgcgaagtgtttacgagttcttcctcttcctcttctcgacagacacgccctattctaaaagagcagagctcttcctccttttcacagggtcagagctcctag

SEQ ID NO: 227652 - DNA, 1299 bp, synthetic construct
  misc_feature 1..1299: note = Description of Artificial Sequence: Synthetic coding sequence
  source 1..1299: mol_type = other DNA
atgaccacctcaataaggcagtttacctctagtagcagcattaaagggagttctggtctcggtggaggatcgagccggacatcttgtcggctgtccggaggactcggggcaggctcttgtagactcggctctgccggaggcttgggatccacattaggaggaagcagctacagcagctgttacagtttcgggagtggtggaggttacggaagctcattcggcggagtggacgggcttttggcgggaggcgaaaaagcgaccatgcagaacctcaacgaccgcttagcaagttacctggataaggtacgagccctggaagaagcaaataccgagctcgaagtgaaaatcagagattggtatcagaggcaggccccagggcctgctcgggactactctcagtattatcggactatcgaggagctccagaacaagatcctcactgccaccgtagacaacgcgaatatcctgttgcagatcgacaatgcgagacttgctgccgatgatttccgaacgaaatttgagaccgagcaggccctgaggctgtccgtggaagcggacatcaacggcctcaggcgtgttctagatgagctcactttggctagggctgatctggagatgcaaatagagaatctcaaagaagagctggcttaccttaaaaaaaaccatgaagaggagatgaatgctctccgcggacaggtcggtggggaaattaacgttgagatggacgctgctccaggcgttgatttatcgcgcatcttaaacgaaatgcgagaccagtatgagaaaatggccgagaagaatcgtaaagatgctgaggactggttcttcagtaaaaccgaagagttaaatagagaggtcgccactaactccgaactggtgcagtccggaaagagcgaaatttccgaacttaggcggactatgcaggccctcgaaatcgagcttcagtcccaattatccatgaaggcctcactggaagggaacctggccgaaacggaaaatcgctattgcgtccagttgagccagattcagggtttgatcgggtccgtcgaggaacagctggctcaactacgctgcgagatggaacagcagaaccaggaatataaaatacttctcgacgtgaaaactagactggaacaagagatagccacttaccgcaggctcctggaaggcgaagacgcacacctgacacaatacaagaaagaacctgtgaccacccggcaggttagaactattgtcgaggaggtacaggatggaaaagttattagttcacgcgagcaggtgcatcagactacccggtag

SEQ ID NO: 227653 - DNA, 1920 bp, synthetic construct
  misc_feature 1..1920: note = Description of Artificial Sequence: Synthetic coding sequence
  source 1..1920: mol_type = other DNA
atgagctgtcagatcagctgcaaatcaaggggcaggggaggcggaggcggaggatttcggggattttccagcggatctgccgtggtctccggcggtagccgcagatcaactagctcattctcctgtttgagcagacacggagggggtggtggagggtttggtggagggggattcgggagccgttccttggtgggcttaggaggcaccaaatctatcagtatcagtgtggcaggaggagggggaggctttggggctgcagggggttttgggggtcgcggaggtggtttcggcggtggctctagttttgggggagggagtggtttctccgggggtgggtttgggggtggcggattcgggggaggtcgctttgggggtttcgggggtccgggtggtgtggggggacttggagggccaggcggtttcgggcctgggggttaccctgggggaatccacgaagtgagcgttaaccagtctttgctccagccacttaatgtgaaggtggatccggagatacagaacgtcaaagcacaggagcgagagcaaatcaagaccctcaataataagttcgcaagcttcatcgacaaagtgcggttcctggagcagcaaaatcaggtcctgcagaccaaatgggaactgctgcagcaaatgaacgtgggtacaagacccatcaacttggagcctatctttcagggctacatcgactcgctgaaaaggtatctggatgggcttacagcagagaggacgtcccagaactctgagctgaataacatgcaggatctcgtcgaggattataagaaaaagtacgaggacgagatcaataaacggaccgctgcggagaacgactttgtgacactgaagaaagacgtggataacgcctacatgattaaagttgagctgcaaagcaaagtggatttactcaaccaagagattgagtttctgaaagtgttgtacgatgcagaaattagccagattcatcagtctgtcacagacactaacgtgattctgtcaatggataattcgcgaaatctagatttagattccataattgcagaggtgaaggcgcagtatgaagagatagcccagagatcaaaagaggaagcggaagctctatatcactcaaaatacgaagagctgcaggtaaccgtaggtagacacggtgattcactgaaggagattaaaatcgagatcagtgagcttaacagggttatccagcgtttacaaggcgaaatagctcacgtcaagaagcaatgtaaaaatgtgcaagatgccatagccgacgccgaacagcgaggcgagcacgccttgaaagacgcccgtaataagctgaacgatctggaggaggccctacagcaggcgaaggaagatctggccaggctgctgagggactaccaggaattgatgaatgtcaaattggctttagacgtggaaatagctacatatcgtaaactgctggagggcgaggaatgtcgcatgtctggagacctctcctctaacgtcactgtgtccgtcacttcaagcacaattagctcaaacgttgcctcaaaggctgcattcggcggatcaggtggcagaggcagctcatcaggaggaggctacagcagtggatccagctcctatggctccgggggaagacaatcaggttcgcgagggggttctggaggaggcggatcaatcagcggaggtggctacggatccggaggaggcagtgggggaaggtatggctccggcggaggcagtaagggcggaagcatcagtggtggcggatatgggtcaggaggcggtaagcactccagtggagggggaagcagaggaggctctagtagcggaggcggatacggaagtggtgggggtggatcaagttccgtgaaggggtcctctggagaggcgttcgggtcttctgtgacattcagcttccggtag

SEQ ID NO: 227654 - DNA, 1275 bp, synthetic construct
  misc_feature 1..1275: note = Description of Artificial Sequence: Synthetic coding sequence
  source 1..1275: mol_type = other DNA
atggatttctctaggaggtccttccaccgatcactgtcctcctccctgcaggctccagtggtcagcaccgtggggatgcaacgactgggtacaactccctctgtgtatggcggagccggtggcagaggtatcaggatctccaattcacggcacaccgtaaactatgggtcagacctgactggtggtggagatctgttcgtgggcaacgaaaaaatggcgatgcagaatcttaatgatcgtctcgcctcttaccttgagaaagtgagaaccttggaacagagcaattcaaaacttgaagtgcaaattaagcagtggtacgaaacaaatgcccctagggccggacgtgactactccgcctattacaggcaaatcgaagaattgagatctcagatcaaggacgctcagctgcaaaatgccaggtgtgtcctgcagatcgataatgccaagctcgccgctgaggatttccggctgaaatatgaaaccgaaaggggaatccgccttacagttgaggccgatctgcaggggttgaataaggtgtttgacgaccttacactgcacaagaccgaccttgaaatccagattgaagagctgaataaggacttggccctattgaaaaaggagcatcaggaggaagtggacgggctccataaacacctgggcaatactgtgaacgtggaagtagatgccgcacctggtcttaatctaggggtgataatgaatgaaatgcgacaaaaatatgaggtcatggctcagaaaaacttgcaagaagccaaagaacaatttgagcggcaaaccgccgtgctgcaacaacaggtgacagtgaacaccgaggagctgaagggaaccgaggtgcagctcactgaattaagacggacttctcagtctctcgaaatagagctgcagtcccacctgagcatgaaagagtccctggaacataccctggaggaaactaaggcacgctatagcagccagctggccaacttgcagtccttgctgtcgagcctggaagcacagctgatgcagatccggtcaaacatggaaaggcagaataatgagtaccatatcttactcgacatcaagacccgtttagagcaggagatagccacatatagaagactgctcgaaggggaagatgtgaagactaccgagtatcagcttagcaccctggaggaacgtgatatcaaaaaaactcgcaagataaagaccgtcgttcaggaggtcgttgatgggaaggttgtgtctagcgaagtcaaagaggtcgaagaaaatatctag

SEQ ID NO: 227655 - DNA, 1578 bp, synthetic construct
  misc_feature 1..1578: note = Description of Artificial Sequence: Synthetic coding sequence
  source 1..1578: mol_type = other DNA
atgtcttgcagctctcgggcttcttcttcgagggcagggggatcctccagcgcccgtgtgtctgcaggagggagctcattcagcagcggaagtcgttgcggtctgggcggatccagtgctcagggcttccgcggtggcgcatcttcatgttccctgagcggtggctcatctggagccttcgggggaagctttggaggcggtttcggcagctgctcggtgggcggaggcttcggaggcgcttccgggtctggaacaggattcgggggtgggagctcttttggcggagttagcgggttcggtagggggagtggattttgtggcagttcccgcttctcttcaggcgcaaccggcggattctactcgtatggcggtggcatgggcggaggagtgggtgatggaggactcttcagcggcggtgagaaacaaacgatgcagaatctcaacgaccgcctggcaaactatctcgataaggtgcgagctctcgaagaggccaacacagacttagagaataagattaaagaatggtatgataagtacggtcccggaagcggtgacgggggatcgggtagagactattctaagtattactccatcattgaggatctacgaaatcagataattgctgcaacagtcgagaacgccggtatcatccttcatattgataacgcccgtctcgccgcagacgacttccgtctgaagtacgaaaatgagctttgtcttcgacagagcgtagaggccgacattaacggcctgagaaaagttctggacgacctaacgatgacacgaagtgacctggaaatgcaaatcgaatcatttactgaagaattagcatatctacggaaaaaccacgaagaggagatgaaaaatatgcaaggaagttctggcggtgaggtgaccgtggaaatgaacgctgcccctggaacagatttgacaaaactccttaatgatatgcgcgcacagtacgaagaactcgccgaacaaaatagacgggaggctgaggagagattcaataagcagtctgcctcacttcaggctcagatctctaccgacgctggcgcagcaactagtgcaaaaaacgaaatcactgaactgaagcggacactccaggcgttggaaattgaacttcagagccaactggccatgaaatcatccctagaggggaccctggccgacacggaagcgggatacgtggcccagctgtctgagattcagacccaaatctccgccttggaagaggaaatttgtcagatctggggagagaccaagtgtcagaacgctgaatacaagcagctgctagatatcaaaacacgcctggaagtggagatcgagacctatcgtcgcctgctggacggggagggcggaggcagcagctttgctgaattcggcggaaggaactctggttcagtgaacatgggaagtagggatctagtgagcggagactctcgaagcgggtcctgttccggccaaggtcgtgactcctccaaaactcgcgtcaccaaaactattgttgaggagttggttgacggcaaggttgtgagcagtcaggtctcgagcatttctgaagttaaagtaaagtag

SEQ ID NO: 227656 - DNA, 1890 bp, synthetic construct
  misc_feature 1..1890: note = Description of Artificial Sequence: Synthetic coding sequence
  source 1..1890: mol_type = other DNA
atgtcaagacaggcgtctaagaccagcggaggaggatctcagggcttctccgggcgtagcgcagttgtgtccggttccagtaggatgagttgcgtggcccacagcggcggagccggtggcggagcgtacggattccgctcaggcgctggcggttttgggtcccgctctctgtacaatctgggcggtaacaaatcaatttccatcagcgtggccgctgggggatcacgcgctggcggatttggcggaggccgatcctcatgcgcattcgctggcggatatggcggaggatttggctcgggctacggcggtgggtttggagggggattcggcggaggccgtggaatgggtgggggattcggaggggcaggtggctttggcggagctggtggattcgggggagccggagggttcggaggtcctgggggattcggcggaagtggagggtttggcggaccgggtagcctcggcagtcctgggggatttggccctggaggctttccagggggaattcaagaagtgacgatcaatcaatctcttctacagcccctgaacgttgaaatcgacccccaaatcgggcaggttaaggcgcaggaaagagagcagataaaaacactcaacaacaaattcgcctctttcatcgataaagtgagatttctggagcagcagaacaaagtgctggagaccaaatggaatctgctgcaacaacaagggaccagttccatctctggtaccaacaacctggagcccctctttgaaaaccacataaattatctgcgcagttatctggacaacattctgggcgaacgcggtcgcctcgattctgaactgaagaatatggaggacctcgtggaggactttaagaaaaagtatgaggacgaaattaataagagaacagccgcagagaatgagtttgtcactttgaagaaggacgtggacagtgcctatatgaataaggtagaattgcaggcaaaagtggacgccctcatcgatgaaattgattttctaaggaccctttacgacgccgagttgtctcagatgcagtcgcacatcagcgataccagcgtcgtactgtcgatggataataaccggtctcttgatttggactctatcattgcggaggtgcgggcacagtacgaagatatcgcccagaggtctaaagccgaagctgaggctctgtaccagactaagcttggagaactgcagacaaccgccggacgacatggcgacgacctgagaaatactaagtcggagatcatcgaactgaacaggatgatccagcgcctcagggccgagatcgagggggtcaagaagcagaatgccaacttgcaaactgccatcgctgaagctgaacagcacggggagatggccctgaaagatgctaacgcaaaactgcaggaactgcaagcggctttgcaacaggccaaggatgatctcgcaaggctgctaagagattaccaggaattaatgaacgtgaaactcgcccttgacgtggaaatcgctacctatcgcaagcttctggaaggagaagagtacagtaggatgagcggggagtgccctagcgctgttagcataagtgtggtaagctcttctacaacctccgccagtgcaggaggctatggaggagggtacggcggtggtatgggcggagggctgggtgggggtttcagcgcaggtggtgggtctggctccggctttgggagagggggaggagggggtatcggtggcggattcggaggagggtcttccggtttcagtggagggtccgggttcggttcaatcagcggcgcacgctatggagtgagcgggggtggcttctcaagcgcaagcaatcggggaggctcaatcaagttctcccaatcgtcccagtcctcacagagatattcccggtag

SEQ ID NO: 227657 - DNA, 1887 bp, synthetic construct
  misc_feature 1..1887: note = Description of Artificial Sequence: Synthetic coding sequence
  source 1..1887: mol_type = other DNA
atgagccgccaggcgtccaaaacatctgggggaggttctcagggtttcagtggacgaagcgccgtggtcagcgggagctccagaatgtcctgtgttgcccatagcgggggagcaggcggaggtgcatatggcttcagatccggtgccggagggttcggatctcggtccctgtacaaccttggaggaaacaagtcgatctctatcagcgtagccgcaggtggatctcgagcaggcggttttggcggaggtcgatcttcatgcgcgttcgccggtggctatggcggaggtttcggctccggttacgggggaggctttggtggaggttttggtggaggacggggtatggggggtggtttcggcggagcgggtgggttcgggggagctggtggattcggaggggcagggggatttggcggtcccggaggattcggtggctcaggaggctttggtggacccggatctctgggttcccctggtgggttcggacccggagggttccccggagggattcaggaggtgactatcaatcaatcactgctccagccactgaacgtggaaatcgacccacagatcggccaagtgaaggcacaggaacgcgagcagatcaaaacgcttaacaacaaatttgcaagcttcatcgataaagttaggtttttggagcagcaaaataaggttctggagacaaagtggaatttattgcagcagcaaggaacaagttcgatttcaggaactaacaatctggagccgctgttcgaaaatcacattaactacctgaggtcgtaccttgataacatcctcggagagagaggtcggctggatagtgagctcaaaaacatggaggatctggtggaagactttaagaagaaatacgaggatgagatcaacaaaaggacggcagcggagaatgagtttgtgacactcaagaaggatgttgatagcgcttatatgaataaggtggagctccaagctaaggttgatgccctgattgatgaaatcgacttcttaagaaccctgtacgatgctgaactgtcccagatgcagagccacatctcagacacatccgtggtgctgagcatggacaacaatcgatccctcgacctggattcgatcatcgctgaggtgcgtgctcagtacgaggacatagcccaacggagcaaggcagaggctgaagccctttaccagaccaaacttggcgaacttcagacaactgcgggtcgccacggcgacgaccttaggaatacaaagtctgagatcatagagctcaaccgtatgatccagcggcttagagccgagattgagggggtgaaaaagcaaaacgcgaacctgcaaacagctattgcagaggctgagcagcacggagaaatggctctgaaggatgctaatgccaagctgcaggagctgcaggctgcgctgcagcaggccaaagatgatctggctcggctgctcagagattatcaagagcttatgaacgtcaaattagccctcgacgtagagatagcgacgtaccgcaagctgctagagggcgaagaatacaggatgtccggcgagtgcccgtctgctgtcagcatctctgttgtgtccagtagcactacaagcgcctccgccggaggctacggtgggggatacgggggtggcatgggcggaggcctcggcggaggcttctccgcgggaggagggtccggaagcggctttggacgcggaggcggtggtggaatcggtggcggatttggcggaggctcttccggcttcagcgggggatctgggttcggatctatatctggcgcacggtatggcgtctccgggggagggttcagcagcgcttcgaatcgcggaggaagcattaagttttctcagagtagtcagtccagccagagatacagtcggtag

SEQ ID NO: 227658 - DNA, 1251 bp, synthetic construct
  misc_feature 1..1251: note = Description of Artificial Sequence: Synthetic coding sequence
  source 1..1251: mol_type = other DNA
atgccctacaacttttgtcttccatcccttagctgtcgaacatcgtgcagctcccggccttgcgtaccgcctagttgtcatagctgcactctaccaggcgcttgcaacatacctgccaatgtgtctaattgtaattggttttgcgagggtagcttcaatggatccgaaaaagagactatgcaatttttgaatgacaggctggcaagttacctcgagaaggttagacagctagagcgggacaatgcggagctagaaaacctgatccgtgagagaagccagcagcaggagccactcctctgtccctcataccagagctatttcaagactattgaggaattgcagcagaaaattctctgtactaagagtgaaaacgccaggctcgtcgtccagatcgataatgcaaagttagctgccgatgatttccggaccaaatatcaaacagaactgagcctgcggcagctcgtcgagtcagatatcaatggtcttcggaggatattggatgaacttacactatgcaagtcagatctagaggcccaagttgaatctctgaaggaggagctgttatgcctgaagtccaaccacgagcaggaagtgaatactctccgctgccagctgggggacaggctcaatgtcgaggtcgacgccgcaccaacagtggacctaaatagagttcttaatgaaacccgtagtcagtacgaagccttggttgaaacaaatagaagagaagtcgagcagtggttcacaactcagaccgaggaactaaataagcaagtagtgtcatccagtgagcagctgcagtcctatcaagcagaaattattgagttacgtcggacagtcaatgccctcgagatcgaactgcaggcccagcataacctgcgggattcacttgaaaatacgcttacggaaagcgaggctcgttacagtagccagctgtcgcaggtacaatcactcataaccaatgtcgagtcccagctggctgaaattaggtccgacctagaacgccaaaatcaggaatatcaagtgctgttggatgtgcgggctcgattggaatgcgagataaatacttacaggtcattgttggagtcagaagactgtaatcttccttccaatccttgcgccaccacaaatgcttgcagcaaaccgataggcccttgcctgtctaatccctgcacaagttgcgtgccaccagctccttgtaccccttgcgccccacgtccaaggtgcgggccatgtaattcattcgtaagatag

SEQ ID NO: 227659 - DNA, 1674 bp, synthetic construct
  misc_feature 1..1674: note = Description of Artificial Sequence: Synthetic coding sequence
  source 1..1674: mol_type = other DNA
atggtgtccaaactgacatctctgcagcaggaattactctctgcgctcctgagttccggtgtgaccaaagaagtgctcgtgcaagcacttgaagaactgctgccgtcgccaaatttcggagtcaaattagaaaccctgcctctgtctccgggaagcggtgctgagccagatacaaagcctgtcttccacacactcacaaatggccatgccaagggacggctgtcaggagatgaaggctcagaggacggagacgattacgacacacctcctattttaaaggagctgcaggccctgaatacagaggaagcagcagagcagagagccgaggtggatcggatgctgtccgaagatccctggcgagcagcgaaaatgattaaaggctatatgcaacaacataatatcccccagcgggaggtggtcgacgtgacaggacttaaccagtcccacctcagccagcacctgaataaagggactccaatgaagacacagaagcgcgctgctttgtacacctggtatgtccgcaagcagcgggagatcctaagacaattcaaccagactgtgcagagctccggtaacatgaccgacaagagcagccaggaccaactcctgtttctattccccgagttctcccagcagtcccacggaccaggacagagcgacgacgcctgttcagaacccaccaacaagaagatgcgtagaaaccggttcaagtgggggcctgccagccaacagattttgtaccaggcctacgatcggcagaaaaacccgagcaaggaggaacgggaagcactcgtggaagaatgcaatcgggcagagtgtcttcagagaggcgtgtcaccttcaaaggcacacgggctcgggagcaatttggtcaccgaggttagagtctacaactggtttgcaaaccggcgaaaagaggaagcctttcgccaaaagctcgcaatggacgcgtactccagtaatcaaactcacagtctcaatccattattgagccatgggagcccccaccatcagccttcctcttcaccccctaataagctgtctggggtgcgctactcacaacagggtaacaatgagatcacgagttcctcaactatctctcaccacgggaactctgcaatggtcacttcacaatccgtcctgcaacaggtgtctcccgctagtctggatcctggccataacctgctgtctccagatggaaaaatgatatcagtcagcggaggcggtctccctcccgtttccacactcactaatattcacagcctcagccaccacaacccgcagcagtcccagaacctcataatgactcctctgagcggcgttatggcaattgcacagtctctgaacacgagccaggcacaatctgtacctgtgattaacagcgttgcgggaagcctggccgcactccagcccgtgcagttctcacaacagctccacagcccgcaccaacagccattaatgcagcagtctccagggtcacatatggcccagcagcctttcatggcagccgtgactcaactgcagaactcccatatgtacgcccacaagcaggagccccctcaatacagtcacacatcccgcttcccctctgccatggtagtcaccgacacgagctccatttcaacacttactaacatgtcttcaagcaagcagtgccctttgcaagcatggtag

SEQ ID NO: 227660 - DNA, 1215 bp, synthetic construct
  misc_feature 1..1215: note = Description of Artificial Sequence: Synthetic coding sequence
  source 1..1215: mol_type = other DNA
atgagctactcttgtgggctcccctcactgtcctgtcgcacctcgtgttcttccaggccatgtgtgccgccaagctgccacggttgtactctgccaggggcatgcaacattcccgcaaatgtttctaattgcaactggttctgcgaaggctccttcaacgggtcagagaaggagacgatgcaatttcttaacgaccgtctagcctcctatttggagaaggtccgccagctcgagcgggacaatgcggagctggagaacctgataagggagcgctcacagcagcaggagccactagtatgcgcgtcttatcagagttacttcaagactattgaggaactgcagcagaaaatcttatgttctaagagcgagaacgcccgacttgtggtgcagattgacaacgcaaaactcgcttctgatgacttccggacaaagtatgagaccgagctctctctgcgacagctcgtagagagcgacatcaacggcctgcggcgtatcctggacgagctgacactgtgccgttccgacttggaggcccaggtcgagtcactgaaggaggaactgctctgtttgaaacagaaccacgagcaggaggtgaataccctccggtgccagcttggagaccggttgaacgtggaggtcgacgccgcaccaactgttgacctaaatcaagtgctcaacgaaacaagaagccaatacgaggccctggtcgaaaccaacaggcgagaggttgagcagtggtttgcaacccagacggaggagctgaataagcaggtcgtgtctagttctgaacaactgcaatcttatcaggctgagatcatagagttgaggaggactgtgaacgcattggagatagaactgcaggcccagcataacttgcgcgattccctggaaaacacgctgaccgaatcggaagcccgatatagctcccaattgtctcaggtgcaaaggctgatcacaaacgtggagagccaattggccgaaattcgcagtgacctagaacgacagaaccaggaatatcaggtccttttggatgtgagggccagattggaatgcgaaataaacacatacaggtctctcctcgaaagcgaagattgtaagctgccgtctaacccttgcgccactaccaatgcttgtgataaaagcacgggtccttgtatctccaatccttgcggcctgagggcccgttgtggaccatgcaataccttcgggtactag

SEQ ID NO: 227661 - DNA, 1215 bp, synthetic construct
  misc_feature 1..1215: note = Description of Artificial Sequence: Synthetic coding sequence
  source 1..1215: mol_type = other DNA
atgccttacaacttttgcctgccctcattatcatgccggacaagttgcagctcgagaccatgtgtgccgccaagttgccatggatacacactgcctggggcatgcaatattccggctaacgtgagcaactgcaattggttctgcgaagggagcttcaacggctccgagaaagagactatgcagttcctcaacgatcgactggcaagttatctggaaaaggtgcgacagctggagcgagacaatgcagaactcgaaaacctgatccgagaaagaagccaacagcaggagcccttactttgtccgagctatcagagctatttcaagaccatcgaggaattgcagcagaagattctttgctcaaaatctgaaaacgctcggcttgtggtccagatcgataacgccaagttagctgcagatgatttccgcacaaagtatcaaacagagcaatcgctgcgacaactcgtcgagtccgatatcaattctctgcggaggatactcgatgaactgaccctttgtcggtccgatctggaggcccagatggagtctctaaaggaggaactactctccctcaaacagaatcacgagcaggaagttaacacactccggtgccaactgggcgaccgccttaatgtcgaagttgatgccgcaccagcagtcgacctgaaccaggttctgaacgagactagaaatcagtatgaagccctcgtggagacaaaccggagggaagtggaacaatggttcgccacacagaccgaggagcttaacaaacaggtggtctctagctcagagcagctgcaatcgtaccaggccgagattatcgaactgagaagaactgtgaacgcgctcgaaatagaactgcaggctcagcataacctcaggtactctttagagaacaccctcacggagagcgaagcacgctactcatctcagctctcgcaggtccaatctctgattacaaacgtggagtcccagttggccgagatccgctctgatctggaacggcagaatcaagagtaccaggtgttgctggacgttcgtgccagacttgaatgtgagattaatacatacaggagcctgttagagagcgaagattgtaaactgcccagcaacccctgcgcgacaactaatgcctgcgagaagccaatcggttcttgcgtgaccaacccctgtggcccacgctcccggtgtgggccttgcaacaccttcggctattag

SEQ ID NO: 227662 - DNA, 1311 bp, synthetic construct
  misc_feature 1..1311: note = Description of Artificial Sequence: Synthetic coding sequence
  source 1..1311: mol_type = other DNA
atgctgtatgcaaagccccctccaacaattaatgggatcaagggactgcagaggaaggagagattaaaacctgcccatatacacctgcagcagctgacctgtttctctattacctgcagctctacaatgagctactcctgttgtctgccttcccttggttgtagaacttcttgtagctctagaccttgtgttcctccctcctgccacggctatacacttcctggagcgtgcaacattcccgcaaacgtttctaactgtaattggttttgtgagggaagttttaatggcagcgagaaggaaactatgcagtttcttaatgacaggctggcctcctatctcgaaaaagtgcggcagttggagcgagacaacgctgaacttgagaagcttatacaggagaggtcacagcaacaggagcctctcctgtgcccatcctaccaatcatatttcaaaaccatcgaggaattgcaacagaaaattctgtgcgcaaaagccgagaatgctcggctagtggtaaatatcgacaacgcgaaactcgccagcgatgacttccgttctaagtatcagaccgagcagtcgctgagattgttggtcgagagtgacataaacagcatcaggcgtatcctcgacgaactcacattgtgtaaaagcgatctggagagccaggttgagtctctgagggaagaacttatctgccttaagaagaatcacgaagaggaggtgaacacattgagaagccagctgggagataggctgaacgtagaagtggatactgccccaacagtggacctgaaccaggtgctgaacgaaaccagatcccaatatgaggccctcgtcgagataaacaggagagaggttgaacaatggttcgccacccaaactgaggaactgaacaaacaggtggtgagctcatcagagcagctgcagagctgtcaggctgaaattattgagcttagacgtactgttaatgcccttgaaatcgagctgcaagctcagcacaatctcagagatagtctcgaaaacaccctgactgaaagtgaggctcattatagcagtcagctctcccaggtgcaatccctcattacaaacgtagagtcccaattggccgagatccgatgcgacctcgagcggcagaaccaggagtatcaggttctgctcgacgtccgcgcacggctggagtgcgagattaacacgtaccggagtctgctggagtcagaggactgtaagttgccatgcaatccgtgtgccaccactaatgctagcgggaattcatgtggaccgtgcgggacgtcgcaaaagggctgctgcaactag

SEQ ID NO: 227663 - DNA, 1185 bp, synthetic construct
  misc_feature 1..1185: note = Description of Artificial Sequence: Synthetic coding sequence
  source 1..1185: mol_type = other DNA
atgtcatacagctgttgccttccttcactgggctgtcgaacatcatgcagttcacgaccctgcgttcctcccagctgccacgggtatacactccccggagcctgtaacatcccagccaacgtctctaattgcaattggttctgcgagggaagctttaatggaagtgaaaaggagacaatgcaattccttaatgaccgcctggcttcttacttggaaaaggtgcgccagttagaaagggacaacgccgagctggagaaactgatccaggagagatcccaacaacaagagccccttctgtgtccctcttatcagagttacttcaaaaccatcgaggaactgcagcagaaaatcctgtgcgccaaggctgaaaatgcaagactggtcgtgaacattgacaatgctaaactggcttcggacgacttccgcagcaaatatcagaccgagcaatctttgcggctgctggttgaatccgacatcaacagcatccgtcggatcctggacgagctgactctgtgtaagtcagatctggaatctcaggtagaatctctgagggaggagctgatctgcctgaaaaaaaaccatgaggaggaggtgaacacactgcgctcccagctgggcgatcgattgaatgttgaagtggatacagcccctacagttgatctcaaccaagtcctgaacgaaactcgctctcagtatgaagccctggtcgagattaaccgcagggaagttgaacagtggttcgccacacagactgaggaattaaataaacaagtggtctcatcctccgagcaactgcagtcttgtcaggctgagatcattgagttaagacgaacggtcaatgctttggaaatcgagctgcaggcgcaacacaacttgagagactcgctggaaaacactcttacagaaagcgaagcacattactcgtctcagttgtctcaggtgcaaagtttgatcactaatgttgagtctcagcttgccgaaattagatgtgacctcgagcgtcaaaaccaggagtaccaggtattacttgacgtgcgtgcccgactggagtgcgaaattaacacctaccggagtctactggagtctgaagactgtaagttaccttgcaacccatgtgccactaccaatgccagcggtaatagttgcggaccatgtggaaccagtcagaagggctgctgcaattag

SEQ ID NO: 227664 - DNA, 1278 bp, synthetic construct
  misc_feature 1..1278: note = Description of Artificial Sequence: Synthetic coding sequence
  source 1..1278: mol_type = other DNA
atgtattccagcagcagctgcaagctgccttcattatcccccgtcgcaaggagttttagtgcgtgctctgttgggctaggccgaagcagctaccgagccacatcctgcttgccggcactttgcctgccagccggtggcttcgctacaagttattcaggaggaggcggatggttcggagaggggatcctcacaggcaatgaaaaagaaactatgcaaagtcttaacgaccgacttgctggctacttggagaaggtgcgccagctggagcaggagaacgctagtttggaatcaagaataagggaatggtgtgaacagcaggtgccttatatgtgccctgactaccagagctacttccggaccatagaggaacttcaaaagaagaccctctgttctaaagcagagaatgccaggctcgtcgtggagattgacaatgcgaaattagctgcagatgactttagaacaaagtatgaaactgaagttagtttgcgccagctagttgaaagcgacataaatggactgcggagaatactagacgatctaaccctatgtaagagtgacctcgaagcacaggtggagtccctgaaggaagagctgctctgcttgaagaagaaccacgaggaggaggtcaattcattaagatgtcaactgggtgacaggctaaatgttgaggttgacgccgcacccccagtggacctgaaccgggtgctcgaagagatgaggtgtcagtatgagaccctggtcgaaaataacagaagggacgctgaagattggttggatacacagtccgaggagcttaatcagcaggtggtcagcagcagcgaacaactgcaatcatgtcaggccgaaataatcgagctcagacggactgtcaacgctcttgagatagagcttcaggctcagcactcgatgagggacgcccttgagtccactttggctgaaacggaggccaggtactcgtcgcagctggcccaaatgcagtgtatgataaccaacgtggaggcccaattggctgaaattcgggctgatctggagcgacaaaaccaggagtatcaggtcctgctggatgtccgcgcacgcctggaatgcgaaatcaatacttatagaggactgctcgagagcgaggactctaaactgccgtgtaatccctgcgcgccagactactctcctagtaaaagctgtctgccttgtctccccgctgcctcttgtggtccttccgccgcaaggacaaattgttccccgaggccaatatgtgttccctgtccaggcggtcgattctag

SEQ ID NO: 227665 - DNA, 1368 bp, synthetic construct
  misc_feature 1..1368: note = Description of Artificial Sequence: Synthetic coding sequence
  source 1..1368: mol_type = other DNA
atggccagtaaatgtctcaaggccggattctctagtggttccttaaaatcccccggaggcgcaagcgggggatctacaagagtctccgctatgtacagttccagcagttgtaaattaccatccctcagcccggtggctcgatcattctcagcttgtagcgttggacttgggaggtcatcctatcgggctacctcttgcctgcctgcactgtgtttacctgctgggggttttgccacatcttacagcggcggaggtggttggtttggcgaaggaatcctgaccgggaatgagaaagagacgatgcagagcctgaacgatcgattggccggttatcttgaaaaggtgcggcagttggaacaagagaatgctagtctcgagtctcgaatacgcgagtggtgtgagcaacaggtcccatacatgtgtccagactatcagtcttactttcgtaccatagaggagctacaaaaaaaaacactttgttcaaaagccgaaaacgccaggcttgtcgtggaaattgataacgctaagctcgcagccgatgattttagaaccaaatacgaaaccgaggtgagcctgaggcaattggtggaatcagatattaatggtctacgaagaatattggatgatctaacactgtgtaaatctgaccttgaggcccaggtggaatccctgaaggaagaattactatgcctgaagaagaaccatgaggaggaggtgaacagcctgagatgccagcttggcgataggctcaacgtggaggtggatgccgctccacctgtagacctcaatcgcgtcctggaagaaatgagatgtcagtatgagactcttgttgaaaataaccgaagagacgcggaagactggctggacacccagtcggaagagctcaatcagcaggtcgtcagctcttccgaacaactgcaaagctgccaggctgagataattgagctgcgcagaaccgttaacgctctggagattgagctccaggcgcaacacagcatgcgggatgcgctcgaaagcacacttgccgaaaccgaggcacgttattcgtcacagttagctcagatgcagtgcatgataaccaacgtcgaagcccaactcgcagaaatccgagctgacctggagcgccaaaatcaggagtatcaggtactattggatgtgcgggcaagattggaatgcgaaataaatacctaccgcggacttcttgagtccgaggacagcaagctgccatgcaatccttgtgcccctgattactcaccctcaaagtcttgtctgccttgcctgcccgcagcatcttgtgggccaagtgctgcacgtactaactgcagtcctcggcctatctgcgtgccttgtcccggtgggcgtttctag

SEQ ID NO: 227666 - DNA, 1404 bp, synthetic construct
  misc_feature 1..1404: note = Description of Artificial Sequence: Synthetic coding sequence
  source 1..1404: mol_type = other DNA
atggcgacgcagacatgcacaccaactttttctaccggaagcatcaaaggcttatgcgggaccgccggaggcatctcccgcgtcagctccattcggagcgtcggctcctgtcgagtccctagtctggccggagccgcaggatacatctccagcgcccgaagtgggttgtccggcttgggcagctgcctgcccggttcctacctctcctcggagtgccacactagtggatttgtgggatctgggggttggttctgcgaaggatcgttcaatggttctgagaaagaaaccatgcagtttttaaatgataggctggccaattatttagaaaaagttaggcagttggaacgtgaaaatgcggagcttgaaagcaggattcaggagtggtacgagttccagattccttacatttgcccagattatcagagttattttaagacaattgaggacttccagcagaaaattctgttaaccaaatctgaaaacgccaggctcgtcctgcaaattgacaatgccaagcttgctgctgatgattttagaaccaagtatgagacagagcttagtcttcgccagctcgttgaggccgatattaacggactgcgcaggatccttgatgagttgaccctctgtaaagctgacctcgaagctcaagtggagagtctcaaggaagagctgatgtgcctgaaaaagaatcacgaagaggaggtgagtgtgttaaggtgtcagttaggagaccgtctgaacgtggaggttgatgctgctccccctgtcgacttgaacaagattttagaggacatgaggtgccagtacgaggctctggtggagaataatcggagagacgtggaggcctggttcaacacccaaacagaagaattaaaccagcaggtcgtgtcatcgagtgaacaacttcagtgctgccagacggagattatcgaactacggcgtactgttaatgcactggagattgaactgcaggctcagcactctatgcgcaattcccttgagtcaacattggctgagacagaggcaaggtattctagccagcttgcccagatgcagtgcttaatcagtaatgtggaggcccagctgtccgaaattcggtgcgatttggagagacagaatcaggagtatcaggtcctattggatgtgaaagcccgattagaaggagagatagccacataccggcacttgctagagggggaggattgcaaactccccccacaaccatgcgccacagcctgtaaaccagtgatcagggtgccatccgtacctcctgtcccttgtgtccccagcgtgccctgtacgcctgccccacaggtcggcactcagatcagaacgattacggaggagatacgcgatgggaaagtgatttcctctcgtgagcatgttcagtccagacctctgtag

SEQ ID NO: 227667 - DNA, 1254 bp, synthetic construct
  misc_feature 1..1254: note = Description of Artificial Sequence: Synthetic coding sequence
  source 1..1254: mol_type = other DNA
atgctgcgttcaggcctttccggcctggggagctgccttcccggaagttacctgtcatcggagtgtcacacatccgggttcgttggatcgggcggatggttttgtgaaggaagcttcaatggcagcgaaaaggagacaatgcaattcctaaatgacagactggcaaactacttggaaaaggtacgtcagctggaacgggagaatgcggagctcgagtctcgcatccaggagtggtacgagttccagatcccctatatttgtcctgactatcagagctactttaaaaccattgaagacttccaacagaagattctactcaccaaatctgagaatgcccgactcgtactgcagattgacaatgcaaagctggcggcagacgattttcgaacgaagtacgagactgagctgagcctgagacagctcgtggaggctgatatcaacggccttagacggatcttggacgaactcaccttatgcaaggccgacctggaagcccaggtcgaatcactcaaagaggagctaatgtgccttaagaagaaccacgaggaggaggtttccgtgctgaggtgtcagctaggcgataggctgaacgtggaagtagacgccgctccaccggttgacctgaataaaatcctggaagatatgaggtgccagtatgaggctctcgtggagaacaacagacgcgacgtcgaggcctggtttaatactcagacggaagagctaaatcaacaggtcgtttcaagcagcgaacaactgcaatgctgccagacagagattatcgaacttcgcaggactgtgaatgccctggagattgagctccaggcacaacactccatgaggaacagcctggaaagtacacttgccgaaacggaggccagatattcttctcagctggcacaaatgcaatgtctgatcagcaacgtggaagcccagctctctgaaatcagatgcgacctggagagacagaaccaggagtaccaggtactgctggacgtgaaggccagactggaaggagaaattgcaacatatcgccatctgttagagggcgaagactgcaagttgcctccccagccatgtgccactgcctgcaaacccgtgattagagtgccctcagtgcccccagtcccctgcgtcccttcggtgccttgtacccccgcaccacaggtcggcacacaaatccgtacaatcaccgaggaaattagagacggcaaagttatcagcagtagagagcacgttcaatccaggcctttatag

SEQ ID NO: 227668 - DNA, 1200 bp, synthetic construct
  misc_feature 1..1200: note = Description of Artificial Sequence: Synthetic coding sequence
  source 1..1200: mol_type = other DNA
atggccaggcggttccaggaggagctggccgcattccttttcgagtacgacactcctcgcatggttctggtcagaaacaaaaaagtgggcgtcatcttcagattgattcagctggtggttctggtttacgtcatcggttgggtgtttctctacgaaaagggttatcagacgtctagtggcttgatctcatccgtgagcgtgaagctcaaggggctcgccgtcactcagctgcctggcctggggccacaagtgtgggatgtggcagactacgtttttccagctcagggtgacaattccttcgtggtgatgacaaatttcatcgtcacacctaaacaaacccagggctactgtgctgagcatccggagggtggcatttgtaaggaggacagcggttgcactcctgggaaggcaaaaaggaaggcacaggggatccgaactgggaaatgcgtggcctttaatgatacggttaagacttgcgagatattcggttggtgtcccgtggaggtggacgacgacatcccgaggccagccctattgcgtgaagcagagaattttaccttatttatcaagaactcaatcagttttcccagattcaaggtaaatcgcagaaacttggttgaggaggtgaacgccgctcacatgaagacgtgcctgtttcacaaaacactccaccctctgtgtcccgtgttccaattaggatatgtggtgcaggagtcaggccagaacttctcgaccctcgccgaaaagggaggcgtcgtcggaatcactatcgactggcactgtgacctcgattggcatgtgaggcattgtaggcctatctacgagtttcatggtctttatgaggagaagaacctgtcaccgggattcaactttagattcgcgaggcattttgtggagaatggtaccaactacagacacctgttcaaggtctttgggattcgatttgatattctcgtggacgggaaggccggaaagttcgacattatccccactatgacaaccattggctccgggatcggtatcttcggggtcgctacggttctttgtgacctcctcctgctccacatcctccccaagagacactactataaacagaaaaagtttaaatacgcagaggacatgggccctggggctgcagagagggaccttgcagctacttcctctactttgggcctgcaggaaaatatgaggacaagctag

SEQ ID NO: 227669 - DNA, 1371 bp, synthetic construct
  misc_feature 1..1371: note = Description of Artificial Sequence: Synthetic coding sequence
  source 1..1371: mol_type = other DNA
atgacaagcagctactcctcgtcatcatgccccctgggatgcaccatggccccaggcgcacgaaatgtgtcagtgtctcctattgacatcgggtgccaacccggagccgaggctaacatcgcgcctatgtgtctacttgctaatgtcgctcatgccaaccgtgtcagagtggggagcactcccctcgggaggcctagcctctgcctgccacccacatgccatactgcttgcccactccctggaacctgtcacattcctggcaacattgggatatgcggcgcatatggtgagaacaccctgaacggtcacgaaaaagagacaatgcagttcctcaacgacaggttggccaactatctggaaaaggttaggcagctcgaacaggaaaatgcagaacttgaagcaacacttctggaacgatccaaatgtcacgagtccactgtttgcccggattatcagagttactttcatacaatcgaggagttgcagcagaaaatactatgctccaaggctgaaaatgcccgtctcattgtgcagatcgacaatgcgaaactcgctgccgatgactttcgaatcaaactggaatcagagagatctctgaggcagctggtggaggccgacaaatgcggcactcagaagttgctcgacgatgctactctggcaaaggctgacctggaagcccagcaggaatctctgaaggaggagcagctgagcctgaagtccaaccacgaacaggaggtaaagattttgcggtcacagctgggcgagaagctgaggatcgaactggacatcgaacccacgattgatcttaatcgggtgctaggtgagatgagagcacagtatgaagcaatgctcgaaactaataggcaggacgtcgaacagtggttccaagcgcagagtgagggcatcagcttacaagatatgtcttgctcagaggaattgcaatgttgccagtccgagattctggaactgaggtgcacggtgaacgccctcgaggtcgagaggcaggcccagcacactcttaaggattgcctgcaaaattccctgtgcgaggccgaggatcgctttggaactgaactcgcccagatgcagtctctgattagcaatgtggaagagcagctttcagagatacgggcagatttggagcgacagaaccaggagtatcaggtgcttctggacgttaaaacaaggctcgaaaacgagatcgcgacataccgcaatctcctagagtccgaagattgtaaattgccttgcaacccctgttctacatctccgagctgtgtcactgccccatgcgcccctcgcccaagctgcggaccctgtaccacatgtggcccaacctgtggtgccagcacgactggctccaggttttag

SEQ ID NO: 227670 - DNA, 1785 bp, synthetic construct
  misc_feature 1..1785: note = Description of Artificial Sequence: Synthetic coding sequence
  source 1..1785: mol_type = other DNA
atgactagcgtcggtgtcttcagtgatatgctcaatggctgtggcaaggacggtctggttcctcgggctaagccaagagacgtcagcgatttttccctttacgcccctgcaaccaaaccatgttgtagtcggacatataaacgaaggcgcctcagagctccagccctcacgggcctcggaccagttacgtctctgattgctccctcctccctgtcggcagcaatgatcgctaggcaacagtgtgtgaggggtgggccacgcggatttagttgcggatctgccattgtcggtggcggaaagcggggtgcttttagttccgtgtcaatgagcggaggcgcaggtcgatgcagctcaggcggtttcggatcacgcagcctatataacctgagaggcaacaagagtatctctatgagcgtggcgggttcacggcagggcgcttgtttcggcggagcgggagggttcggcacaggtgggtttggcggaggcttcggtggttcttttagtggcaagggagggcctggctttcccgtgtgcccagccggaggcatacaggaagtgacaatcaatcaaagtttactcacgccactgcacgttgagattgatccagagattcagaaggtcaggaccgaggagagggaacagatcaagctgcttaacaacaagtttgccagctttattgacaaagtacagttcctcgaacagcagaataaagtattggagaccaagtggaaccttctgcagcagcaaactaccaccacctcctcgaagaacttagagcccctgttcgaaacctacctgagcgttctgagaaagcagctggatacgttaggcaacgataagggtagattgcaaagcgagctgaagacgatgcaggattccgtggaggatttcaaaaccaaatatgaggaagaaatcaataaacgcacagcagcagaaaacgactttgtggtcttaaagaaggacgtcgatgccgcttaccttaacaaggtcgagctcgaggctaaggttgatagtttgaacgatgagattaattttctgaaggtgctctacgatgcagagctgtcccagatgcagacacatgtctcggatacaagcgtggtgctgtctatggataataatcgcaacctggatttggactcgattatcgccgaggttagagctcagtatgaggaaatcgcccaacgctccaaagccgaggccgaggccttgtaccagacaaaagtccagcagctgcagatttctgtggatcaacatggagacaatttgaagaacaccaagtctgaaattgcagagctaaacagaatgatccagcggctgcgagcagaaatcgaaaacatcaaaaaacagtgccagactttacaggtgtcggtggcagatgctgagcagcgcggtgaaaatgcactgaaggatgcccatagtaaaagagtcgagttagaagcagctctgcaacaggccaaagaagaattggccaggatgttgcgtgagtaccaggaactaatgagcgtgaaactggctctcgatatcgagattgctacttaccggaagctgctcgagggcgaagagtacaggatgtccggagagtgtcagagcgccgtaagcatctccgtggttagtggatctacgagcactggcggaatttccgggggactcggctccggttcaggcttcggactctcaagcggttttggatcaggttctggatccggctttgggtttggaggatctgtgagcggatccagttcttctaagatcatctctaccaccaccttgaacaagaggcgctag

SEQ ID NO: 227671 - DNA, 1503 bp, synthetic construct
  misc_feature 1..1503: note = Description of Artificial Sequence: Synthetic coding sequence
  source 1..1503: mol_type = other DNA
atgatagccaggcagcagtgtgttagagggggtccccgaggcttcagttgtgggagtgctatcgtgggcggaggtaagagaggcgctttctcctccgtgtccatgagtggcggtgccggacgatgctcttcaggtgggtttgggtcaaagggagcctgcttcggaggcgcagggggttttggaacagggggattcgggggaggtttcggcggttcattctccggcaaaggtggccctggctttcctgtgtgcccggctggaggtattcaggaggttacaatcaatcagtcgttattgacaccacttcatgttgagatcgaccccgagatccaaaaggtgagaacagaagagcgagagcagattaagttgctcaacaacaaattcgcttcgttcatagacaaggttcagttcctggagcagcagaacaaggtgctcgaaacgaaatggaatctcctccaacagcagaccaccacaacctccagcaaaaacctcgaacccttatttgaaacctacctgtccgtactgagaaaacagttggataccctgggcaacgacaaaggtcgcctccagtcggagttaaaaacaatgcaggatagtgttgaggattttaagactaaatacgaggaggagattaacaagcggactgctgccgagaacgacttcgtagtcttaaaaaaggatgtggatgccgcttacctgaacaaagtggaacttgaggctaaagtcgatagcttgaatgacgaaataaacttcctgaaggttttgtatgatgctgagctctcccagatgcaaacacatgtgtctgacacttcggtggtgttgtcaatggataacaacaggaacctcgacctggactctatcatcgcagaagttagagcgcagtacgaagaaatagctcagaggagcaaagctgaggctgaggccctttaccagactaaagtgcagcagctccaaatttctgtggatcagcacggggataatctgaaaaatacaaaatctgaaatcgcagagctcaataggatgatacagcgcctcagagcagagatcgaaaacatcaaaaagcagtgccagaccctgcaggtgagcgttgccgatgccgaacaacgcggagaaaatgctctgaaggacgcccattccaaacgtgtagaactggaagcggcactgcagcaagctaaggaagagcttgccagaatgttgcgcgaatatcaggagctaatgtctgttaagctcgccctcgacattgagatcgctacatataggaagctgctggagggcgaagaataccgaatgtctggcgaatgccagtctgcggtgtcaatcagcgtagtttccggttccacctccacaggcggtattagtggaggcctcggctccggatctggatttggtttgagcagcgggtttggatcaggtagcggctccggcttcggctttggaggctcagtgtccggcagctccagcagcaagattatcagcaccaccacccttaacaaacgacgctag

SEQ ID NO: 227672 - DNA, 1563 bp, synthetic construct
  misc_feature 1..1563: note = Description of Artificial Sequence: Synthetic coding sequence
  source 1..1563: mol_type = other DNA
atgattgcgcgtcaacagtgtgttagggggggaccgcgagggtttagctgtggctcagcaattgttggtggagggaaacgtggggcatttagtagtgtgtcgatgtccgggggagccggaagatgctcttcgggcggattcggcagtaggtccctgtacaaccttagaggcaacaagtctatttcaatgagtgtcgccggtagtcgccaaggtgcttgctttggaggagcgggaggattcggcaccggcggattcggaggtggttttggcggatcattctccgggaagggcggtcccggattcccagtatgtccagctggcggaatacaggaagttactattaatcagagtttacttacacccctccacgtagagatcgatcctgaaattcagaaggttaggaccgaagaaagagagcaaattaagctactgaataataaatttgctagcttcatcgacaaggtgcagtttcttgagcagcagaacaaggtgctggaaacgaagtggaacctgttacaacaacagactacaactacctcctcaaaaaacctggaacccttgtttgaaacctacctttcagtactcagaaagcaacttgatacattgggcaatgacaaaggacgcctccagtcagaactgaaaacaatgcaggactcagtcgaggactttaaaaccaagtatgaagaggagatcaacaaacggaccgccgcagaaaacgactttgtagtgttaaagaaggatgtggacgccgcttacctgaataaagtagagctcgaagctaaagtagactctctcaatgacgagatcaattttctgaaggtgttgtatgacgctgaactgagtcagatgcagacccatgtgtccgacacatctgttgtgttgtccatggacaataacaggaaccttgacttggattcaattatagcagaggttagagcacagtatgaggaaatagcacagcgatccaaggccgaagcagaagccctttaccagaccaaggtgcagcagcttcagataagtgtcgatcagcatggcgataacctgaaaaatactaaaagcgagatagctgaattaaatagaatgatccagcgtttaagggccgagattgaaaacatcaaaaagcagtgtcagaccctgcaggtgtccgtcgccgacgccgaacagagaggagaaaatgccttgaaggatgcccatagcaagcgggtggagctcgaagccgctctccagcaggccaaagaagaactggccagaatgttgcgggaataccaggagctaatgagtgtgaagctcgcacttgacatagagattgctacatataggaagttgctggagggcgaggaatatcgaatgtcgggggaatgccagtcggccgtaagcatttctgtcgtaagcggatccactagtacagggggtatcagcggcggactggggagcgggtcgggtttcggcttaagtagcggcttcggatcaggatctggctcaggctttggcttcgggggttctgtgtccgggtcttcctcgtcaaagattatatccacaaccaccctgaacaaaagaaggtag

SEQ ID NO: 227673 - DNA, 1695 bp, synthetic construct
  misc_feature 1..1695: note = Description of Artificial Sequence: Synthetic coding sequence
  source 1..1695: mol_type = other DNA
atggcatcaaccagtactactatcagatctcacagcagcagcagacgcggttttagcgcgaattccgccaggctcccgggagttagcagatccggattcagttccgtctcagtgagccggtcacggggatccggtggtcttggcggagcctgtgggggagctggttttggatcccgttcgctgtacgggctgggaggctcgaagcgcatctctatcggcggtggcagctgcgccatctccggaggctatggcagccgcgctggcggatcttatggctttggcggagccggatcagggtttggatttggaggcggagcagggattggattcgggctgggtggtggggctggcctcgccggtggcttcgggggaccaggatttcctgtgtgtccacctggcggaatccaagaagtcacagtgaaccagtccttattgactccactcaatctacagattgacccaacgatccagagggtgcgcgcagaggagcgagaacagatcaagaccttaaacaataagttcgcgtcatttatagacaaggtcagatttctcgaacagcagaataaggtgctggaaaccaaatggacactgttgcaagaacagggaaccaagaccgtccgacagaacctggagccactcttcgagcagtacattaataatctgcgcaggcagctggatagtatcgtaggtgaaagggggagactggacagtgaattgagaggcatgcaggatctggtcgaagactttaagaataaatacgaggatgaaatcaataagcgtaccgccgctgaaaatgaatttgtcacgctgaagaaggacgttgacgctgcttacatgaataaggtggagctgcaagccaaagcagatactctgaccgacgagatcaactttctacgagccctgtacgatgctgagctctcacagatgcagacacacatcagcgatacaagcgtggttctttcaatggataacaatagaaacctcgatctggattcaatcattgccgaagtgaaagcccaatacgaggagatcgcgcagaggagccgagcggaagccgagtcatggtaccagaccaagtatgaagagcttcaggtgaccgctggacggcacggagatgatctacgcaacactaaacaggagatcgcagagatcaaccggatgatacaaaggttgcggtccgaaatcgatcatgttaagaagcaatgcgccaacctccaggctgcaattgctgatgcagaacagaggggtgaaatggccctgaaggatgcaaagaataaactcgagggcttggaggacgcgctccaaaaggcaaaacaggacttggcccgactgctgaaagagtaccaggagctcatgaacgtcaagttagctctggacgtggagattgcaacgtatcgcaaactgctcgagggggaggaatgtagattgaatggcgagggtgtgggccaggtaaacataagtgtggtgcagtccaccgtatcctcaggatacggaggtgcttcgggagtcggctccgggctgggcctcggcggaggaagttcttatagttacgggtcagggttgggcgtgggcggaggcttttcatccagtagtgggcgtgccataggcggaggtctgagtagcgtaggtggtgggagctcaaccattaagtatacaactactagcagtagctcccggaaatcgtataagcattag

SEQ ID NO: 227674 - DNA, 1563 bp, synthetic construct
  misc_feature 1..1563: note = Description of Artificial Sequence: Synthetic coding sequence
  source 1..1563: mol_type = other DNA
atggcatcaacctcaaccaccattagatctcattcaggatccaggtccttatacgggctgggtggaagtaagcgcatctcaatcggcggaggatcttgcgccatatccggaggctacggctccagagcaggcggaagctacgggtttggaggcgcaggttctggattcggatttggcggaggggctggaatcggcttcggattgggcggaggagccggactagccggaggtttcggcggtccgggttttcccgtgtgtcctccagggggaatccaggaagtgactgttaaccaatccctgctgacccccctaaacctgcagatcgatccaacaattcagcgggtgcgggctgaagagagggaacagattaaaactctcaacaacaagtttgcctcatttatcgataaggtaaggtttctcgagcagcaaaacaaggtgctcgaaaccaaatggaccctgctacaagagcagggaacaaagactgtgaggcagaaccttgagcctttgtttgagcagtatatcaacaatctgcggagacaactggactcaatcgttggcgagcgaggacggttggatagcgaacttcgcggtatgcaagacctggtggaagatttcaagaacaaatacgaggatgaaattaataaacgaaccgctgccgagaatgagtttgtgaccctcaaaaaggatgtagacgccgcttatatgaataaggtggagctgcaggctaaagctgacactctgacagatgaaattaactttttacgtgcgctctacgacgcggaactgtcacagatgcagacccacataagtgatacctccgtggtgctttcaatggacaacaatcgtaatctcgatcttgacagcatcatcgccgaggttaaggctcagtatgaagaaattgctcagcggtctcgagcagaagccgaatcttggtaccaaactaaatatgaggagttacaggtgactgccggacgacatggggacgatctgagaaacaccaagcaggaaatagccgagatcaatcggatgatccagaggctcagaagcgaaattgaccatgtaaagaaacagtgtgcaaatttgcaggccgcaattgccgacgctgagcagcggggagagatggcactgaaagacgccaagaataaactcgaaggtctcgaggacgctctgcagaaggctaaacaggacctggctaggctgcttaaggaataccaggagctgatgaacgtgaagcttgctcttgatgtcgagatcgcaacatacaggaaactactggaaggtgaggagtgccggcttaatggagagggtgtgggccaggtgaacatatcagtggtccaatcgaccgtcagctccgggtatggtggggcttcaggggttggcagtggcttgggcttaggaggcggatcgtcctactcttatgggtccgggctgggagttggaggcggattttccagtagttcaggcagagcaatagggggagggcttagcagcgtggggggaggctcaagcaccataaagtacaccaccacttccagctctagccggaaaagctataagcattag

SEQ ID NO: 227675 - DNA, 1695 bp, synthetic construct
  misc_feature 1..1695: note = Description of Artificial Sequence: Synthetic coding sequence
  source 1..1695: mol_type = other DNA
atggcttctacgtctacgacaattcgctctcatagcagtagcaggcggggattcagcgccaatagcgccaggctgccgggagtctcccgctcagggttctcgagcatatccgtatcgcggtcgagagggtcaggagggctaggaggagcatgtggtggagccggattcggcagtcgctccttatatggcctcggtggaagcaagagaattagcatcggagggggtagttgcgccatttccggaggatacggaagccgcgcaggaggaagctatgggtttgggggagcaggcagcggattcgggttcggaggaggggcaggcattgggtttgggttgggagggggtgccggactggctgggggattcggaggtccagggtttccagtgtgcccgccaggtggcattcaagaagtgacagttaatcagtccctgctcacaccactgaaccttcaaatcgaccccgctattcagcgcgtgagagccgaggaacgcgagcagataaagactttgaacaacaaattcgcgtcttttattgataaggttagattcttggagcagcagaataaggtcctggacactaaatggaccctgctgcaagagcaagggactaaaacggtcagacagaacctggagcctctattcgagcaatacatcaataatctgagacgtcagttagataacatcgtgggcgagaggggcagactggactctgagctgcggaatatgcaggatctcgtcgaggacctcaaaaataagtacgaagatgagataaacaagcggacagcggcagagaacgagtttgtcactctaaaaaaggacgttgatgcggcttacatgaataaggtggagttgcaagcaaaagccgatactctcactgatgagatcaacttcctgagagctctgtacgacgccgaactgagtcagatgcaaacacacatttctgatacatccgtggtgttgtccatggataacaatagaaatctggacctggattcaatcattgccgaagtgaaggcccaatatgaagaaattgcgcagaggtctcgcgctgaagccgaatcctggtatcagacaaagtatgaagagttacagattactgccggtcggcatggggacgacctgcggaacaccaagcaagagatagcagagataaaccggatgatccaaaggctgcgtagtgagattgaccatgttaagaagcagtgcgcaaatctacaggcggcaattgcagatgccgagcaaagaggcgaaatggctttgaaggacgccaagaacaagttagagggtctggaggatgcgctgcaaaaggcaaagcaggatctggcccgtctgttgaaggagtatcaagagctcatgaatgttaagctcgcactggatgtggagatcgccacttatcgaaagttgttggaaggcgaggagtgccgattgaacggggagggggtggggcaagtaaacatcagtgtcgtccagtcgacagtgagctcagggtacggcggtgcatctggcgttggaagcggtttagggctgggaggaggctcctcctacagctacgggtcaggcctcggggtaggtgggggattttcaagctcttctggtagagcaactggcggtgggctttcttccgtgggtggtggtagttcaacgatcaaatacacgactacaagttcatccagtcgtaaatcgtacaagcattag

SEQ ID NO: 227676 - DNA, 1575 bp, synthetic construct
  misc_feature 1..1575: note = Description of Artificial Sequence: Synthetic coding sequence
  source 1..1575: mol_type = other DNA
atggcttcaacctccacaacaatcagatcccactccagtagccggagaggatttagtgccaactctgcaagactgcctggagtgtcgcgttccggtttcagctccattagcgttagcagatctagagggagtggcggattgggtggagcctgtggcggagcgggtttcggcagccggagtctctacggcctaggaggcagtaaaaggatttcgatcggcggaggctcctgtgccatcagcggcggttatggtagtagagcgggaggaagctacggattcgggggagctggatctgggttcgggttcggcggaggcgcaggaatcggcttcggcttgggaggtggcgctggtcttgcagggggttttggtggaccaggctttccagtttgtcccccaggtggaatccaagaggtaacagtgaatcagtcactccttaccccccttaacctccagattgaccccgcaattcagcgcgtgcgcgcagaggagagagaacagatcaagacgttaaataacaaatttgccagctttatcgataaggtccggttcctggagcagcagaataaggtgctggacacaaagtggaccttgttacaggagcaggggacgaaaaccgtccggcagaacttagaacccctctttgagcaatatatcaataacttgagacgccagctggataacattgtaggtgaaaggggacgacttgactcagaactccgaaacatgcaggacttggtggaggatcttaagaacaaggacgaaatcaatttcttacgagctttgtacgacgctgagctgagccagatgcagacccacatttcagatacgtctgtagtgctttcaatggataacaataggaatctagacctggattccatcatcgccgaggtcaaggcccagtatgaagaaattgcccaacgatctagggcagaagcagaatcttggtaccagaccaaatacgaagagctgcagatcaccgctggacggcacggcgacgatctgcgcaatactaaacaggaaatcgccgaaataaacaggatgatacagcggctgagatcggaaattgatcatgtcaagaagcagtgtgcaaatttgcaggcggcaattgcagatgctgagcagcgaggcgagatggcactgaaggatgccaagaataagctggagggcttggaggatgcactccagaaggcgaaacaagacctcgctaggctcctgaaagaatatcaggagctcatgaacgtcaagctggcgttggatgtcgaaatcgcaacatacagaaagcttcttgaaggtgaagagtgcaggcttaacggagagggggtcggccaagtgaacatcagcgtggtccagtctactgttagtagtggctacggcggagcatctggtgtaggcagcggtctcgggctggggggagggagttcatactcctacggaagtggactcggtgtcggcggaggtttcagtagctccagtgggcgtgcaacagggggagggctctcttcggtcgggggaggctcttccaccatcaagtatacaacgaccagcagtagtagtagaaaaagttacaaacactag

SEQ ID NO: 227677 - DNA, 1695 bp, synthetic construct
  misc_feature 1..1695: note = Description of Artificial Sequence: Synthetic coding sequence
  source 1..1695: mol_type = other DNA
atggctagcacatccacaaccattcggagccattcttccagccgcagggggttctccgccaattccgcacgcttacccggtgtctcgaggtctggtttttcttcgatttcagttagcagatctcgcggtagcggcggattgggtggagcatgcggcggagccggattcggctcccgctctctgtacgggttgggaggatccaaacggattagtattgggggaggttcgtgcgctatttcaggaggctacggctccagggccggtggaagttacgggtttgggggagccggtagcggcttcgggttcggtggaggagcgggaatcgggtttggtctcgggggaggagctggtctggcgggaggatttggtggcccaggcttccccgtttgtcctcccggtggcattcaggaggtgacggtcaatcagtcgttacttacacccctgaacttgcagattgacccagccattcaacgagtgagagcggaggaaagggaacagattaagacattgaataacaaatttgcttcctttatcgacaaggtacgcttcctcgagcagcagaataaggtactagacacgaaatggacattgttacaggaacagggtactaagactgtcaggcaaaatttggaaccactcttcgaacaatatataaacaacctcaggcggcaactcgacagcatcgtgggcgaaagaggacgacttgatagcgagctgagaaatatgcaggatctcgtggaagatctgaaaaacaagtatgaggatgagatcaataaacgtacagcggctgagaacgaattcgtgactcttaaaaaggacgtagacgccgcttacatgaacaaagtcgagttgcaggctaaagctgatacacttaccgacgagattaatttcctgagggctctttacgacgcggagctgagtcagatgcaaacccacatctccgatacctccgtggtcctgagtatggacaacaatagaaacctggatttggacagtatcattgcagaggttaaggctcagtacgaagagattgcacaacgtagtcgggctgaagccgagtcatggtaccagacaaaatacgaagagctgcaagtcaccgcgggaaggcacggagatgatctcagaaacacgaagcaggaaattgcagagattaaccgcatgatccaacgtcttcgatccgagattgaccacgtgaaaaagcagtgcgccagcctccaagcagccattgccgacgctgaacagaggggggaaatggccctgaaagatgccaaaaataaactggaaggcctggaagatgccttacagaaggctaagcaggatctggcacggctcctgaaggagtaccaggaactgatgaatgtaaagctggcactcgatgtggagatagcaacctacagaaaactgctggagggggaagagtgcaggttgaatggggaaggagtagggcaggtcaacgtgagcgttgtgcaatcgacaatctcttcagggtacgggggagccagcggtgtgggatccggcctagggttaggaggcggatcatcttattcctacggcagcggcctgggaatcggcggaggattttccagcagttccgggcgtgcaatcgggggaggtctatctagcgttgggggtggttccagcaccatcaagtacaccaccaccagttcatcgagccggaagtcttacaaacactag

SEQ ID NO: 227678 - DNA, 1650 bp, synthetic construct
  misc_feature 1..1650: note = Description of Artificial Sequence: Synthetic coding sequence
  source 1..1650: mol_type = other DNA
atggcatccacaagtactacaattcggtcacacagcagcagtaggtcgggcttctcttcaatctccgtgagtcgctcccgcggttctggagggctgggtggcgcttgtggtggagccggtttcggcagtagaagcctttatgggctcggcggttcaaagcgtatctccatcggtggcggtagctgcgccatatcagggggttacggaagcagagccggagggtcgtatgggttcggaggcgctggttccgggtttggttttggaggtggggctggaatcggctttggcttgggtgggggtgccggactcgccggtggatttggcggacctggatttcccgtgtgtccacccggtgggatccaggaggtgaccgtcaatcagtccctgctgacaccactgaatctacagattgacccagctatccagcgggttcgggcagaggagcgtgagcagatcaaaactcttaataacaaattcgcctccttcatcgacaaagtgaggtttttggagcagcagaacaaggtgctggacactaaatggacattactccaagaacaaggtacgaagacagtccgccagaacctcgagcctctgtttgaacagtatattaacaatcttaggcgccagctagactccatcgtgggagaacggggtcgactcgatagtgaactaagaaatatgcaagatctagtagaagatctgaagaataagtatgaagatgaaatcaataaacggacagccgctgagaatgaattcgtaactcttaagaaagatgttgacgcggcatatatgaataaggtggaactgcaagctaaggccgacaccctgactgatgaaatcaatttccttcgggcattatatgatgccgagttgtctcagatgcaaacccatatctccgatacaagcgttgtcctgtcgatggataataacagaaacctggacctggattcaattatcgcagaggtgaaggcccaatacgaggaaatcgcacagaggtcaagggccgaggcggaatcttggtaccagactaaatatgaggagctacaggtgactgctggtcgacacggtgacgatctgcggaacacgaaacaggaaatagcagagatcaatagaatgattcaaagactgaggagcgagatcgatcacgtgaagaagcagtgtgcctcgctacaggccgctatcgctgacgccgagcagagaggggagatggcactgaaggatgctaagaataagcttgaaggcttagaggatgcactgcagaaggcgaaacaggaccttgccaggctgcttaaagagtatcaggagctgatgaatgtcaagctcgcgcttgacgtggaaatcgcaacttaccgcaaacttttggagggtgaagaatgtcggttaaacggcgagggcgtgggccaggtcaatgtgagtgtggttcaatctacaattagctctggctacggaggtgcctcgggcgttggatccggtttggggttgggagggggatcatcctattcatatggaagcggcctcggaatcggcggtggtttctcctccagcagtggacgtgccatcggcggtggcctgagttctgtgggaggcggttcatctactattaaatatactactacctcatcaagcagcagaaaaagctataagcactag

SEQ ID NO: 227679 - DNA, 1572 bp, synthetic construct
  misc_feature 1..1572: note = Description of Artificial Sequence: Synthetic coding sequence
  source 1..1572: mol_type = other DNA
atgtccagacagtttacctgtaagagtggcgcagctgctaaaggcggttttagcgggtgcagtgctgtcttatccgggggaagctcttcaagtttcagggctgggagtaaggggctgtccggcggttttggttctcgttccctgtactccttgggaggagtcaggagtttgaatgtggcctctggctcaggtaaaagcggaggctacgggttcggtagagggagggcctccggatttgcgggatccatgttcggcagtgtcgcactgggccctgtgtgcccaactgtgtgtcccccaggtggcatacaccaggtaacagttaatgagtccttactggctccacttaacgtcgaactcgatccagaaatccagaaggtgcgtgctcaggagcgcgagcagatcaaggcacttaacaataaatttgcctccttcattgataaggtgcggttcctggagcaacagaaccaagtgcttgagactaaatgggaactcctgcagcagcttgacctgaacaactgcaaaaataacctcgaaccgatacttgagggttacatcagtaatctcaggaagcagctcgaaactttgtcgggagatcgagtgcgcctggattccgaactgaggaacgtccgcgacgtggttgaggattataaaaagcggtacgaagaggaaatcaataagaggactgcggctgagaatgagtttgtccttctgaaaaaagacgttgacgccgcatacgctaataaagtggaacttcaggctaaggtggaaagcatggaccaggagattaaattctttcgatgtttattcgaggccgagatcacccagatacaatctcatatctcagatatgtctgtcatcctttctatggataacaaccgcaacctggacttggattctatcatcgacgaggtacgaactcagtatgaagaaatcgctctgaaaagcaaagccgaagccgaggccctctaccagacaaagttccaggaattgcaactggctgctgggaggcacggagacgacctcaaaaataccaaaaacgagattagtgaacttacaaggctgattcagcgaatccgcagtgagattgagaacgtgaagaagcaggctagtaacctcgagaccgccatcgcagatgctgagcagcgaggggataatgctcttaaggacgctcgggctaaactggatgaactcgaaggcgctctccatcaggcaaaggaggagctggctcggatgttgagagagtaccaggagctcatgtccctcaaactggcgctggatatggaaatcgcgacatatcgcaaattgctggaatctgaagaatgccggatgtcaggagagtttccctctcccgtgtctatcagtatcatatcaagtacctccggcggaagcgtttacggatttcgcccaagcatggtctcgggaggctatgtggcaaactcctcaaactgcatctccggtgtgtgttctgtccgaggcggagaggggaggagtcggggaagcgcaaatgactacaaggataccctggggaaagggagtagcctgtcagccccaagcaaaaaaactagcaggtag

SEQ ID NO: 227680 - DNA, 1536 bp, synthetic construct
  misc_feature 1..1536: note = Description of Artificial Sequence: Synthetic coding sequence
  source 1..1536: mol_type = other DNA
atgagcaggcagctgacccacttccctcgcggagaacgcctcggattctctggttgcagcgcagtcctgtccggtggaatcggcagttcaagcgcatcctttagggcacgcgtgaagggttcagcctcattcggttccaaatcgctgagctgcttaggaggatcgcgctccctcgcactcagtgcagctgcaaggcgcggagggggacgcctcggaggattcgtaggaacggcatttggctccgccggactgggacccaagtgtcctagcgtgtgtccgcctggtgggatccctcaggtcactgtaaataagtccctattagcaccactcaatgtcgaaatggaccctgagatacagagagtcagggctcaggaaagagaacagataaaggccttgaacaacaagttcgcaagctttatagataaagtgcggttcctcgagcagcagaaccaggtgttggagacaaaatggaatctattgcaacaactcgatctgaacaactgccggaagaatctggaacccatttatgaaggctacatttcaaacttgcaaaagcagctggaaatgctgtcgggggatggggtacgattggacagtgagctacgcaatatgcaggatctggttgaggactacaagaagcgctatgaggtcgagatcaatagaagaaccgcagcggagaatgaatttgttgtcctgaaaaaagacgtggatgccgcttatatgaacaaagtggagcttcaggccaaggtggattctttgacagatgagattaaattcttcaagtgcctgtacgagggagagattacacagattcaaagccatattagtgacacttctattgtcctaagcatggataacaaccgggaccttgaccttgatagtataatagccgaggtcagggcccagtacgaagagatcgcgctgaagtccaaagcggaagccgagacgctgtatcagacaaagattcaggaactgcaggtcactgctggccaacatggcgatgacctgaagctgactaaagctgagatcagcgagttgaaccgcctgatccagcgaatcagatcggagataggcaatgttaagaagcagtgtgctgacctcgagactgctatcgctgacgctgaacagcgtggcgactgtgccctgaaggacgcaagagctaagctcgatgagcttgaaggagcactccatcaggcaaaagaggagcttgctagaatgctgagggagtaccaggaattagtgtccctgaagctggcactggacatggagatcgctacatacaggaaactgctagaaagcgaggaatgcaggatgtctggagagtacccaaacagcgtatcgatttcagtcatctcatccaccaacgcaggcgcaggaggcgctggattcagcatgggctttggtgctagctccagctacagttataagacagctgccgcagatgtcaaaacgaaaggctcttgtggcagcgaacttaaagatcctctggccaagacgagcggctcaagttgtgccaccaaaaaggcatctcgctag

SEQ ID NO: 227681 - DNA, 1410 bp, synthetic construct
  misc_feature 1..1410: note = Description of Artificial Sequence: Synthetic coding sequence
  source 1..1410: mol_type = other DNA
atgtccaggcagcttacccactttcccagaggcgagagactgggatttagcggctgcagtgccgtgttgtctggcggaattggcagtagctcagccagcttccgcgctcgcgtcaaaggcagcgcttccttcggtagcaaatctttgtcatgcctgggcggtagtcgttctcttgccctgagtgccgcagcacggagggggggaggcaggttgggaggatttgttggaaccgccttcgggtcggccggattagggcctaaatgtccttcagtttgcccccctggcggtattcctcaagttacagttaataaaagtcttctggccccactgaacgttgaaatggaccccgagatccagcgcgttcgtgcacaggagagagaacagattaaagcgctcaacaataaattcgcgtcctttatcgacaaggttaggttcctcgaacagcagaatcaggtgcttgagacgaagtggaatctgttacaacagttggatttaaataactgtaggaagaacctcgaacccatctacgaagggtacatctcaaatctgcagaagcagctggaaatgctgtccggagacggcgtgcggctggactcagaattgaggaacatgcaggatctggtggaagactacaaaaagcgatacgaagtggaaattaaccgcaggacagccgcagaaaacgaattcgtggtcctgaaaaaggatgtggacgccgcttatatgaataaggttgagctgcaggctaaggtggactctctcacggatgagattaagtttttcaagtgcctttacgagggggagataacacagatacaaagccatattagtgatacgtcaatcgtgctcagcatggataacaatcgggatttggatttagacagtatcattgctgaggtgagggctcagtatgaggagatagcactcaaatccaaggccgaggcagagaccctctatcaaactaagtgcgcagacctggaaacggccatagctgatgccgaacagcggggagactgcgcactcaaagatgctagagccaagctagacgagctcgagggggctttgcatcaggccaaggaggaactggctcgtatgttacgggagtatcaggagctagtgagcctgaaactcgctttagatatggagatcgctacctaccggaagctcctggagtccgaagaatgtcggatgagcggagagtatccaaactccgtctccattagtgtcattagctcgacgaacgcgggtgcagggggagccggttttagtatgggattcggggcttcctccagctatagctacaagacggctgctgcagatgtgaaaactaagggatcctgtgggagcgaactaaaggatcctctcgcgaaaactagcggctcttcctgcgcgacgaagaaggccagcaggtag

SEQ ID NO: 227682 - DNA, 972 bp, synthetic construct
  misc_feature 1..972: note = Description of Artificial Sequence: Synthetic coding sequence
  source 1..972: mol_type = other DNA
atgctatccggggacggggtaaggctagacagcgagttacggaacatgcaggaccttgtggaggattacaagaaacggtatgaagttgaaattaataggaggacagctgcagagaatgaattcgtggtccttaaaaaggatgtggatgcagcatatatgaacaaagttgaactgcaggccaaggtcgacagcttgactgacgaaatcaagttcttcaagtgcctatatgaaggcgaaattacccagatccagagtcatatcagtgatacctctattgtgttaagtatggacaataatagggatctcgatctggacagtatcatagccgaggtcagggcccagtatgaggaaattgcactcaagtccaaggccgaggcggagaccctctaccagacaaagattcaggaactccaagtgacagccggacagcacggtgacgaccttaagctcaccaaagcagaaatctccgaattaaaccgtctgattcagcgcattcgctctgaaataggaaacgtaaaaaagcagtgtgcggatcttgagactgctattgccgatgctgagcagaggggagactgcgctctgaaggatgccagagccaagctggacgaacttgaaggggctcttcatcaggccaaagaagagttagccaggatgctacgtgagtatcaagaattggtgagcctgaaattggctctggacatggaaattgccacgtaccgcaaactgttggagtctgaggagtgtaggatgtctggcgagtaccctaactccgtttcaatctccgtcatttcatcaaccaacgccggagccggaggcgcagggttctcaatgggttttggagcaagctctagttactcgtataagactgccgctgccgacgtgaaaactaagggtagttgcggatcagaactgaaggatcctcttgccaagacctctggttcgtcttgtgcaactaagaaagcatcccgctag

SEQ ID NO: 227683 - DNA, 1536 bp, synthetic construct
  misc_feature 1..1536: note = Description of Artificial Sequence: Synthetic coding sequence
  source 1..1536: mol_type = other DNA
atgtcccgacagcttacccacttcccccgtggcgaacgactgggcttcagcggatgcagtgctgtgctatctggcggaataggctcctcctctgccagtttcagggctagagtgaagggctccgccagcttcggatccaaaagtctctcatgcctcggaggctcgcggagcctcgccctcagtgctgccgctagaaggggagggggacggctgggcggtttcgtaggcactgccttcggttccgcgggactcggtcctaagtgcccatctgtttgcccccctggcggaatcccccaggtcacagtgaataaatctttgttggccccattgaatgttgagatggacccagaaatccagcgcgtgagggcccaagagcgagaacagatcaaggctttgaacaacaagttcgcttcgttcatcgacaaggtgcgctttctagagcaacagaaccaggtcctggagactaaatggaacctactgcagcagctcgatctcaacaactgtcggaagaacctagagccaatctacgagggctatattagtaacctgcagaaacagctcgaaatgctgtccggagatggtgtccggctggacagtgaactacgcaatatgcaagacctagttgaggattacaagaaacggtatgaagtcgagatcaaccgtcgcaccgccgctgaaaatgaattcgttgtgcttaagaaagacgtcgacgctgcttacatgaataaggtcgagcttcaagccaaggtcgattccctgaccgacgagattaaatttttcaagtgcttatatgagggcgaaattacacagattcaatcccatatctcagatacctcgatcgtgctgagtatggacaataaccgggacttagacctggactccatcatcgccgaagtgagggcccagtacgaagagattgccctcaagagtaaagctgaggctgaaacattataccagacgaagattcaggaactacaggtaactgccggtcagcacggtgacgatctcaagctgactaaagccgaaatttctgagctgaatcgactcatccaacgcatccgcagcgaaatcgggaatgttaagaaacaatgcgccgacctggagactgcaatcgccgatgccgagcagcggggtgactgtgcactgaaagacgccagagcgaaactggacgagctggagggagctctccaccaagctaaggaagaactggctcgtatgctgcgtgagtaccaagagctggtatccttgaaactggccttggatatggaaattgctacttaccggaagctattagagtctgaagaatgccgtatgtccggagagtaccccaattctgtgagtattagtgtgatatctagcacgaatgcaggggctggcggagcagggttcagtatgggcttcggtgcttcttcctcttactcctataagacggctgcagccgatgttaagacaaagggatcatgcggatcagaactcaaggaccccctcgccaagacgagtgggagcagctgcgctaccaagaaggcttctcgctag

SEQ ID NO: 227684 - DNA, 1623 bp, synthetic construct
  misc_feature 1..1623: note = Description of Artificial Sequence: Synthetic coding sequence
  source 1..1623: mol_type = other DNA
atgtctcggcaattcacttataaaagcggagcggcagccaaaggtgggttttctggctgcagcgccgttctgagcggagggtctagttctagttaccgggctggcggaaagggactgagtgggggattttcatcaaggtccctgtacagtctcggcggtgcacgctctatctcttttaatgttgccagcggcagcgggtgggcgggtgggtatgggtttggtcgcggacgcgcaagcgggttcgccggatccatgtttggaagcgttgccctgggatccgtgtgccccagtctttgccccccaggaggcatccatcaggtcaccattaacaagagcctcttggcaccactaaatgtggaactagacccagaaattcagaaagtacgggctcaggagagagagcagatcaaggtcctgaataacaaatttgcttcatttatcgataaggtccgtttcctagaacagcagaatcaggtattagaaacgaaatgggaactccttcagcagctagatctgaacaactgtaaaaataatctggagcctatcttggagggatacatctccaacctgcgaaaacaattggagaccctgtctggcgaccgtgtgagactggattcagaacttcggagcgtgcgcgaagtggtagaagactataaaaaacggtatgaggaggagattaacaaacggactaccgctgaaaacgaattcgtcgtgctgaaaaaggacgttgatgccgcatatacatctaaagtcgagttgcaggccaaggtggatgcactggacggagaaattaaattctttaagtgcttgtatgaaggcgaaactgcacagattcagtcacatatttcagatacttcgattatacttagcatggacaacaataggaaccttgacctcgatagtattattgccgaggtgagggcacagtacgaggagatcgccagaaaatcaaaggcggaagccgaagcgctgtatcagaccaaattccaggaattgcagctggccgcagggagacacggcgatgacctcaagcacacaaaaaatgagatatctgaattaactcgtctgatccagcgactgcgatcagagatcgaatctgttaagaagcagtgtgccaacctggagaccgccattgctgacgcggagcaacgtggcgactgtgctctgaaggatgctagggccaaactggatgaactggaaggggcacttcagcaggcgaaagaggagctggctcgcatgctgcgtgagtaccaggagctgctgtctgtgaaactgtcccttgacattgagatcgccacttatagaaaactgttggaaggcgaagaatgcaggatgagcggtgaatatacaaactcagtgagtataagcgtgattaattcaagcatggccggaatggctgggacaggagcaggcttcggtttctctaacgcaggtacgtacggatattggccgtccagcgtatctggcggatacagcatgcttccaggtgggtgtgttactggtagtggaaactgcagcccccgaggcgaggcgaggaccaggctgggatccgcgagtgagttcagagactcccagggcaagactctggccctgtccagccccactaagaagaccatgcggtag

SEQ ID NO: 227685 - DNA, 1590 bp, synthetic construct
  misc_feature 1..1590: note = Description of Artificial Sequence: Synthetic coding sequence
  source 1..1590: mol_type = other DNA
atgtccaggcagttgaacattaaatcatcaggcgataagggcaatttcagtgtgcacagtgctgtcgtgcccaggaaagccgtgggatctttggcttcctactgtgctgctgggagaggggcaggagccggttttggctctcggagcctctacagcttgggcggtaacagacggattagcttcaacgttgctggcggaggagtgagggcagggggatatggcttccggcctggcagcggctatggcggaggaagagcttctggctttgccggttccatgtttggttctgttgcccttggtcctgcttgtttgtccgtttgccctcctggcggtatccatcaggtgactgttaacaagagtctgctggctccactaaatgtggagctggatccagaaatccagaaggtgcgcgctcaggagagggaacagatcaaggtgctgaatgacaagttcgccagcttcatagacaaagtaaggttcctggaacaacagaatcaggttctggaaactaagtgggagctcctgcaacaactggacctcaacaactgtaaaaaaaacctggaaccaattctcgaaggctatatttccaacctgcgaaagcaattagaaaccctgtctggcgatcgggtgagattggactccgaactgaggtcaatgagggacctcgtggaggactacaagaaacgatatgaggtggagatcaatcgcagaacaacagcagaaaacgaatttgtcgttctcaaaaaagatgccgacgcagcatatgccgtcaaggttgaactacaggcaaaggtggactccctcgacaaagaaatcaagttcctcaagtgtctgtatgatgcggagatcgcccaaatacagacccacgccagcgagacctcagttatcctgtcgatggataacaacagagacttggatctcgactccattatcgctgaagtaaggatgcattacgaagaaatcgccctgaaatccaaggctgaggcagaggcgctgtaccaaacaaaaattcaggagctgcaactggcagcctcaaggcatggagacgacctgaagcacacccgctccgaaatggtggagctgaataggctcattcagcgcatccgctgtgaaattgggaacgttaagaagcaacgcgcaagcttagagacagcaatcgccgacgcagagcaaaggggggataacgccctcaaggatgcacaagcaaaactggacgagctcgaaggagccctccaccaggctaaggaagaactggcccgaatgctcagagagtaccaagagcttatgtcgctgaaactggcattggatatggaaatcgccacttacaggaagctgctagagggtgaagaatgcagaatgtccggggagaatccctctagcgtgtctattagtgtcatttcaagcagcagctattcctatcaccacccatcaagcgcaggtgtcgatcttggggctagcgccgttgccggatcctcaggtagtacacagtctggtcaaacaaaaacaactgaagcaaggggcggagacctgaaagacacacagggaaagtctaccccagcgtctattcccgctagaaaagcgacgaggtag

SEQ ID NO: 227686 - DNA, 1656 bp, synthetic construct
  misc_feature 1..1656: note = Description of Artificial Sequence: Synthetic coding sequence
  source 1..1656: mol_type = other DNA
atgtctagacagagctcaataactttccagtccggctctaggcgagggttttcgaccacgagcgcgataacgcctgcagccggaaggtctagattctctagtgtgagtgtggccaggtcagctgccggttcagggggtctcggacgcataagcagtgcaggcgctagtttcgggtcccgctcgctgtacaacctcggcggagcaaagcgggtgagcatcaatggctgcggtagcagctgccgttctggcttcggcggtagggcttcaaacagattcggcgtgaattccggatttgggtacggaggtggagtcggcggaggatttagcggtccatccttcccagtatgcccgccaggtggtattcaagaagtgaccgtgaatcagtcccttctcacacccctgcatctccagatcgatcccacaatccaaagagttagagccgaggaaagggagcagatcaagaccctgaataataaattcgcaagtttcatcgacaaggtccgttttctggaacagcaaaacaaggtgttagaaacgaagtgggctctactccaggaacaaggcagtcggacagtaagacaaaacctggagccgctgttcgactcttatacgtcggagctgagacggcagctagagtccataactactgagagggggcgtttagaggccgagctccggaacatgcaagacgtggtggaggacttcaaagtgcggtatgaggacgagattaataaacgcacagctgcggagaacgaattcgtagccctgaaaaaggatgttgacgccgcttacatgaacaaagtggagctggaggctaaagtgaagtctctgccggaggagatcaactttatccatagcgtctttgatgctgagctgtcacagctgcagacccaagtcggagatacatcagtggtgctcagcatggataataatagaaatctggacctggactctatcatcgctgaagtgaaagcacagtacgaagacatcgccaacaggtctcgagctgaagccgagagttggtaccaaaccaagtatgaggaactccaagtgactgcgggtaggcatggcgatgatctgagaaatactaaacaggaaatttctgagatgaataggatgatccagcgcttgagagccgagattgactccgtcaagaagcagtgctcttcccttcagaccgctatcgctgacgccgagcaacggggtgaacttgcgctcaaagatgccagggcaaaattggtggacctggaagaagccctccagaaagcaaagcaggatatggcccgactcttgagggaatatcaggagctgatgaacattaaattggcgctcgacgtggagatagccacctaccgcaagctgttagagggtgaagaatgtagattaagcggtgagggtgtgagcccggtcaatatctcagttgtcacgtcaacactgtcctctgggtacggctccgggagttccattggagggggtaatctcggtctgggaggagggtcgggctactcgttcaccacatctgggggtcatagcctcggcgctgggcttggaggctcaggcttcagtgcgaccagtaaccggggactgggtggcagcggctccagcgttaaatttgtgagcaccacctctagtagtcagaaatcttatacacattag

SEQ ID NO: 227687 - DNA, 1737 bp, synthetic construct
  misc_feature 1..1737: note = Description of Artificial Sequence: Synthetic coding sequence
  source 1..1737: mol_type = other DNA
atgtcacaccaattcagcagccagagcgccttttcgagcatgtctcggagagtctactccaccagctcctccgctggctctggcggtggttccccagcagtgggctctgtttgttacgctagaggcaggtgtggagggggaggctatggcattcatgggagaggctttggaagccggtctctgtacaatctgggcggatccaggtccattagtattaacctaatgggcaggagcactagtggtttttgtcagggagggggtgtcggaggtttcggcggaggacgaggtttcggggtgggtagcaccggggcagggggattcggcggtgggggattcggtggggctggcttcgggactagcaactttggactaggcggattcggcccatactgtccacctggcggaattcaagaagtcacaattaatcaatctctcctcgagccccttcacctggaggtcgaccccgaaattcagaggatcaagacacaggagcgcgagcagattatggtcttgaacaataagttcgctagctttatcgataaggtcaggttcctcgagcagcaaaatcaggtcctccagaccaaatgggagctgttgcagcaggtgaacacctcaactggcaccaacaatctggagccattgcttgaaaactacattggagatctgcgcaggcaggtcgacctcttgtctgccgagcaaatgagacagaacgctgaagttcggagcatgcaagatgtagtcgaagactacaaatctaaatacgaggatgagattaataagagaacaggtagtgaaaatgacttcgtcgttctgaagaaagacgtggatgctgcatacgtttctaaggtcgacctagagtctagagtcgataccctgaccggtgaagtgaacttcctgaaatatctgttcctgaccgaactctcccaagtacagactcatatttctgatacaaatgttattttgtcgatggacaacaatcggtcccttgaccttgacagcattatagatgcagtccgcacacaatatgagctaattgcccaaagaagtaaagacgaggcagaagccctgtatcagacaaaatatcaggagttgcagatcacagctggcagacatggagacgatttgaagaactccaaaatggagattgctgagctgaacagaaccgtccaacgcctacaagccgagattagcaacgtcaagaaacagattgagcagatgcagtccctgatcagcgatgccgaggagcggggagaacaggcccttcaggatgcatggcagaagttgcaggacttagaggaagcgctccagcagagcaaggaggagttagctagactgttgagagactatcaagccatgctaggagttaaacttagtctcgatgttgaaatagccacatatagacaacttcttgaaggtgaggaatctagaatgagcggcgaacttcagtcccacgtgtcaatatcggttcagaatagccaagtaagcgtgaatggaggggctggaggtgggggaagctacggctcaggcggttatgggggaggaagcggcggtggctatggtggcggaaggtcgtacaggggaggcggagcacgcggacgatccggcggtgggtatggaagtgggtgtggaggaggaggaggctcctatggtgggtcaggcaggtctgggagaggtagctcccgagtccagattatccagacaagcaccaatacctcgcaccgtcggatattagaatag

SEQ ID NO: 227688 - DNA, 1038 bp, synthetic construct
  misc_feature 1..1038: note = Description of Artificial Sequence: Synthetic coding sequence
  source 1..1038: mol_type = other DNA
atgcgacagaacgctgaggtaagatccatgcaggatgtggttgaggattacaagagcaaatacgaagacgaaataaacaagagaaccggctccgaaaacgacttcgtggttttgaaaaaggatgtggatgcggcatatgtgtccaaagtcgacctagaatctagggttgatacactgaccggggaagtcaatttcctgaaatacctgttcctgactgagctatcacaagtgcagacacatatttccgatacaaatgttatcctgtctatggacaacaaccggagtttggatctggattccatcatcgacgctgttcgtacacagtatgagctcattgcgcaacgctctaaagacgaggctgaggccctctaccaaacaaagtaccaggaactccagatcacagccggaagacacggagacgatctcaagaattctaagatggaaatcgccgagctgaaccggactgtacagagactgcaggccgaaataagtaacgtgaagaagcaaatcgagcagatgcagtcccttatcagtgatgcggaggaaaggggagagcaggcccttcaggacgcctggcagaagctccaggatctggaggaagcccttcagcagtcaaaagaggagttggccaggctgttacgggattaccaggccatgctaggagtgaaactgagcttggacgttgagattgcaacttacaggcagctcctggaaggggaagaaagcagaatgagcggcgagctgcagtcacacgtgtcgatatccgtgcagaattctcaggtgtctgttaacggcggtgccggtggaggtggttcctacggatcaggagggtatggcggaggatctggcggaggctacggaggcggtagaagctatcggggaggcggagcacgtgggcgttcgggtggcggatatggctcaggctgtggaggagggggaggctcatatggagggtctggacggtccggacgcggttcctctcgtgtccagattattcaaacctcgactaacacctcccatcggaggattctcgagtag

SEQ ID NO: 227689 - DNA, 1563 bp, synthetic construct
  misc_feature 1..1563: note = Description of Artificial Sequence: Synthetic coding sequence
  source 1..1563: mol_type = other DNA
atgtccttgtcaccctgccgggcacaacgtggtttcagcgctcgatcggcctgcagtgcacgatcacgtggaaggagtagggggggattctcatcacgaggaggtttctccagccgttcactgaactctttcggcggatgcctggaaggctctcgcggatctacttggggctcgggagggcgtttaggcgtgcggttcggcgagtggtccggcggaccgggactgagcctgtgtcccccagggggaattcaggaggtcactatcaaccaaaacctcctgacccctcttaagattgaaatcgaccctcaattccaggtcgtcagaacgcaggaaactcaggaaatcaggactttaaataatcaattcgctagctttatagacaaagtcaggtttctggagcagcagaataaggtgctggagacgaaatggcaccttctccagcaacaggggctgtcgggctcccagcaaggcctcgaacccgtcttcgaggcttgtctggaccagctgagaaaacagcttgaacaactgcagggcgagagaggagccctagatgccgaattgaaggcatgtagggaccaggaggaggagtacaagtctaaatacgaagaagaggcgcacaggagggcaaccttagaaaacgacttcgtagtgcttaagaaggacgtcgatggagtcttcctgagcaaaatggagctggagggtaaactggaggccttgagggaatacctctactttctgaagcacttgaacgaggaagaactgggacagctgcagacgcaagcaagcgatacctctgtagtgttaagtatggataacaatcgttatttggacttttcttccataatcactgaggtgagggctcgatacgaagaaattgcaaggagctctaaggctgaggctgaggcgctgtaccagaccaaataccaggagttgcaggtgtccgctcaattgcacggggaccggatgcaggaaaccaaagtgcagatcagccaactgcaccaggagattcagcgtctgcagtctcaaacagaaaacctgaaaaagcagaacgcctctttacaggccgcaatcacagatgctgaacagaggggcgagttggcgttgaaagacgcccaggccaaagttgatgaactggaagccgctctccgcatggccaaacagaacctggcccgtctcctttgtgaataccaggagttaacctccacaaaattgtccctggacgtcgagatcgctacgtatcggagactgttggaaggcgaggaatgcagaatgagcggagagtgtacttctcaggttaccatctcatcagtcgggggaagtgcagttatgtccggcggagtgggcggagggctaggatcaacctgtggcttgggttctggaaaaggctcccccggttcatgttgtacctctattgtgactggcggaagcaacatcattctgggcagcggtaaggaccctgttctcgatagttgtagtgtatcaggctcctctgctggcagttcatgtcacactatcctgaaaaaaacagtcgagtcttccctaaagactagcataacttactag

SEQ ID NO: 227690 - DNA, 1233 bp, synthetic construct
  misc_feature 1..1233: note = Description of Artificial Sequence: Synthetic coding sequence
  source 1..1233: mol_type = other DNA
atggaaggacatgaggcctctcccgcacaggtcggccagggggatcgtggtaaagtgcgtttcttggagcaacagaataaagtgctggagacaaagtggcatcttcttcaacagcaagggctcagcggcagtcaacagggtctggagccagtctttgaagcttgcctggaccagctgagaaagcaactcgagcagctccagggagagcgcggtgccctggatgctgagctaaaagcctgccgcgatcaggaggaagagtacaagtctaaatatgaagaggaggcccaccgcagggctacactggagaacgatttcgtggttctcaagaaagatgttgatggtgtcttccttagcaaaatggaattggagggtaaactagaggccttacgtgagtatctgtactttctgaagcaccttaatgaggaggagctgggacagctgcagactcaagccagcgacactagcgttgtactgagcatggacaataatagatatcttgacttctcctccattatcacagaggtgcgcgctcgctacgaagagattgctagaagtagtaaagccgaggctgaagcgctctatcaaaccaaataccaagaactgcaggtgtctgcccagttgcatggggaccggatgcaggagactaaggtgcagatttctcaacttcatcaggagatccaaaggttgcagagtcaaaccgagaacctgaagaaacagaacgcctctctgcaggccgctattacagacgccgaacagcggggtgaactggccttaaaggatgcacaggcaaaagtggacgaactagaagctgccctgaggatggctaagcagaatctagcacgattattgtgtgaatatcaggagctaacttctacaaagctttccctcgacgtggagattgccacataccgccgacttcttgagggtgaagaatgccgaatgagtggtgaatgtaccagccaggtgactatcagctcagtcgggggtagcgcggttatgtccggcggtgtggggggtgggctaggttccacgtgtgggctgggctccggaaagggttctcctgggagttgctgtacgtctatagtgacaggaggaagcaatatcatcctcggatccggaaaggaccccgtcctcgattcctgcagtgtatcgggtagctccgccggatcttcttgccatacaattctcaagaagaccgtggagtcaagtctaaagacctccatcacgtattag

SEQ ID NO: 227691 - DNA, 876 bp, synthetic construct
  misc_feature 1..876: note = Description of Artificial Sequence: Synthetic coding sequence
  source 1..876: mol_type = other DNA
atggaattagagggcaagcttgaggctttacgggaatatttgtactttcttaaacacctgaacgaagaggagctcggacagctgcagactcaagcttcggatactagcgttgtactttctatggacaacaatcgatatctggacttttctagtatcatcaccgaagttagggccagatatgaggagatagccaggtcgagtaaggcagaggctgaagccctgtatcagacgaaataccaggaacttcaggtatcagctcagctgcacggagaccgcatgcaggaaacgaaggtgcagataagtcagctccaccaggaaatccaacgcctacagtctcagaccgaaaatctgaagaagcaaaatgcctccttacaggccgctattaccgacgccgaacaaagaggggagttggccctcaaagatgcccaagctaaagtcgacgaactggaagccgcattgaggatggctaagcagaacctcgccaggttgctgtgtgagtaccaagagttgacaagtacaaaactgtctcttgatgtcgaaattgcaacttacagaaggctccttgaaggcgaggaatgccggatgtctggtgaatgtacatcacaggtcacgatctctagcgtagggggatctgctgtgatgtccggcggagttggcggtggactgggcagtacctgcggactgggctccggaaaagggagccccggttcatgttgcacaagcattgtgacaggaggctcaaatattatcctgggctcggggaaggaccctgtgctcgactcttgctctgtgagcggctcttccgctggcagttcatgtcacaccattctgaaaaagacagtagagtcatcactgaagacgtcaattacgtattag

SEQ ID NO: 227692 - DNA, 1608 bp, synthetic construct
  misc_feature 1..1608: note = Description of Artificial Sequence: Synthetic coding sequence
  source 1..1608: mol_type = other DNA
atgcgctccagtgtctctcggcagacatacagcacaaaaggtggcttttcctcaaacagcgcctctgggggaagtggctctcaggctcgaacaagtttctcatccgtgaccgtctctaggtcctccggctcaggaggcggtgcacactgcggaccagggaccgggggttttggatccaggtccctttataatctcgggggtcataagtcaatctctgtctccgttgccggtggggcactgttaggtagagccttgggcggattcggcttcggaagcagggcgttcatgggacagggcgcaggcagacagaccttcggacctgcctgtcctcctggagggatccaggaagttacggtgaatcagtcgctgctgaccccattgcatgtagaaatcgaccccgaaatacagcgcgtgcgtacccaagagcgagaacagatcaagactctaaacaataagttcgcatctttcatagataaagtgagatttctcgagcaacagaacaaagtgcttgaaacaaagtgggcactcttacaggaacagggccagaacctgggggttacacgaaacaacctcgaacccctgtttgaagcatacctcgggtccatgcggtccactctcgatagactacagtctgaaaggggcaggctcgattctgagctgcgcaatgtgcaagacttggtggaagatttcaagaacaagtacgaagatgagattaacaaacacaccgccgcagaaaatgagtttgtcgttctgaaaaaggatgttgatgcagcctacatgggccgaatggacctccacggcaaggtgggaacactgacccaggaaatcgattttttgcagcagctttatgagatggagctgagccaggtccagacccacgtgagcaacaccaacgtggtcctcagtatggataataaccggaatctggatctggactcgatcatcgcagaggttaaagcccagtacgagttgattgctcagcgatctcgcgctgaagccgaagcttggtaccagaccaagtatgaagagctgcaggtgactgctggtaaacacggcgataaccttagggatacgaagaatgagattgcagagctgacacgcacaattcaacgcctgcagggggaagcagacgcggctaaaaagcagtgtcagcagctccagaccgcaatcgccgaggccgaacagcgaggagagctcgcattaaaagatgctcagaaaaagctcggcgatttggatgtcgccctgcaccaagccaaggaagatctcacccgactgcttagagattatcaggaactgatgaacgtgaaattggcacttgatgtagaaatcgcgacttatcgcaagctgcttgagtccgaagagtctcgaatgagcggagaatgccccagcgccgtgagcatatctgtaacgggcaactctaccaccgtctgcgggggaggagccgcatcctttggaggcggaatcagtctcggaggatcggggggagccactaaaggcggtttttctactaacgttggttactctaccgtcaaaggagggcctgtctctgccggtacaagcattctaagaaaaaccaccactgtaaagacttcctctcagagatactag

SEQ ID NO: 227693 - DNA, 1269 bp, synthetic construct
  misc_feature 1..1269: note = Description of Artificial Sequence: Synthetic coding sequence
  source 1..1269: mol_type = other DNA
atggcttgtcgctcatgcgtcgttggcttttcttcgctatcttcatgtgaagtgactcccgtgggcagtccgagacctggtaccagcggttgggacagctgtcgggcacccggtcccggattctctagcagatctctcaccggatgttggagcgccggaacaataagtaaggtgaccgtgaacccaggtcttctggtcccactggatgtcaagcttgacccagctgtgcaacagcttaagaatcaggaaaaggaagagatgaaggccctgaacgataagttcgcctccttgattggcaaagttcaggcgctcgagcagcgcaaccagctgctggaaactaggtggtccttcttacagggccaggactctgcaatctttgatttaggtcatttatacgaagagtatcagggcaggctacaagaagagctgaggaaggtgagccaggagcgcggacagctagaagccaatctacttcaggttttagaaaaggtggaagagtttcgcattcggtacgaggatgaaatttcgaagaggaccgacatggaatttacattcgtccaactaaaaaaggacttggatgccgagtgtcttcacaggaccgaacttgagacgaaattgaaaagccttgagagttttgtggagctcatgaagaccatctacgaacaggaactaaaggatctcgccgctcaggtgaaggacgtgagcgtgaccgtcggtatggatagtcggtgccacattgatctgtctggcatcgtcgaggaagtgaaggctcaatacgacgccgttgcagccagatctctggaggaagcagaggcctactcaaggagtcagctggaggaacaggcagcaagatcagctgagtatggcagcagtctacagtcctcccgatccgaaatcgcagatcttaacgtccgcatccagaaactccgctctcagatcctctcagtgaagagccactgtcttaaactggaggaaaacatcaagactgcagaggaacagggcgaactggcatttcaggacgctaaaacaaagttggcacagctggaagcggcactgcagcaggctaagcaggatatggcaaggcagctcagaaaatatcaggagctgatgaacgtaaagctggctcttgacatcgaaatcgcaacctatagaaagttagtggagggagaagaggggcgaatggattcccctagtgcaaccgtggtctccgcagttcagtcacgctgcaaaaccgcacctagccttccttatcccctgtgttccctatag

SEQ ID NO: 227694 - DNA, 1359 bp, synthetic construct
  misc_feature 1..1359: note = Description of Artificial Sequence: Synthetic coding sequence
  source 1..1359: mol_type = other DNA
atggcctgccggagctgcgtggtggggttctctagtctgtctagttgcgaagttactcctgttggtagtcctcgacctggaacatccggatgggacagctgtcgagcaccagggcctggattcagctcacggtctctgacagggtgctggtcggccggtaccatatcaaaggtaaccgtaaacccaggactgctcgtgccactggatgtgaaactggatcccgctgtccagcagctgaagaatcaggagaaggaagaaatgaaggccctgaatgataagttcgcttccttgattgggaaagtccaggccttagagcagcgaaaccagctcctggaaactaggtggtctttcctgcagggtcaggacagcgccattttcgacctcggccacttatatgaggaatatcagggacggctacaggaggagctgagaaaggtttcgcaagaacgcggacagctggaggctaatctgcttcaggtgctggaaaaggtggaggaatttcggatccgatacgaagatgaaatttctaaaaggacggatatggagttcacatttgttcagttaaagaaagacctggacgcagagtgtctccatagaaccgagttagaaaccaagctgaagtctctcgagtctttcgttgaacttatgaaaaccatttacgaacaggagctgaaagacctagccgctcaagttaaggatgtttccgtgactgtaggcatggactctcgctgccacatcgaccttagcggaatcgttgaagaagtcaaggcgcaatacgatgctgtcgcggctagatccctggaggaggcggaggcttactccaggtcacaactagaagagcaagccgctagaagtgcggagtacgggtcaagtctccagtctagcagatctgaaattgcagatctgaacgtgagaattcagaagttgcgatcccagatattgagcgttaaaagtcactgcctgaaattggaggaaaacataaagaccgcagaggagcagggggagctcgcatttcaggacgcaaaaaccaagttagctcagctggaggccgctttgcagcaggctaagcaggatatggccagacagctgagaaagtatcaggagttgatgaacgtgaagctggcacttgacattgagatcgccacctaccgtaagcttgttgagggtgaggaaggaaggatggactctcctagcgcgacagttgtgtccgctgttcagtcacgctgtaaaaccgcagcctccaggtctgggctgtctaaggccccttccagaaaaaagaaaggatctaaaggacccgtcattaagatcaccgaaatgagcgagaagtattttagtcaggagtcagaggtgtccgagtag

SEQ ID NO: 227695 - DNA, 1518 bp, synthetic construct
  misc_feature 1..1518: note = Description of Artificial Sequence: Synthetic coding sequence
  source 1..1518: mol_type = other DNA
atgacttgtggctctggattcggaggtcgcgctttcagctgtatctccgcatgtggccctcgccctggacgctgttgcataaccgcagctccatatcggggaatttcatgttaccgcggactgactggagggtttggatctcatagcgtttgtggcggttttcgagccggatcttgtggcaggtcatttgggtaccgcagcggaggggtgtgtggcccttctcctccctgtataaccacagtctccgtgaatgagtctttattgacaccactgaatctggaaatagaccctaacgcccagtgtgtcaaacaggaggagaaggagcagatcaaaagcctaaattctagatttgcagcctttatcgataaggtaagatttctcgagcaacagaacaaactgcttgaaactaagcttcagttttaccaaaacagagagtgctgtcagtcaaaccttgagccactgtttgaaggatatatagagaccctgcgacgcgaagctgaatgtgtggaagccgatagcggcagacttgcgagcgagctcaatcatgtgcaggaagttttggagggctataaaaaaaagtacgaggaggaagtgtcgttacgtgccacagctgagaacgaattcgtggccctgaagaaggacgtagactgcgcatatcttagaaagagcgacctggaggccaacgtcgaagccttaattcaagaaatcgacttcttacgacggctgtatgaggaagagattctgattctccaatctcatatctctgacacaagcgtagtagtcaagttggataattctagggatctgaatatggactgcatcatcgcggagataaaagcgcaatatgatgatatagttacaaggagtcgcgcagaggccgaaagctggtatcgctcaaaatgcgaagaaatgaaggccactgtcatccggcatggggagactttgagaagaactaaggaagaaatcaatgagttgaaccgaatgatccaacgattaactgcagaggtggaaaacgctaagtgccagaatagtaagctggaagcagcagttgctcagagcgaacaacagggggaagccgctttaagcgacgctagatgcaagcttgctgagttagagggagcgctccagaaggcaaagcaggatatggcctgtctgataagagagtatcaggaggtgatgaactccaagttagggctcgatattgagattgccacgtatcgaaggctcctggagggagaggagcagcgcctttgcgagggtattggcgctgtgaacgtgtgcgtttcctcctctaggggtggtgtggtatgtggtgacctgtgtgtgagtggaagtagacctgttactggatccgtctgttctgcaccgtgtaatggaaacgtcgccgtgtctaccggtttgtgcgccccatgtggccagctaaacacaacctgcgggggtggctcctgtggcgtcggctcttgtggtatctctagcctgggagtgggtagttgtgggtcaagttgtcgtaaatgttag

SEQ ID NO: 227696 - DNA, 1455 bp, synthetic construct
  misc_feature 1..1455: note = Description of Artificial Sequence: Synthetic coding sequence
  source 1..1455: mol_type = other DNA
atgacctgcggcagtggctttggcggacgggctttctcatgtatatccgcctgcggccctagacccggacgatgttgtattactgcagcgccttatagggggatttcttgctaccgcggactcactggaggcttcggctcccactctgtatgtggcggttttcgcgcaggcagttgtggcaggtctttcgggtacagatccgggggtgtttgcgggccatcacctccttgcattacaactgtgtcagtcaatgagagtctgctgacacccctaaatctggagatcgacccaaatgctcagtgcgttaaacaggaggagaaggagcagataaagagccttaatagtagatttgccgctttcatcgacaaagtgaggttcttagagcagcaaaataagctgctggagactaagttgcagttttaccagaatagagaatgctgtcagtcaaacctggagccccttttcgaaggctatatcgaaactctcaggcgagaagccgagtgtgtggaggctgatagtggcagattggcttccgaactgaatcacgtgcaggaggtgttagagggctacaaaaagaagtacgaggaggaggtgtcccttagggcaactgcggagaatgaattcgtagccttgaaaaaagatgtagattgcgcttatctgcgaaagtctgacttggaagcaaacgtagaggcccttatacaggagatcgactttctgagacgcctgtacgaggaggagattcttatcctacaaagtcatatcagcgatacctccgtagtggtgaaacttgataactctcgggatctgaacatggactgcatcattgcagaaattaaggcccagtatgatgacatagtcaccaggagccgagccgaagcagagagttggtacagaagcaagtgcgaggagatgaaggctaccgtgatcaggcacggagagaccctgagacggaccaaagaggagattaatgagttgaaccggatgatccaacggttgactgcagaggtagagaacgcgaagtgccagaactccaaattagaagcagcggtagcgcagagcgagcagcagggggaggccgctctcagcgacgctcgatgcaaattagcggagctagagggcgcattacagaaggcaaaacaggatatggcctgcctcatccgggaataccaagaagtaatgaacagcaaattgggactcgatatcgaaattgccacctaccgccgactgcttgaaggagaagagcagaggctctgtgagggcatcggcgctgtgaatgtctgcgtttccagttcccggggtggagtggtctgtggggatctctgcgtgagtggctctaggcctgtgaccgggagcgtgtgtagtgccccttgcaacggaaatgtagcagtctctaccggcctgtgtgctccatgcggacaagtgggatcttgcggaagtagctgccggaagtgttag

SEQ ID NO: 227697 - DNA, 1482 bp, synthetic construct
  misc_feature 1..1482: note = Description of Artificial Sequence: Synthetic coding sequence
  source 1..1482: mol_type = other DNA
atgacttgtgggtttaacagtattgggtgcgggttccgtcccggaaatttctcatgcgtgagtgcgtgtggtcccaggccctcacgttgttgcattacagctgccccatacagaggcattagttgctatcggggattgactggcggatttggttcccactccgtctgcggaggcttcagagcagggagctgcggtcgcagcttcgggtatcgtagcggtggcgtgtgcggaccctccccaccctgcattacaaccgtgagtgtaaacgagagcttgctcacacctttaaacctggagatcgaccctaatgcccagtgcgtgaagcaggaagaaaaggagcagatcaaatcgctgaactctcgattcgccgcattcatagataaggtgaggttcctggagcagcagaacaagctgctggagaccaaactccagttctatcaaaatcgtgaatgctgccagagcaacctcgagcctctgtttgccggttacatcgagacactccgacgcgaagcagagtgcgttgaagcggacagcggcaggctcgcttctgagctgaaccacgtgcaggaagtgctggaaggctacaagaagaagtacgaggaggaagtggcactgcgagctacagccgaaaatgagtttgtggcactaaagaaggacgtcgattgcgcctacctacggaaatccgatctcgaagcaaacgtcgaagccctgatacaagaaattgacttccttaggcgcctctacgaagaagagattagaatcctccaatcccacatatcagacacaagtgtggtggtcaagctggacaatagccgcgatctgaacatggactgcattgtcgcagagataaaggcccagtacgatgacatcgccacccgcagccgcgcagaggctgaatcttggtatagaagcaaatgtgaagagatgaaagcaacagtgattcgccatggcgagacacttaggcgaaccaaagaggaaattaatgagttaaatagaatgattcagcgtttgaccgcagaggtggaaaacgctaaatgtcagaattccaaactagaagctgccgtggcccagtctgaacagcagggggaagccgcactgagtgacgcccgatgtaaactcgccgaactggagggagcactgcagaaggcgaaacaagacatggcctgcctgataagggaataccaggaagtcatgaactccaagctgggccttgatatagaaattgcaacctataggcgcctgttagaaggcgaagaacagaggctttgtgagggtgtggaagccgtgaacgtgtgcgtgtcttcctctaggggaggggtcgtgtgcggggatctctgtgtttccggtagccggcctgtgactggctccgtctgctccgcaccttgtaacggaaatttagtggtctctactgggctttgcaagccatgtggccagctgaacaccacttgcggcggtgggtcctgcgggcagggccgacattag

SEQ ID NO: 227698 - DNA, 1524 bp, synthetic construct
  misc_feature 1..1524: note = Description of Artificial Sequence: Synthetic coding sequence
  source 1..1524: mol_type = other DNA
atgagttgtcgcagctaccggatcagttccgggtgcggtgtcacacgaaatttttcctcctgctctgcagtggcacccaagaccggtaaccggtgttgcatatcagctgcaccctatagaggagtgagctgctatcgtggccttaccgggtttgggtcccggtcattatgtaacctcggctcatgcggtcctcggatcgctgtgggcggtttcagggctggctcttgcggcagatctttcggataccgaagtggtggtgtgtgtgggcctagcccaccttgcataacaactgtatccgtgaacgagtcgctgcttacccccctcaatcttgaaatcgaccctaatgcccaatgcgtcaaacaggaggagaaggaacagatcaaatccctgaacagcaggttcgctgcttttattgacaaggtgagattcctggaacagcagaacaaactgctagagaccaagtggcagttttaccaaaaccagcgctgttgtgagtccaaccttgaacccttgttctctggctacattgagactctcaggagggaggctgaatgtgtagaagctgattcgggcagactcgcctcagagctgaaccatgttcaagaggtcctcgaggggtacaaaaagaaatacgaagaggaggtcgcattgagagcaaccgctgaaaacgaattcgtagtgctcaagaaggacgtagattgtgcttacctgaggaaatctgacttggaagccaatgtcgaggccctggtcgaggagtcaagctttctaaggcggttatatgaggaggaaattcgcgtccttcaggcccatatttctgatacgtcggtcatcgtgaagatggataatagtcgggatctgaatatggactgcattatagccgaaattaaagcgcaatatgatgatgtcgcttctcgttctagagccgaggcagaaagttggtatcggtctaagtgtgaggagatgaaagctacggttatccgacatggcgagacgctgcgaaggacaaaggaggagatcaatgaacttaatcgtatgatccagaggctgactgcagaaatagagaacgcaaagtgccagagagccaagttagaagccgcagtggctgaggcagaacaacaaggcgaggcagccctttctgatgctaggtgcaagctggcagagctggagggtgccttacagaaggccaaacaggatatggcttgtttattaaaggaataccaagaagtgatgaactcaaaattggggcttgacattgaaattgcgacctaccggcgactactggaaggcgaggagcaccggctgtgtgaaggcgtggggtctgtgaatgtgtgcgtctctagcagcagagggggagtgtcatgtggtggcttgtcttactcgactactcctggcaggcagatcacgtccggaccatcagctatcggcggatccattaccgtagtcgcaccagactcctgtgctccctgccagcctcggtcatcttccttctcatgcgggagctccagatccgttcggtttgcttag

SEQ ID NO: 227699 - DNA, 888 bp, synthetic construct
  misc_feature 1..888: note = Description of Artificial Sequence: Synthetic coding sequence
  source 1..888: mol_type = other DNA
atggtcttcaaggtgcagttcctgtcctctcggccaagcctgagccacacacaagacgtcgattgcgcttatctccgtaagagcgatttggaagctaacgttgaggcgctcgtggaggagtcgtcttttctccggaggttatacgaggaagagatccgcgtgctgcaggctcacatcagcgatacatctgtgatcgttaaaatggacaactcacgcgatctgaacatggattgtatcatcgccgaaataaaggcgcaatatgacgatgtcgcctctcgttcacgggctgaggctgaatcctggtaccgctccaagtgcgaagaaatgaaggctacagtgattcgtcatggggaaactctgaggcgcaccaaggaggaaattaatgagttgaacagaatgattcagagattgactgctgagatcgagaacgccaaatgtcagcgtgctaagttggaggccgcagtcgcggaagccgagcagcagggtgaagctgccctgtccgatgctaggtgcaaacttgccgagttggaaggcgctttgcaaaaagcgaagcaggacatggcatgcttactgaaggaatatcaagaggtgatgaactcaaagttgggactcgacatagagatcgcaacgtatcgcaggcttctggaaggtgaggagcatcgcctctgcgagggcgtcgggtccgtgaacgtctgtgtgagctcaagtagaggcggagtatcatgcggcggactgagctactctaccacccctggaagacagataacgtcaggacctagcgccattggtggctcaatcaccgtcgtcgcccctgactcctgtgccccttgccagcccaggagctcgtcctttagctgtgggagttccaggagtgtgagattcgcctag

SEQ ID NO: 227700 - DNA, 1461 bp, synthetic construct
  misc_feature 1..1461: note = Description of Artificial Sequence: Synthetic coding sequence
  source 1..1461: mol_type = other DNA
atgacatgtggcagctattgtggcggaagggccttcagctgtatctctgcctgcggaccccgtcccggtcgatgttgtatcaccgcggcaccttacagaggcatcagctgctataggggtctgactgggggtttcgggtctcactccgtgtgcgggggtttccgggcaggctcttgcggtcggtcttttggttacaggagcggcggagtttgtggtccttcacccccatgcattaccactgtaagtgtgaatgaatctctcctgacaccactgaatctggaaattgatcccaacgcccagtgcgtgaagcaagaagagaaagagcagatcaaatcacttaactcccgattcgcggcattcatagataaggtcaggtttttggagcagcagaataagcttctggagacaaaacttcagttctaccaaaatagagagtgctgtcaaagcaatctcgagcccctgttcgaggggtacattgagacattaaggagagaggctgaatgtgtggaagctgacagtggcaggctggcttcagagctgaaccacgttcaagaggtcctagaaggctataagaagaaatacgaagaagaagtatctctaagagcaacagccgaaaacgaattcgtggccctcaagaaggacgtcgactgtgcttatctgcgaaagtctgatttagaggctaacgtggaggctctgatccaggaaatcgatttcctccgacgcttgtacgaggaggaaatccgggtgctgcagtctcacattagtgatacgtcggttgtggtcaagcttgataacagtagagatctcaacatggattgtataatcgccgagatcaaagcacagtacgatgacatcgtgaccagatcgcgagcggaggcagaatcatggtatcgcagcaaatgcgaggagatgaaggcaacggtgatcaggcacggggagactctccggagaactaaggaagagatcaatgaactgaacaggatgatccagagactcactgccgaggtagaaaacgcgaagtgccagaatagcaaactcgaggcggctgtggctcagtcggagcaacagggcgaagccgcactgtctgatgctaggtgtaaactcgctgagttagaaggcgcactacagaaggccaagcaggatatggcatgtctgattcgagaataccaggaggtgatgaacagtaagctagggctggatatcgagatagcaacatacagacgcttactcgagggggaggagcagagactgtgcgaaggagtcggctccgtgaatgtttgtgtatccagctctagagggggagttgtttgcggagatttatgcgcgagcacaacagcccctgttgtttccaccagagtctcctccgtaccatcaaattctaacgtagtggtaggcacaaccaacgcttgtgccccttccgcaagggtaggggtgtgcggcggaagttgcaagagatgctag

SEQ ID NO: 227701 - DNA, 1872 bp, synthetic construct
  misc_feature 1..1872: note = Description of Artificial Sequence: Synthetic coding sequence
  source 1..1872: mol_type = other DNA
atgagctgtaggcagttctcttcttcatatctgtcaagatctggagggggtggaggtgggggtctcggctccggcggatccattcgaagcagctacagcagattttcgagttctggaggaggcggtggagggggtcggtttagctcatcctctggctacggaggaggttcaagtagggtgtgcggtaggggaggcggaggttcatttgggtattcctatggaggcggttcagggggaggatttagcgcatctagcttgggaggcggtttcgggggagggtccagaggcttcggcggagctagtggcggaggatactcgagtagcgggggttttggcggaggatttggcggaggtagcgggggaggctttgggggtgggtatggatcaggtttcggtgggttcggaggattcggcggtggtgcaggaggtggcgacggaggcattctgacggctaacgaaaaatctacaatgcaagaacttaatagccgccttgccagttatctggacaaggttcaggcccttgaagaggcaaataacgatctggaaaataaaattcaggattggtatgacaaaaaagggcctgcggctatccagaaaaactactccccatattacaacacgatcgacgatctgaaagaccagattgtggatttaaccgttggcaacaacaaaacgctgctcgatatagataatactagaatgactttggatgactttcggataaaattcgagatggagcaaaacctgcggcagggggtggatgctgacatcaacggcttgcggcaggtgctagacaacctgactatggaaaagagcgacctagaaatgcagtacgagacgctgcaagaggagctgatggctctgaagaaaaaccacaaggaagagatgtctcaattgactggacagaactccggggacgtgaatgtggagattaacgtagccccagggaaggatctcacaaagacgctgaatgatatgcgtcaagagtatgaacagctcatcgctaagaacagaaaggatattgaaaaccagtatgaaactcagatcacacagattgaacacgaagtgtctagttctgggcaggaggtgcagtccagtgccaaggaggttactcagttgagacacggagtccaggagctggagatcgaactgcagtctcagctgtctaagaaggccgctcttgaaaagagcttagaagatactaaaaatcgctactgcggccagctgcagatgatccaagaacagatatctaatctggaggcgcagattaccgacgtgcgtcaggagattgaatgccagaatcaggagtacagtctgcttcttagcattaagatgaggctggagaaagaaattgagacctaccataacctactagaggggggacaggaagactttgaatctagtggggctggtaaaattggcctgggtggtcggggtggttccggcggatcttacgggagggggagtcggggtgggtcaggaggttcttacggtgggggtgggtccgggggtggctatggcggagggtctgggtctcggggtggttcaggaggatcatatggtggcggaagcggaagcgggggaggcagtgggggtggctacggaggcggaagtggtggcggtcactcggggggatcggggggaggtcacagcggcggatctgggggaaactatgggggaggaagcggatcaggcggtggctccggaggcggatatggcggaggctccggcagtcgcggaggcagtgggggatcccacgggggaggtagtggcttcgggggtgaaagcggagggagctacggaggcggtgaagaggcttccggctccggagggggatacgggggaggcagcggaaagtcctcccatagctag

SEQ ID NO: 227702 - DNA, 534 bp, synthetic construct
  misc_feature 1..534: note = Description of Artificial Sequence: Synthetic coding sequence
  source 1..534: mol_type = other DNA
atggcgtgctgtcagacaagtttttgcggattcccctcatgtagcacatctggaacctgtggttcttcttgttgccaaccatcatgttgcgaaaccagtagctgtcagcccagatgctgtgaaacgtcctgttgccagccctcctgctgccagacgtcgttctgcggattcccttctttctcaaccggaggaacttgtgactcaagctgctgccagccgtcctgctgtgagacaagctgctgccagcctagctgctaccagacgtcctcttgtggaaccggatgtggcatcggtggtggtatcggatatggtcaagaggggagttccggggctgtgagcaccaggatacgctggtgtaggcccgactgtcgagtcgaaggtacctgcctccctccctgctgcgtggtcagttgcacccctccgtcctgttgccagctacaccacgctgaagccagctgctgtcgaccgagttactgtggacagtcttgttgtcgtccggtttgttgctgctattgttcagaacctacatgctag

SEQ ID NO: 227703 - DNA, 504 bp, synthetic construct
  misc_feature 1..504: note = Description of Artificial Sequence: Synthetic coding sequence
  source 1..504: mol_type = other DNA
atggcctgttgtcaaacatccttttgcggattcccgagctgcagtacctctggcacgtgtggcagtagctgttgccagccgcgttgttgtgaaacaagttgttgtcagccctcctgctgtcagacaagcttctgcgggtttccgtcattttccactggtggtacgtgtgatagctcgtgttgccaaccaagctgttgcgagacatcatgctgccagccatcttgttaccagactagctcttgcggtacaggctgtggaataggcggtggcatcggttacggacaggaagggtcatcaggcgcagtgagtacccgaattcgatggtgtcgccctgactgtagagtggaaggaacgtgcttacctccttgctgtgtcgtgagctgtaccccacccagttgctgtcagctgcaccacgctgaggcctcgtgttgtcggcctagttattgtggacagtcctgctgccgacccgtctgctgctgctactgctcggagccaacgtgctag

SEQ ID NO: 227704 - DNA, 492 bp, synthetic construct
  misc_feature 1..492: note = Description of Artificial Sequence: Synthetic coding sequence
  source 1..492: mol_type = other DNA
atgtcatttaattgttccacgcgaaactgtagcagcaggcccatcggcggtcgatgcatagtcccagtggcccaggtgacaaccacaagcaccaccgatgccgactgcctaggcggaatatgccttcccagcagcttccagacaggctcttggcttctcgaccattgtcaggagacctgttgcgagccgaccgcttgtcagcctacatgttatcggcgaactagttgcgtgtccaacccctgtcaggtgacctgttcacgccagactacctgcatatccaacccctgcagtactacttactcaaggcccctgacatttgtgagctctgggtgtcagcccctgggaggtatctcttccgtctgccagcctgtcggtggaatcagtaccgtatgccagcccgtggggggagtctctacagtatgccagccagcttgcggcgtgagccgtacgtaccagcagtcttgcgtcagctcttgcaggagaacgtgctag

SEQ ID NO: 227705 - DNA, 504 bp, synthetic construct
  misc_feature 1..504: note = Description of Artificial Sequence: Synthetic coding sequence
  source 1..504: mol_type = other DNA
atgacctgctgtcagacatcattttgtggctatccaagttgttcaacctcaggaacctgcgggtcctcctgctgccagcctagctgttgtgagacctcatgctgtcaaccatcctgctgccagacctcattctgtggattcccaagttttagcacttcaggcacgtgcagctccagctgttgccagccatcttgctgtgagacaagttgctgccagccaagttgttgccagaccagttcttgcggaactggatgcggtattgggggaggcatcggctacggtcaggaaggctcttccggtgccgtctctacccgtatccggtggtgccgtcccgactgtagagtcgaggggacctgcctcccgccttgctgtgtagtgtcttgtacaccccctacctgttgtcagctgcatcacgctgaagccagctgctgccgaccgtcctattgcgggcaatcatgttgccgcccagtttgctgctgttactcctgcgaacctacctgttag

SEQ ID NO: 227706 - DNA, 366 bp, synthetic construct
  misc_feature 1..366: note = Description of Artificial Sequence: Synthetic coding sequence
  source 1..366: mol_type = other DNA
atggcatcctgttctacgtctggtacttgcggcagttcatgctgccagccatcctgctgtgaaacatcatgttgtcagccatcttgttgtcaaacatcatcttgtggcacaggctgcggaattgggggtggaattggttatggccaggaaggcagcggcggttccgtaagcacacgcatacgctggtgccaccccgattgtcacgtcgaggggacctgcctcccaccctgttacctggtgagttgtactccccctagctgctgccagctccaccacgccgaagcttcgtgctgccgcccatcgtactgtggacagagctgttgtaggccagcttgctgttgccactgttgtgagcctacctgctag

SEQ ID NO: 227707 - DNA, 837 bp, synthetic construct
  misc_feature 1..837: note = Description of Artificial Sequence: Synthetic coding sequence
  source 1..837: mol_type = other DNA
atgggttgttgtggatgttcgggtggatgcgggtcaagctgcggcggttgcggctcagggtgcggaggatgcggctcaggttgtggaggctgcggttctggctgcggaggctctggttcctcatgttgcgtgcccgtgtgttgctgtaaaccagtgtgttgtagagtaccaacctgctcatgttcatcttgtggtaagggcggatgcggctcaagtggcggtagcaagggagggtgcggatcttgtggcggatgcaaaggaggatgtgggtcctgcggtggatccaaagggggatgcggtagctgtggagggtcgaagggcggatgtggctcatgtggaggttcaaagggagggtgcggctccggatgtggcggatgcgggagttcgtgctgcgtaccagtgtgctgctgtaagcccatgtgctgttgcgtgccagcctgctcctgttcaagttgtggcaaaggcggatgtgggagctgtggatgttcaaagggtgcctgcggaagctgtggcggttcaaaggggggatgcggctcttgtgggggatgtaagggtggctgcggctcgtgcgggggatcaaaaggcggttgtggcagcggatgcgggggttgcggttccggctgcggggtaccagtttgttgttgcagctgcagtagttgtggaagctgtgccggtagcaaggggggttgcgggagctcctgctcacagtgttcttgctgtaaaccgtgctgctgctcttcaggatgtgggtcctcttgttgtcaaagcagctgctgtaagccttgctgttctcaatcaagttgttgtgtcccagtgtgttgtcaatgtaaaatatag

SEQ ID NO: 227708 - DNA, 510 bp, synthetic construct
  misc_feature 1..510: note = Description of Artificial Sequence: Synthetic coding sequence
  source 1..510: mol_type = other DNA
atgggctgttgcggctgttctggaggctgcggcagcagctgcggaggatgtgattcaagttgtggctcatgcggatcaggctgcagaggatgcggcccatcttgctgcgcccctgtgtactgttgtaaacccgtgtgttgttgcgtccccgcatgtagctgtagcagttgcggaaaacgcggatgcggttcttgcggaggctcgaagggcggttgtgggtcgtgcggctgctcccaatgttcatgctgcaagccctgttgctgctccagcgggtgcggcagctcttgttgccagtgttcctgttgtaagccttattgttcgcaatgcagctgttgcaaaccctgctgctcttcctccgggagaggttcatcatgttgccaatcttcttgttgtaagccttgttgtagcagttccggctgtggctcctcttgttgtcagtctagttgttgcaagccatgctgcagccagtcccgttgctgcgtcccagtttgctatcagtgcaaaatttag

SEQ ID NO: 227709 - DNA, 1740 bp, synthetic construct
  misc_feature 1..1740: note = Description of Artificial Sequence: Synthetic coding sequence
  source 1..1740: mol_type = other DNA
atgtgtgatcagcagcagattcagtgtaggctcccactgcagcagtgttgtgtgaagggaccgagcttctgttcctcccagtccccgttcgctcagtcccaagtcgtggtgcaggccccttgtgagatgcagatagtggattgccccgcttcttgcccggtgcaggtttgccaagtgagtgatcaggccccatgtcagtctcagaccacacaggttaagtgccagagcaagaccaaacaagtcaagggccaggctcagtgtcagagtaagacaactcaggtcaaaggtcaagctgcatcgcagtctcagacctcttctgtacagtcccaagctccctgtcaatccgaggtgtcctacgtgcagtgcgaggcttcgcagcctgttcagacttgcttcgtcgagtgcgccccagtctgttatactgaaacctgctatgtggagtgcccggtgcagaactatgtcccctgtccagctcctcagcctgtccagatgtataggggccgaccagccgtgtgccagccgcagggtcgcttttctactcaatgccagtaccagggctcctactctagttgcgggcctcagtttcagagccgcgcaacctgcaacaactatacccctcagttccagctcaggccatcttatagctcctgcttccctcagtaccgctctcggacaagttttagcccttgcgtgcctcagtgtcagacccaaggctcatatggttctttcaccgagcagcatcggtcccggagcacgagccggtgcctacccccaccccgacgcttgcagttgttccccagatcctgttctccgcctcgtaggtttgaaccctgttcgtcttcttacctgcctctgaggcctagcgagggcttccccaattattgcactccccctcgcaggagtgagccgatttataacagcaggtgcccacggagacccatctcctcttgcagccagcggagaggcccaaaatgtaggatcgaaattagctctccatgttgccctagacaggtgcccccacagagatgccccgtggagattccgccaatcaggcgccgttcgcagtcctgtgggccacagccttcgtggggagccagctgccccgaactgagaccacacgtggagccgaggcccctgccgagcttttgtcctccaaggagattagatcagtgccctgagtctccacttcaacgttgtccacctccagcccctcgccctcgcctgcggcctgagccctgtatcagtttggagcccaggcctcgccctctaccccgtcagctctcggagccctgcctctaccctgaacccctgcccgctctgagaccgaccccacgccctgtgccgttacctcgtcctgggcagtgtgagatccccgagcctcggccatgtctacagccatgtgagcaccccgaaccgtgtccacggcctgagccaatcccacttccggcaccttgcccttctcctgaaccctgtagggagacctggaggagccccagtccctgctgggggccaaatcctgtgccctacccaggtgatctggggtgtcacgaatcttcaccacataggctggatactgaggccccttattgcggaccttcctcatacaatcaagggcaggaatccggtgctgggtgtgggcctggcgacgtctttcccgaacgccgtgggcaggacgggcacggcgaccaggggaatgcctttgctggagtgaagggagaagcaaagtccgcctacttctag

SEQ ID NO: 227710 - DNA, 1059 bp, synthetic construct
  misc_feature 1..1059: note = Description of Artificial Sequence: Synthetic coding sequence
  source 1..1059: mol_type = other DNA
atggcgggaaccatttgtttcatcatgtgggtgttatttattacagataccgtgtggagtagatccgtaagacaggtgtatgaagtgcacgattcagacgattggactatccacgactttgagtgccctatggaatgcttttgtcccccatccttccctacagctctgtattgcgaaaatcggggactgaaggaaattccggcaataccctcccggatctggtatctctatctgcaaaacaatctgatcgagaccatacccgaaaaaccctttgaaaacgctacccaactgcgctggatcaacctaaataagaataagataaccaactatggcatcgaaaagggcgctttgtcacaactgaaaaaactgctgttcctatttctagaagacaacgagttggaggaggtcccaagcccactgcctcggtctctggagcagctgcagctggctcggaacaaagtctctcgcatcccgcagggcaccttcagcaatttggagaatctgacattgctcgatcttcaaaataataaattagtagataacgcctttcagagagacacctttaagggactcaagaacctcatgcagctcaacatggcaaaaaatgctttgcgaaacatgccacctagactccctgccaatactatgcagttattcctggataataactcgattgaaggtatacccgagaattacttcaatgtcattcccaaggtcgccttcctgaggctcaaccacaataagctctcagatgaagggctgccttcccgcggatttgatgttagctcaatattggatctccaactgagccataatcagctaacaaaggtgcccaggatcagcgcacacctccagcacctgcacttggatcacaataagatcaaaagtgtgaacgtgtccgtcatatgccccagccccagcatgcttcccgcagagcgggacagcttctcctatggaccccacctgcgttatctgcgtctggacggaaacgaaatcaaaccacctattcctatggccttaatgacgtgttttcgattgcttcaggctgtgataatttag

SEQ ID NO: 227711 - DNA, 897 bp, synthetic construct
  misc_feature 1..897: note = Description of Artificial Sequence: Synthetic coding sequence
  source 1..897: mol_type = other DNA
atggaagaaaagcaaattctgtgcgttgggctggtagtgctcgatgtaataagcctggtagataagtaccccaaagaagatagtgaaattcggtgtctcagtcaaagatggcagcgagggggaaacgctagcaactcctgcacagtgctgtctctccttggtgcaccctgcgcctttatgggatccatggcccctggacatgtggctgattttcttgtggctgactttagaagacgcggtgttgacgtatcccaggttgcctggcagtccaagggagacacaccctcttcctgttgcattatcaataactctaatggaaaccggacaatcgtactacatgacacttcactcccagatgtaagcgctaccgatttcgagaaggtcgacttgactcagttcaaatggattcacatcgaggggaggaacgcttctgaacaagtgaaaatgctgcaaagaattgatgcccacaacacgaggcaacctccagaacagaagatcagagtgtctgtggaagtggagaagccacgtgaggaactttttcagctcttcggttatggggatgtggtgttcgtgagcaaagatgtggccaagcacctggggttccaaagtgctgaggaagctctgcggggattgtacggtagagtgcggaaaggggcagtgctggtgtgtgcctgggccgaagagggcgcagacgcactgggtccggacggcaaactgctgcactctgatgccttcccaccgcctcgcgtcgtggacaccttgggtgctggggatacctttaatgcctccgtgatcttcagcctgtctcagggccgaagcgtacaagaggctctgcgtttcgggtgtcaagtcgcaggaaagaagtgtggcctgcagggattcgacggaatagtatag

SEQ ID NO: 227712 - DNA, 897 bp, synthetic construct
  misc_feature 1..897: note = Description of Artificial Sequence: Synthetic coding sequence
  source 1..897: mol_type = other DNA
atggaggagaaacagattttatgcgttggactggtggtgctggacgtgatcagcttggttgataagtaccctaaagaggatagcgaaatccgatgtctgtcccagaggtggcaacggggaggaaacgcatcgaacagctgcaccgtcctgtcactcttgggcgctccttgtgcttttatgggcagcatggctcccggacacgtggccgacttcgtcttagacgacctgcgcaggtacagtgtggaccttaggtatacggtgttccagacaaccggctctgttcctatcgctactgtgattataaacgaggctagcgggtcccgcaccattctgtattacgacaggtcattgccagatgtttccgctacagactttgagaaagtggacctcactcaattcaaatggatccatatcgagggtaggaatgcttccgaacaggtcaagatgttacaaaggatcgatgcccataacaccaggcagccgccagaacagaaaatcagagtgagtgtggaggtggaaaaaccccgagaggagctatttcaattatttggatacggagatgtggttttcgtatctaaggatgtcgccaaacacttgggcttccagagtgcagaggaggctctcaggggcctgtacgggagggttagaaaaggggctgtcctcgtctgcgcctgggccgaggaaggagcggacgcactgggtcccgatggcaaacttttgcattcggacgcttttccacctccgagagtagtcgacactctgggagccggagacacctttaacgcatcagttattttttctctctcccagggccgttcagtgcaggaggcacttcgatttgggtgtcaagtggccggaaaaaagtgtggcttgcagggtttcgacggcatcgtctag

SEQ ID NO: 227713 - DNA, 1041 bp, synthetic construct
  misc_feature 1..1041: note = Description of Artificial Sequence: Synthetic coding sequence
  source 1..1041: mol_type = other DNA
atggaggaaaagtacctacctgagctgatggcggagaaggactccctagacccatcatttacccacgcattgaggcttgtgaatcaggagattgagaaattccaaaaaggagaggggaaggacgaagagaagtacattgacgtggtgattaacaaaaatatgaagctggggcaaaaagtcctgataccagtgaagcaatttcccaaatttaacttcgtgggcaagctccttgggccacggggaaatagtctaaagcggttgcaggaagagacacttacaaaaatgtcaatattgggtaaaggttccatgagggataaggccaaggaggaggagctgagaaaatcaggggaagccaagtatttccatctcaacgacgacttgcacgtgctgatcgaggtgtttgctccacctgcagaggcatacgctcgaatgggacatgctctggaggaaataaaaaaattcttgattcctgactacaacgatgagattcgccaagcacagctccaggagctgacctaccttaacggagggagtgagaacgctgacgtaccggtggtgagaggcaaaccaaccctccgcactcgaggggtgcccgcaccggcaatcacacgcggtagggggggtgtcactgctagaccagtcggcgtggttgtgccaagaggcacaccaacccccaggggcgtactgtcgacacgcggtcccgtgagccggggtcggggactcttgaccccacgggcacggggtgtgccccctaccggttatcgcccacctccgcctcctccaacccaggagacttacggggagtacgattacgacgacgggtacggtactgcttatgacgaacaatcgtacgactcatatgataattcttatagtacacccgcacagtccggcgcagactactacgattatgggcacggactgagtgaagagacttatgacagctatggccaggaggagtggacaaactcgcgtcacaaggctccctctgccaggactgcaaaaggtgtctatcgtgatcagccttacggacgctactag

SEQ ID NO: 227714 - DNA, 495 bp, synthetic construct
  misc_feature 1..495: note = Description of Artificial Sequence: Synthetic coding sequence
  source 1..495: mol_type = other DNA
atggacatggggaccagcgcattgagcaagaagccatggtggactttgccccaaaacttccatgctcctatggtgtttcatatggaggaagatcaagaagagttaattttcggacatggcgatacctatctgcgttgtatagaagtccattcccacaccctgatccagctggaatcttggttcaccgccactggtcagaccagggtgacagtcgtggggccacatagagccaggcagtggcttctacacatgttttgctgtgtggggtctcaggactcctaccaccatgcgcgtggtttggagatgcttgaaagagtcagatcccagccccttaccaatgatgatctggttacttctataagtgtgccaccatataccggtgacttgtccttggccccacgtatctcaggcacagtgtgcctcagtgtccctcagccaagcccataccaggtgatcgggtgttctggctttcacctttccagtctttacccctag

SEQ ID NO: 227715 - DNA, 714 bp, synthetic construct
  misc_feature 1..714: note = Description of Artificial Sequence: Synthetic coding sequence
  source 1..714: mol_type = other DNA
atgttgtccgctttccagcggctgtttagagtactctttgtgatcgagacagtttccgaatacggagtgctgattttcatttatggatggccattcttacaaactctcgccatgctgctgatcggcaccgtgtctttccatctgtggattcggaggaatagggaacgcaattcccggtctggaaagactcgatgtagatcgaagcgctctgaacagagcatggacatggggacatcggcccttagcaagaaaccctggtggacactgccgcaaaacttccacgccccaatggttttccacatggaggaggaccaggaggaactcatttttggccacggtgatacctacctgagatgtatagaggtgcactcacacactttgatacagttagaaagctggttcactgcgacaggtcagactcgggtgacagtagtagggccacatagggccagacagtggctgctccatatgttttgttgcgtgggatcgcaggatagttaccaccacgcgcgaggactggaaatgctggagcgggtaagaagccagcccctgacgaacgacgacctagtcaccagcatctctgtcccaccgtacaccggggacctcagtctagcgccaagaattagcggaaccgtgtgtcttagtgtgccccagcccagcccatatcaagttatcggctgtagcggttttcatctgagttctctttatccatag

SEQ ID NO: 227716 - DNA, 297 bp, synthetic construct
  misc_feature 1..297: note = Description of Artificial Sequence: Synthetic coding sequence
  source 1..297: mol_type = other DNA
atggacatggggacatctgcactgagcaagaagccctggtggacactgccccagaattttcacgccccaatggtgttccatatggaagaagatcaggaggaattgatattcggtcacggagacacctatctcaggtgcattgaagttcattcccataccctgattcaactggaaagctggtttaccgccacaggacagacgcgggttaccgtggtggggccacatcgagctcgacagtggctgctgcacatgttttgctgcgtggggagccaggactcttaccaccacgctagatag

SEQ ID NO: 227717 - DNA, 2133 bp, synthetic construct
  misc_feature 1..2133: note = Description of Artificial Sequence: Synthetic coding sequence
  source 1..2133: mol_type = other DNA
atgtccgactatagcaccggaggcccaccacctggcccacccccaccagccggtggcggaggaggagccggtggcgcagggggagggccaccacctggcccaccaggggctggggatagggggggtggtggcccaggcggtgggggaccagggggaggttccgccggaggaccctcccagcccccaggaggtggtggcccagggatccgcaaagacgcctttgctgacgccgttcagcgggctaggcagatcgctgctaaaatcggcggtgatgccgctaccacagtgaacaatagtacacccgacttcgggttcggcggtcagaaaaggcagctggaggacggagatcagcctgagagcaagaagctggctagtcagggagatagcatcagctcacaactggggcctattcatccacctccacgcacttcaatgaccgaggagtatcgggtgcctgatgggatggttggcctgatcatagggcgagggggagagcaaatcaacaagattcaacaggactcagggtgtaaggttcagataagcccagactctgggggtttacccgagagaagtgtgagtctcacaggggcacctgagtccgtgcagaaggcgaaaatgatgctagacgacattgtatcaagaggacgcggtggtcctcctggacaatttcatgataatgcgaacggcggtcagaacgggactgtgcaggaaataatgattccagccggtaaagcgggacttgtgatcggcaagggcggtgagactataaagcagcttcaggagagagccggagtcaagatgattctgatacaagacgggtcccagaacacaaacgtggataagccactaaggatcatcggagatccttacaaagtgcagcaggcttgcgaaatggttatggacattcttcgcgagcgggaccagggtggtttcggagatagaaacgaatacggatcaagaatcggcggtggcattgatgtgccagttccccgacatagtgtcggagtggtaattgggagatccggggagatgatcaaaaagattcagaacgatgccggtgtccgtattcaatttaaacaagatgatggcacggggccagaaaagattgctcacatcatggggcctcccgacaggtgcgagcacgcagctcggataattaacgacctcctgcagtccctccgttctgggcctcctggccctcccggtggacccggaatgccgccaggcggacggggaagaggaagggggcaaggtaactgggggccacctggcggagagatgacgttctccatacccacccacaagtgcggtctggtcattggtagggggggagagaacgtgaaggccatcaatcagcagacaggcgcattcgttgagatcagcaggcagttgccacctaatggagacccaaatttcaaactcttcatcatccgaggttcccctcagcagatcgaccatgccaagcaactgatcgaggaaaaaatagaagggcctctgtgtcccgttggaccaggaccagggggacccggtcccgctggccctatggggcctttcaatcccggaccgtttaatcagggcccacctggcgcaccccctcatgccggagggcctccacctcaccaatacccccctcagggctgggggaatacttaccctcagtggcagccccctgcgcctcacgatccttccaaggccgcagctgctgccgcagaccccaacgccgcttgggctgcctactactcccactattaccagcaacccccaggccctgtgcctgggccagcacctgcgcctgctgctccaccagcgcaaggcgagcctccacaacctccacctacgggtcagagcgactatactaaggcttgggaggaatactataaaaagattgggcaacagcctcagcagcctggcgctcctccacagcaggactacaccaaggcttgggaagaatactacaagaagcaagctcaagtggccactggcggaggtccaggcgcacccccagggtttctggcacccccaacggttttccagcctctcctcagttctgctctggcccagcttcccaggcctagaccttccccgcttcccggactggtttgctgcttgttcatctgtagccgcggagactag

SEQ ID NO: 227718 - DNA, 2136 bp, synthetic construct
  misc_feature 1..2136: note = Description of Artificial Sequence: Synthetic coding sequence
  source 1..2136: mol_type = other DNA
atgtcagactatagcactggagggcctcccccaggaccaccgccacccgctggagggggaggtggagctggaggagctggcggaggaccaccacctggccctccaggagcaggcgacagggggggtgggggtccgggaggaggaggacccggaggaggatctgctggcggtccatctcaacctcctggaggaggcggaccagggattagaaaagacgctttcgcggatgcagtgcaacgagccagacaaattgcagctaagattggaggcgacgctgcaacaacagtgaataactcaacccctgatttcggctttgggggacagaaacggcaattagaggatggtgaccaaccagagagcaagaagttggcttctcaaggtgactccatttcaagccagttgggtccaattcaccctccccctcgaacgtcaatgacagaagagtatcgcgtccccgatgggatggtgggactgatcatcggtcggggaggcgagcaaataaataagattcagcaggactccggctgcaaagtccaaatatcccccgattcagggggactgcccgagagaagtgtgagtctcacaggagcaccagagtctgtgcagaaggcaaaaatgatgttggatgatattgtctctagaggtcgcggaggccctcccggtcagttccacgacaacgccaatggaggccagaacggcactgtgcaagaaataatgatccctgcaggaaaagctggacttgtaattggcaagggaggcgagaccatcaaacaactccaggagagagccggagtcaaaatgatcttaatacaggacggcagccagaacaccaacgttgacaaacccctccgcatcattggcgatccatataaagtccaacaggcatgtgaaatggtaatggatatactcagggagagggatcaaggaggctttggggacaggaatgaatacggctcacggattggcggtggtatcgatgtgcccgtgccccgacactcagtcggtgtcgtgatcgggagatctggcgaaatgatcaaaaaaatccagaacgacgcaggcgtccgcattcagtttaagcaagacgacgggaccggaccagaaaagattgctcatatcatggggccacccgaccggtgtgaacacgccgcacgaattattaacgatttacttcagtctctcaggtctggcccacctgggcctcctggcggtccgggaatgccgcctggtggcaggggccgtgggcgtggccagggtaattgggggcctccaggaggggaaatgaccttttcgatacccacacataaatgtgggctagtcatcggtcgcggaggagagaacgtgaaggcgattaatcagcagacaggggctttcgtggagattagcaggcagctgcctcctaacggggaccccaatttcaagctatttatcatccgaggctcaccacaacaaatagaccacgccaagcagcttatagaagaaaagatcgaggggccactttgcccagtgggtccaggccctgggggacctggacctgctggcccaatgggacctttcaaccccggaccgttcaaccagggtcctccaggggcacctccccatgccggaggccctccacctcatcaatacccacctcaggggtggggcaatacctaccctcaatggcagcccccagcaccgcacgacccctccaaggccgctgccgcagctgctgacccaaacgctgcttgggctgcttattactcccattattatcaacagcctcctggtccggtgcccggacccgcacctgctccagccgctcccccagcccagggagaacctccgcagccaccacccaccggacagagtgattacacaaaggcctgggaggagtactataagaagattggccagcagccccaacaacccggagcccctcctcaacaggactataccaaggcatgggaggagtactacaagaagcaagcgcaggtagctaccggtggcggaccgggagctcctccgggaagccagcccgattatagtgcggcttgggctgagtactaccggcagcaagctgcctactatggacagacacctgggccagggggaccacagccccctccaacacagcaaggccagcaacaagcccagtag

SEQ ID NO: 227719 - DNA, 1095 bp, synthetic construct
  misc_feature 1..1095: note = Description of Artificial Sequence: Synthetic coding sequence
  source 1..1095: mol_type = other DNA
atgtccgactacagtcccggtgggggtagcgccggagggcctagccagccacccggaggcggaggcccaggaattagaaaagatgcgttcgccgatgccgttcagagggctaggcagatagctgccaagattggcggtgacgctgccactacagtgaataattcaactccggacttcggatttggtgggcagaaacgacagctggaggatggcgaccagcctgaatctaagaagcttgccagccaaggggactcaattagctctcagttaggcccaattcaccctccccctcgcacatcaatgaccgaggaatatagagttcccgacgggatggtcggcctgattatcggtcggggtggggaacagataaacaaaattcagcaggattctggatgcaaggtgcaaatcagccccgatagcggtggcctacctgagcggagcgttagccttaccggtgcacctgaatcagtccagaaggctaaaatgatgctcgatgacattgtgtcgaggggtcggggaggacctcccggacaatttcacgataatgcaaacggtggacaaaacggcaccgtgcaagaaattatgatccccgcagggaaagcaggcctcgtcattggtaaaggaggagagacaattaaacagttgcaagaacgagctggagtgaagatgatattgattcaggacggaagccaaaataccaatgtggataaacctttgcggataatcggcgatccttataaagtccagcaggcttgtgaaatggtgatggacattctcagagaaagagaccaggggggattcggtgatcgaaatgaatacgggtctagaatcggtgggggaatcgacgtgcctgttcccagacacagcgtaggcgtcgttattggaagaagtggagagatgataaagaaaattcagaacgacgctggagttagaatacagttcaagcaagatgacggcaccgggcctgagaagatagcccacataatggggcctccagacagatgtgaacacgccgctagaatcattaacgatccaagtagctctagctttcttctccccactccgggacatcgcccttcttgcctgtcaggatag

SEQ ID NO: 227720 - DNA, 255 bp, synthetic construct
  misc_feature 1..255: note = Description of Artificial Sequence: Synthetic coding sequence
  source 1..255: mol_type = other DNA
atggatgacgatgccgcaccaagggttgagggagtcccggtcgccgtgcacaagcacgccctgcacgacggccttaggcaggtggccggtcccggagccgctgcagcccacttgcctaggtggccgccaccccagctggccgcatcaagacgcgaagctccaccgttaagtcaaaggccgcaccgaactcaaggcgcagggtctccgccagagaccaatgaaaagctgaccaaccctcaggtgaaggagaaatag

SEQ ID NO: 227721 - DNA, 822 bp, synthetic construct
  misc_feature 1..822: note = Description of Artificial Sequence: Synthetic coding sequence
  source 1..822: mol_type = other DNA
atgagtatgagccctactgtgatcatcctggcttgtttgggcttcttcctggaccagtcggtttgggcccacgtaggtggccaagataagccgttttgctcggcctggccatctgccgtagttccccaaggtgggcatgtgacattgaggtgccactatcgaagaggattcaacatcttcacactctacaaaaaagatggggtgccggtaccggaattgtacaaccgaatcttttggaattcctttcttattagccccgtgacccccgcacatgccggaacatacagatgccgcggttttcaccctcactccccaacagagtggtccgccccttctaaccctctcgttattatggtcactgggctttacgaaaagccatctctgactgcacgaccagggcctactgttagagcgggtgaaaacgtgacactctcttgctctagccagtcctcgttcgacatttatcacttgagccgggagggagaggcacacgaactacgtttgccagctgtgccatcaatcaatggtacctttcaggcagatttcccactgggtccagctactcacggcgagacatatagatgcttcgggagcttccacggaagcccctatgaatggtcagacccgagcgatcctttacctgtaagcgtgactggaaatccatcaagcagctggccttctcctacagagcccagtttcaaaaccggtatcgcgcgacacttgcacgcagtcattcgttactcagttgctataattctgttcaccatattgcctttcttcctgctgcaccgatggtgctccaaaaaaaaaatgctcctgtag

SEQ ID NO: 227722 - DNA, 1269 bp, synthetic construct
  misc_feature 1..1269: note = Description of Artificial Sequence: Synthetic coding sequence
  source 1..1269: mol_type = other DNA
atggggggtcaggataaacccttcctgtcggcttggccttctgcggttgtacctcgaggtggccacgtgactttgaggtgccattaccgacatcggtttaacaattttatgctgtataaagaggatagaattcatatcccgatctttcacggccgaattttccaggagtctttcaatatgagccctgtcacaactgctcatgctgggaattatacctgcaggggctcacatccgcactcccccacaggctggtctgcaccttctaaccctgtcgtgattatggtgaccgggaatcaccggaagccctccctgctggctcatccagggccactggtgaagtcaggggaaagagtaatcctgcagtgctggagcgatattatgttcgaacattttttcctgcataaagagggaattagtaaggatccatctaggctggtgggccagatccacgatggggtcagtaaggccaacttcagtatcgggcctatgatgctggccctggctggcacctaccggtgttacgggagcgtgacacataccccataccaactcagcgccccttcagaccccttagatatcgtcgtgactggaccatacgagaagccatcgcttagcgcacagccgggacccaaggttcaggccggagaatcagtcaccctctcctgttctagccgaagttcctacgacatgtaccatctgagcagggaaggaggtgcccacgaaaggaggctccctgcagtgaggaaagtcaatcgaactttccaagctgacttcccactcggcccagccacccacgggggaacttaccgatgtttcgggtcatttaggcatagtccctatgagtggtcagatccttcagaccccctcctggtgagcgtcacggggaatccctccagctcgtggccctccccgacagagccatcttctaagagtgggaacccgcgtcacctgcacattcttattggcacatcagtggttataatcctctttattctgttgctttttttcctcctgcacttgtggtgcagcaacaagaagaatgccgctgtgatggatcaggagccggctggcaataggacggctaatagcgaggactctgatgaacaggacccggaggaggtcacgtatgcgcagctcgatcattgcgtctttacacagaggaaaattacgcgcccttcccagcggccaaaaacaccaccaaccgacacgattctttacacagaactgcctaacgccaagcccagaagcaaggtggtgtcttgtccatag

SEQ ID NO: 227723 - DNA, 1050 bp, synthetic construct
  misc_feature 1..1050: note = Description of Artificial Sequence: Synthetic coding sequence
  source 1..1050: mol_type = other DNA
atgtcacttatggtagtgagcatggcgtgcgtgggactgtttctcgtgcagagggccggtcctcacatgggaaatcatcgcaagccaagccttctggcacaccccggtcctcttgtcaaatcaggtgagagggtcatcctgcagtgctggtcggacatcatgtttgagcactttttcctgcataaggaaggtatcagcaaggaccccagccggctggtgggacagattcatgacggcgtcagtaaggcgaattttagcataggaccaatgatgctcgctctcgcaggcacataccggtgttatggttctgtcactcataccccgtaccagctctccgctcctagcgatccactagacatagtcgttacggggccatatgagaaaccttcactctccgcccagcctggcccaaaagtacaggctggagagtctgtgacgttgtcttgtagttcgcggtccagttacgatatgtaccatctgtccagggaaggaggagcacacgagcgacgcttgcccgcagtcaggaaggtgaatcggacttttcaggccgattttcctcttggaccggcaacgcatggaggaacctatcggtgctttggttccttcagacacagtccttacgaatggtcggatccaagcgacccactcctcgtgtccgtcacgggcaatcccagcagctcttggccaagcccaacagagccatcctctaagtctggcaatccacgacatctccacattctcatcggcacatccgtggtgatcatcctgttcatactactcctcttcttcttgttgcacctgtggtgctctaataaaaaaaacgccgcagttatggatcaggaaccagctgggaacagaacggccaattctgaggactcggacgagcaggatccagaggaggtgacgtatgcgcagctggatcactgtgtgtttactcaacgtaaaattacccgcccttcccagcgtcccaagactcccccaacagacacaattctgtataccgaactgccaaatgcaaagccgagatctaaagtggtttcatgtccatag

SEQ ID NO: 227724 - DNA, 1335 bp, synthetic construct
  misc_feature 1..1335: note = Description of Artificial Sequence: Synthetic coding sequence
  source 1..1335: mol_type = other DNA
atgtccttgatggtggtttcgatggcttgcgttggactgtttttagtacaacgggctggaccgcacatgggaggacaggataagcccttcctgtccgcgtggccttctgcggtcgtacccagggggggacacgtcacactgagatgtcattatagacaccgctttaataacttcatgctgtataaagaggatcgcatacacatccctattttccatggcagaatatttcaggaatccttcaacatgtctcctgtgacgactgcccacgcaggcaactacacttgccgaggaagccacccccactcacccacaggctggagtgcgcctagtaacccggttgtgatcatggtaactggcaaccaccgcaagccatctctgctggctcacccaggtcccctcgtgaaaagtggggagagagtgatactgcagtgttggtcagacatcatgtttgagcacttttttctgcacaaggagggaattagcaaagacccatcaaggttggtaggacagatccacgacggggtctccaaggcgaattttagtattggcccaatgatgcttgctttggcagggacctacagatgttatggctctgttacccacaccccctaccaactgtctgctcccagcgaccctctggacatagtcgtgaccgggccatacgagaaaccctcgctctcagcacaacctggaccgaaagtccaggccggagagagtgtcacgctgagttgtagctctcgcagcagttatgacatgtaccacttgtcaagagaagggggtgctcatgaacgcagactacccgcagtacgcaaagtcaatagaacattccaggctgacttccccctaggacctgctactcatggcggtacttatcgctgttttggatcctttaggcactctccatacgagtggagcgaccctagcgacccgctgttggtgagtgtgacaggcaatcccagctcatcttggcccagtcctaccgaaccaagctctaagtctggcaacccaaggcatctgcatattcttattggtacaagtgtggtcattatactatttattcttttactgttttttctgctgcacttgtggtgctctaataagaagaacgcagctgtcatggatcaggagcccgcagggaataggacagccaacagcgaggattctgatgagcaggatccagaggaggtgacgtatgcccaactcgaccactgtgttttcacgcagcgcaagattacaagaccatcccagagacctaagacaccacctaccgacaccattctatataccgagttacccaacgcgaaacctcggtccaaggtggtcagctgtccgtag

SEQ ID NO: 227725 - DNA, 1368 bp, synthetic construct
  misc_feature 1..1368: note = Description of Artificial Sequence: Synthetic coding sequence
  source 1..1368: mol_type = other DNA
atgagcctcatggtggtgagcatggcttgtgtcgggctctttctcgtgcagcgggctggaccccatatgggaggtcaggataagcccttcttgtctgcgtggccctcagctgttgttccacgtggaggccacgtgacccttcggtgtcattacaggcacagatttaacaactttatgctgtataaagaggaccgtattcacattcccattttccacgggaggatattccaagagtccttcaatatgagtccggtgaccacggcgcacgctggcaactacacttgtcgcggttcccatccccacagtccaactggatggagcgctccttctaatccagtagtgataatggtgacaggaaaccacaggaagccctccctgctggctcacccaggcccattggtcaagagcggagagagggttatactccagtgttggtccgacattatgtttgagcatttctttttacacaaagaagggatttcaaaggatccgtctcgactcgtagggcagatccatgacggggtgtccaaagccaacttcagcattggcccaatgatgcttgcgctggccggtacttacaggtgctacggttctgtgactcacaccccgtatcaactgagcgccccatctgaccctcttgacatcgtcgtgaccggaccatatgagaagccatcactcagtgcgcagcctggaccaaaggtgcaggccggtgaaagcgttactctgagctgctcttctcgctcatcctatgatatgtatcacctctctcgggagggcggagcccatgaacgtcgtcttccagcagtaaggaaggtcaatagaaccttccaagcagatttccctttggggcctgccacgcacggaggaacctaccgctgctttggttcttttcgtcacagcccttatgagtggagcgatccctcagaccctctgctggtatccgtcactgggaacccaagctcctcctggccgagtcctacggagcccagttccaaatccggtatctgccgtcatctgcacgttctgatcgggacgtctgtcgtgatcttcttgtttatcctgttactgtttttcctgttatacagatggtgctccaataagaagaatgccgcagtcatggaccaagaacccgcaggggatcggacagtgaatcggcaggattccgacgaacaagacccccaggaggtgacatacgcacagttggaccattgcgtgttcatccagagaaaaatctctcgaccgtctcagagacccaagacccccctgacggatacttcggtgtatactgaattgcccaatgccgagcctcgctctaaggttgtatcttgccctagagccccacagtcaggcctggagggcgtgttctag

SEQ ID NO: 227726 - DNA, 1335 bp, synthetic construct
  misc_feature 1..1335: note = Description of Artificial Sequence: Synthetic coding sequence
  source 1..1335: mol_type = other DNA
atgagtctgatggtcgtttctatggcttgcgtaggcctgttcttagtacaaagggccggtcctcacatgggaggccaggataaaccattcttgtcagcctggcccagcgccgtggtgcctcgaggcggtcacgtgactcttaggtgccattaccgccacaggttcaataatttcatgctgtacaaagaggatcgtatccacatacctatctttcatggcaggatcttccaggagagtttcaatatgagcccagtgaccactgcacacgccggaaactacacttgtcgcggtagccatcctcacagccctactggctggtccgcaccctccaaccccgtggtcattatggtcactggaaaccacaggaagccaagccttctggcacaccctgggccattagttaaatctggagagcgggtaatcctgcagtgctggtcagacatcatgttcgagcacttctttctgcataaggaggggatctcaaaggatccgtctcgattagtgggacagattcatgatggagtgtcaaaggccaatttctctattggccctatgatgctggctctggccggtacgtaccgatgttatggaagcgttacacacactccgtaccagctatcagcaccatccgacccactggacatcgtggtgaccggcccttacgaaaagcccagtctaagcgcacagcccggacctaaagtgcaggctggcgagtccgttacattgtcttgctctagcagaagctcctacgacatgtaccatctaagccgcgagggcggtgctcatgagcgcaggttgcccgcagttcggaaagtgaatagaaccttccaggcagacttccccctgggccctgcaacacatgggggaacctacaggtgttttggctcattcaggcattcaccgtacgagtggagcgatccttccgatccattgcttgtcagcgtcaccggtaaccccagcagttcttggccctctcctactgagccatccagtaaatccggaaatcctcgtcacctacacattttaatcggcacctctgtagtgatcattttgttcattctcctcctttttttcttactccacctctggtgcagtaataagaagaatgcggcagtcatggatcaagagccagcaggcaatcggactgctaatagtgaagattctgacgaacaagatccagaggaagttacgtacgcccagctggaccactgtgtctttacacaaagaaagatcacaaggcctagtcagcgcccaaagacgccccctaccgatactattctctacaccgaactacctaacgccaaacctcgctccaaggtggtatcctgcccttag

SEQ ID NO: 227727 - DNA, 1284 bp, synthetic construct
  misc_feature 1..1284: note = Description of Artificial Sequence: Synthetic coding sequence
  source 1..1284: mol_type = other DNA
atgagccttatggtggtttcaatggcctgtgtgggtttatttctggttcagcgggcagggccacatatgggtggccaggacaagcccttcctcagcgcatggccctcggcagtggtacctaggggagggcatgtgactctgcgatgtcactatcggcatcgtttcaataatttcatgttgtataaagaggatagaatacacattcccattttccacgggaggatttttcaggaatcatttaacatgtctcctgttaccacagcccatgctggcaactacacatgtagagggagccacccccattctcctaccgggtggtcagcgccttcgaaccctgttgttatcatggtgactggcaatcacaggaagccatcgttgctggcccatcctggaccactggttaagtcaggcgaacgggtgatcctccagtgctggagtgacataatgtttgagcacttcttccttcacaaagaagggatcagcaaggacccttctcgtctggtcggtcaaattcacgacggtgtgtctaaggccaatttctcaattgggccaatgatgctggccctggctggaacatatcgatgttacggatccgtcacacatactccttatcagctatcagcgccttcagaccctcttgacattgtggttactggcccttatgaaaaaccgtccctgtctgcccagcctggtcccaaagttcaggccggtgagagcgttaccctctcctgcagttcgcgttcatcatacgacatgtaccatctgagtcgtgaagggggagcacacgaaaggcgcctgcctgctgtaaggaaagtgaatcgtaccttccaggcagattttccactgggacccgctactcacggaggcacatacagatgttttggaagcttccgacatagcccatatgagtggtcggaccccagcgaccccctgctggtgtcagtaacaggcaatccgcgacacctccacatattgattgggacgagtgttgttattatcctgtttattttgctgttatttttcctcctccacttgtggtgctcgaacaagaaaaatgcagccgtgatggatcaggaaccagccggaaataggacagccaactccgaagactctgatgaacaggaccctgaagaggttacgtatgcccagctcgaccattgtgtgtttacccagcgtaagattactcgcccttctcagagacctaaaacaccaccaaccgacaccatcttatacacagagttgcccaacgccaagccacggagcaaggtggtgagctgtccctag

SEQ ID NO: 227728 - DNA, 1368 bp, synthetic construct
  misc_feature 1..1368: note = Description of Artificial Sequence: Synthetic coding sequence
  source 1..1368: mol_type = other DNA
atgtccctcacagttgtgagcatggcctgtgtgggcttctttctcttacaaggagcctggccacttatgggcggacaggataagccgtttttatccgcccgaccatccacagtggtgcctcggggtgggcacgttgcgctacagtgtcactacagacgcggttttaacaactttatgctctacaaagaggacagatcccatgtgcccatcttccatgggcgaatttttcaggaaagtttcattatgggccctgtgacccctgcccatgccggtacctatcggtgcagaggctccaggcctcacagcctgaccgggtggtcagccccttctaaccccttggtaattatggtgactggcaaccataggaagcctagcttgctcgcacacccgggaccgcttttaaaatctggagagacggttatcttacagtgctggtccgatgtaatgttcgagcatttttttctccatcgcgaaggcatctcagaggatccctcccgactcgtcgggcagatccacgatggagtgagcaaagccaatttctctatcggacccttgatgcccgtgctcgcaggaacgtaccgttgttatggcagcgtacctcacagcccatatcagttatcagccccaagtgatccgctcgacattgtcattactggactctacgagaagcccagtttgagtgcccaaccaggacctactgtgcaggccggagaaaacgtgactttgagctgcagtagctggtcctcatatgatatctatcatctgagccgggaaggggaggcccacgaaaggcggttacgcgctgtgcctaaggtgaatcgaactttccaggcagactttcccctggggccagcaacacacggcggaacctatcgatgcttcggctcttttcgggcattgccatgcgtgtggtccaatagctcggacccactgttagtgtcagttactggcaatccttcctcttcttggccctcgccgaccgaaccctcctctaaatctgggatttgccggcatctccacgtcctgatcggcacatccgtggtgatcttcctattcatcctacttctattcttcttattataccgttggtgttctaataaaaagaacgctgcagttatggatcaggagcccgctggggaccggacagtgaaccggcaggactccgatgagcaggaccctcaggaggtgacctatgcccaactagatcactgcgttttcatccagcggaagatttcaagaccgtcacaaaggccgaagactcctctgacagatacgtctgtttacaccgagctccccaacgcggaacccaggtccaaggtggttagttgtcctagggctccccagagcggcctcgaaggagtcttttag

SEQ ID NO: 227729 - DNA, 1047 bp, synthetic construct
  misc_feature 1..1047: note = Description of Artificial Sequence: Synthetic coding sequence
  source 1..1047: mol_type = other DNA
atgagtctgatggtggtgtccatggcatgtgttgggttcttcctcctgcagggggcttggcctcatgagggcgtgcaccggaaaccctcactgctggcgcaccccggaaggctggtgaagtccgaggaaactgtgatccttcaatgttggtcagatgtgcgattcgaacatttcctgctccaccgcgagggcaaatttaaggataccctccacctaatcggcgagcatcacgatggtgtctctaaggccaacttcagtattggcccaatgatgcaggacctggctggcacttatcgctgttatgggtccgttacacatagcccgtaccagttatccgccccaagcgaccccttagacattgtcattaccggcctgtatgagaagccctcactgagcgcccagcccggtcctaccgtgctggcaggagagtctgtgaccctgagctgttcatcaaggagtagttacgatatgtatcacctatcccgggagggcgaagcgcacgaatgtcgcttctccgcgggacccaaggtgaacggcacatttcaggctgacttccccttaggacccgcaacacatggcggaacctataggtgcttcggctcctttcgcgacagcccctacgagtggtcgaattctagcgatccccttttggtcagtgtcaccggcaatccgtctaacagctggccatcccccacagaacctagcagcaagacggggaatccaagacacctccatatcttgatcggcacatccgtggtgattatcctgttcatccttctcttcttcctgctgcaccggtggtgtagcaacaagaagaatgcggcagtaatggatcaggaatctgctgggaaccgtaccgccaatagcgaagatagcgacgaacaggaccctcaggaagtgacatacacacagttaaaccattgtgtttttacacagaggaaaataacccgtccctctcaacgccctaaaacccccccaacagatatcattgtgtacacagagctgcccaacgctgagagtcgctccaaagtagtctcctgcccgtag

SEQ ID NO: 227730 - DNA, 1128 bp, synthetic construct
  misc_feature 1..1128: note = Description of Artificial Sequence: Synthetic coding sequence
  source 1..1128: mol_type = other DNA
atgtcactgatggtcgtgtcgatggcctgtgttggtttcttcctcctgcaaggagcctggcctcacgagggaggacaggataaaccgctgctctctgcctggccatcagcagtagtgcctcgagggggtcacgtaacactgctttgtcgttcgagattgggcttcacaatctttagcctgtataaggaggacggtgttccggtaccggaactttataacaagatcttctggaagagtatcctgatgggtccagttactccagcacacgcaggcacctatagatgcagagggtctcaccctcggagtccaatcgagtggtctgcgcctagcaatccactggtcattgttgttactgggctattcggaaaaccctccctgtcagcacagcctggaccgacagtgcggactggggagaatgtgacactgtcatgttcctccaggagttcttttgacatgtaccacctgtcccgcgaaggacgtgcgcacgagccgagactgcccgcagtaccaagtgtaaatggcaccttccaggccgactttccactcggaccggctacacatggcggaacctacacgtgtttcggatctctccatgattctccctacgaatggtcagacccaagtgaccctctgttagtgtcagtgacaggaaatagctccagttcaagcagttctcctacggaacctagcagcaaaaccggcattcgacgtcacctgcacatcctcatagggacatccgtggcgatcatcctgttcataattctcttttttttcctgctccattgttgctgcagcaataagaagaatgcggcagtcatggaccaggagccagctggcgacaggaccgtgaatagggaagattccgatgatcaggacccccaggaagtgacatacgcccagctcgaccattgtgtctttacccagacgaagattacatctccctctcaacggccaaagactccaccgacagacacaacaatgtacatggagttaccaaatgccaaaccccgatcgcttagccccgcacacaaacaccactcccaggctttgagaggatcctctagggaaacaactgctctgagccagaatagagtcgccagtagtcatgtcccagctgctggcatttag

SEQ ID NO: 227731 - DNA, 1128 bp, synthetic construct
  misc_feature 1..1128: note = Description of Artificial Sequence: Synthetic coding sequence
  source 1..1128: mol_type = other DNA
atgagtctgatggttatttccatggcatgtgtgggtttttttctccttcagggagcctggactcatgagggagggcaggacaagcccctcttgtcagcgtggccatccgccgttgtgcccagaggaggacacgtgactctcctgtgtcgtagtagactgggattcacgattttttcgttgtataaagaggacggtgtcccagtgcccgaactctacaataagatcttctggaaaagcatcctcatgggcccagtgacccccgcacatgccggtacgtatcgctgccgcggttcccaccctcgcagccctatagagtggtctgcgccttccaatcccctggtcatcgttgtcacgggactcttcggtaagcccagtttatccgcccagcccggacccaccgtgcgcacaggcgagaacgtgactctgagctgctctagccgcagctcattcgatatgtaccacttaagccgagaggggagagctcatgagcctcggctcccggcagtcccttccgtgaatggcacctttcaggccgacttcccactgggtccagccactcatggtggtacgtacacatgtttcggctctctgcacgattcgccgtatgaatggagtgatccatctgatcccttgcttgtgtctgtgaccggaaacagtagctcaagttctagctcgcctacagagcctagcagcaaaacaggcataagaagacatctgcacattcttatcggaacatcggtggctattatactgtttattatactgtttttttttctcctgcactgctgttgttctaataagaagaatgcagcagtcatggatcaggaacccgctggagacaggacagtgaatcgtgaagacagcgacgatcaggaccctcaagaagttacctatgcccagcttgaccactgcgtctttacccaaaccaagattacttccccgtcccagcgacctaaaacccctcccactgacaccactatgtatatggagctgccgaacgctaaaccaagatccctctcaccggctcacaagcaccactcacaagccctccggggttccagccgagaaaccactgccctaagccagaaccgagtcgcctctagtcacgtgccagccgctggcatatag

SEQ ID NO: 227732 - DNA, 1164 bp, synthetic construct
  misc_feature 1..1164: note = Description of Artificial Sequence: Synthetic coding sequence
  source 1..1164: mol_type = other DNA
atgtcccttatggtcgtgagcatggcatgtgttggcctgttcctcgtgcaacgcgcaggtcctcatatgggtggacaggacaagccctttctgtccgcctggccctcggcggtagtgccccgaggcggacacgtgactttgcgttgtcattatagacatcggtttaacaacttcatgttgtataaggaggacaggatacatgtgccaatttttcacggacgcatctttcaggaaggttttaacatgagccctgtcacaaccgcgcacgccggtaattatacctgccgcggatcgcacccgcactctccgaccgggtggtctgctccttcaaaccctatggtcattatggttaccggcaatcatcgaaagccctcactgctggcccatccaggccctcttgtgaagagtggagaaagagtaattctgcagtgttggtcagacatcatgttcgagcactttttcctgcacaaagagtggatcagcaaggacccctcccggctagtaggacagatccatgatggcgtttctaaggctaatttttcgatcgggtccatgatgcgtgcactcgccggaacttaccggtgctatggctctgtgacccacactccgtaccaactgtctgccccttctgatcccctggatatagtggtcacaggcctatacgaaaagccctccctcagcgcacagccgggacccaaggtacaggctggcgaatctgtgactctgagctgctcttcacggtcaagttatgacatgtatcatctgagtagggaaggcggtgcccatgagcgacggctccccgcagtgagaaaggtcaatcgaaccttccaggctgactttcctctcggccctgctactcatgggggaacataccgttgctttggctcgttccggcactcgccttatgagtggtcagatcctagcgacccactgctggtcagcgtgactggaaatccatcttcctcctggccatctccaactgagccatctagtaagagtggaaacctgcgccacttgcatatcctgatcggcactagtgtcgtgaagattcctttcactatactgctattcttcctgcttcatcgttggtgcagcaataaaaaaaatgcagcagtgatggaccaagaaccggcaggaaatcggtccgagcagcgcggattctag

SEQ ID NO: 227733 - DNA, 1149 bp, synthetic construct
  misc_feature 1..1149: note = Description of Artificial Sequence: Synthetic coding sequence
  source 1..1149: mol_type = other DNA
atgctgctgatggtggtttccatggcgtgcgtggggcttttcctcgtgcagagagcgggtccgcacatggggggacaggacaaacctttcctttctgcttggccctcggccgtcgtgccccgaggcggacacgtgacactgagatgtcattataggcacagatttaacaacttcatgctctacaaagaggaccggatacatgttcctattttccacggccgaatcttccaggaagggtttaatatgagccccgtaaccacagctcacgctgggaactacacttgccgcggtagccacccccactcccctaccggatggagcgcaccaagcaaccccatggttatcatggtcactggcaatcacagaaaaccgtcactcttagctcacccaggcccactggtgaaaagtggcgaaagagtaatcttgcagtgctggagcgacatcatgttcgaacactttttcttgcacaaggagtggatttccaaggatccaagccggcttgttggtcagatccacgacggggtaagtaaagctaatttctctataggcagtatgatgcgggcattggctgggacctacagatgctacggttccgttactcacaccccatatcagctgtcagcgccatccgacccactggacatcgtggttaccggcctgtacgaaaagcccagtttgtcagcacaacccggtcctaaggtgcaggctggggagtctgtgaccttgagctgttcatcaagatctagctatgatatgtatcatttatccagagagggaggagcacatgaaagaaggttacctgccgtccggaaggtaaataggaccttccaggccgacttccccctcggtcctgctactcacgggggaacctaccgctgtttcggatccttccgccattctccttatgagtggtcagacccctcagaccctctgctagtttccgtgactgggaaccccagcagctcctggccaagcccaactgagcccagttccaagagtgggaatctcaggcacttacatatcttgataggaacgagcgtggttaaaatccctttcactatcctgcttttctttctgctgcacaggtggtgttccaataagaagaagtgttgctgtaatgggccacgcgcttgccgcgagcagaagtag

SEQ ID NO: 227734 - DNA, 1194 bp, synthetic construct
  misc_feature 1..1194: note = Description of Artificial Sequence: Synthetic coding sequence
  source 1..1194: mol_type = other DNA
atgagtcttatggttgtctcaatggcatgtgtgggatttttcctggatcaaagcgtgtgggcccatgtgggcggacaggacaaacctttctgtagcgcgtggccgtctgccgtggttccccaggggggacacgtgaccttgcggtgccattgcaggaggggtttcaacatctttacactgtacaagaaagatggggtccctgtgcctgagctctacaaccggattttctggaattcattcctgatctctcctgtcacccccgctcatgccggaacgtaccggtgcagaggctttcaccctcattccccgactgagtggtccgcccctagcaatcctcttgtgattatggtgactgggctgtatgagaagcctagtctgaccgcgaggcccggaccaacggtgagagctggagagaacgtgacactgagctgcagctcgcagtcgagttttgacatttatcatctcagccgggagggcgaagcacacgagttaagactgcctgctgttccatccatcaatggaacatttcaagccgactttccgttgggacctgcaacacacggagagacttatcgctgtttcggatcattccatgggagtccatacgaatggtctgaccccagcgatccactaccagtgtccgtcaccgggaatccatcgtcttcctggccatctccgaccgaaccctccttcaagacgggcatcgctagacatttgcatgcggttatcaggtactcagtcgcaataatcctctttacaattctcccgttttttttgctgcatcggtggtgcagtaagaaaaaagtttcactgaccaagcagcggcctgaaaatagtggtccttgcgccgaagctgggtgggagcacgccgacgccgctgtgatgaatcaggaaccagcaggccaccgcaccgttaaccgagaggattccgatgaacaggaccctcaggaggttacttatgcccaactggatcactgcattttcacgcagcgcaaaatcacaggacccagccagcgcagtaagcggcctagcacagacacgagtgtttgcattgagctcccgaacgcagagccacgcgctctgtctcccgcacatgaacaccacagccaagccctcatggggtcatcacgggagactacagccctgagccaaacacagctggcaagttccaacgttcctgcggctgggatctag

SEQ ID NO: 227735 - DNA, 1029 bp, synthetic construct
  misc_feature 1..1029: note = Description of Artificial Sequence: Synthetic coding sequence
  source 1..1029: mol_type = other DNA
atgtcaatgtcacctaccgtgattattctggcttgcctgggttttttcttagatcagagtgtctgggcccacgtgggtgggcaggataaacctttttgctccgcttggccctcagccgttgtgcctcaaggaggccatgtgaccctcaggtgtcattgccggaggggctttaacatattcacattgtacaagaaagacggagtgcccgtgcccgagctgtacaatagaattttctggaatagctttctgatcagccccgtaacacctgcacacgcgggaacctataggtgcaggggcttccacccgcacagccctaccgaatggagtgctccaagtaatcccttggtgatcatggtgactgggctttatgagaaaccatcactgacagcgaggccagggccaaccgtgagagccggagaaaacgtgaccctaagctgcagctcgcaatcctccttcgatatctaccacctgagtagggaaggggaagctcacgaactcaggcttcctgcagttccatcaatcaacggcacattccaggcagattttcccttgggccctgcaactcacggcgagacatatcgatgtttcggatcatttcacggttctccttatgagtggtctgatcctagcgatccgttacccgtttctgtcacagggaacccctcgtcaagttggcccagtcccactgaaccgtctttcaagacagatgcagcggttatgaatcaggagcccgctggccaccgtaccgtgaatagggaggactccgacgaacaagatccccaggaggtgacatacgcacagctcgatcattgcatatttacgcagcggaaaataacagggccatctcagcgcagcaagcgtccttcaaccgatacatcagtatgcattgagttaccaaacgcagaaccgagggccctgtcccctgcccatgagcaccattcgcaagccttgatgggatcctcccgggagaccacagcgttgtctcagacgcagctcgccagctcaaacgtccctgccgctggcatctag

SEQ ID NO: 227736 - DNA, 1083 bp, synthetic construct
  misc_feature 1..1083: note = Description of Artificial Sequence: Synthetic coding sequence
  source 1..1083: mol_type = other DNA
atgtctatgtccccgacggtgatcatactggcttgcttagggttcttcctggatcaatccgtgtgggcgcatgtgggaggacaggataagccattttgttccgcctggcccagcgccgttgtgccgcagggaggacacgtaacgctgaggtgccactgcagaagagggttcaacatctttaccctgtacaagaaagatggagtgcccgttcctgagctgtataataggatcttctggaattcttttcttattagtccagttactcccgctcacgccggaacttaccgctgtcgcggattccatccccactcgcctacagagtggagcgctcccagcaatcccttagtaatcatggtgactggcttatacgaaaagccaagcctcacagccagacccggacctacagtgcgcgcaggggaaaatgtgacgctctcctgcagcagccagagtagtttcgacatttaccatctcagcagggaaggggaagcccacgaattaaggctgccagctgtccctagcatcaatggtacctttcaggctgacttccccctgggacccgcaactcacggcgagacgtacaggtgttttggatcttttcatggtagtccctatgagtggtctgacccatcagaccccttgccagtgagtgtgacaggtatagcgaggcatttacacgcagtcattcgatactccgttgcaatcattttgtttactatcttacccttttttctgcttcaccgctggtgtagcaaaaagaaaaatgccgctgtcatgaaccaagagcccgctggacatcggaccgtgaatagagaggactccgacgagcaggacccacaagaggtaacttacgcgcagctcgaccattgtatattcactcagaggaaaataactggtccaagccagcgctcaaagcgaccctcaaccgatactagtgtatgtattgagctgcccaatgcagagcccagggcactgagtcctgcccacgagcatcatagccaggccctcatgggctcctctcgagaaacgacagccctgagccagacccagctcgctagctctaacgttcctgctgcaggcatctag

SEQ ID NO: 227737 - DNA, 1134 bp, synthetic construct
  misc_feature 1..1134: note = Description of Artificial Sequence: Synthetic coding sequence
  source 1..1134: mol_type = other DNA
atgtccatgagtccaacggtaattatcctggcctgcctgggatttttcctggaccagtctgtgtgggcacatgtaggaggccaggataaaccattttgttcggcctggccgagcgccgttgtgccgcagggtggacacgttaccctgagatgtcattgccggcgaggattcaatatctttacactgtacaaaaaggacggcgtcccagtaccggagctgtataaccgaattttctggaattcctttctcatatctcctgtgacccctgctcacgctggtacctacaggtgccgagggttccacccgcatagtcccacagaatggagcgctccgagcaacccactggtgatcatggtcaccgggctgtatgaaaagccctcccttactgccaggccgggacctacagtgcgcgcaggcgagaacgttacactgtcctgcagttctcagtcttcttttgacatttaccatctgtctcgagaaggtgaggcacacgagctccgattgcctgctgtgccctctatcaacggcacctttcaggcagactttccgctgggtccagctacacacggtgagacgtatcgctgctttggcagcttccacggcagcccctacgagtggtctgaccccagtgatccactgcctgtttctgtaacaggcaatccctcctcctcatggccgagtcctaccgagccctccttcaagaccggcatagcacgccatcttcacgcggtgattagatattcagtcgcgattatcctgttcacaatacttccatttttcctgctgcacagatggtgttccaagaagaagaacgctgccgtgatgaaccaggagccagcgggacatcgcacagttaaccgcgaggattccgacgagcaggacccacaagaggttacctacgcccagctcgaccactgtatattcactcagcgaaagattacaggacctagccagcggtcaaagagaccatcaacagacacgagcgtttgtatcgagttaccaaacgccgagcccagggccttaagcccagctcacgagcaccatagtcaagctctgatgggttcatccagggaaacaaccgctctgagccagacacagctcgcgtccagcaacgtgccagccgcaggcatctag

SEQ ID NO: 227738 - DNA, 1233 bp, synthetic construct
  misc_feature 1..1233: note = Description of Artificial Sequence: Synthetic coding sequence
  source 1..1233: mol_type = other DNA
atgtctctgatggtggtgtccatggcatgtgtaggattcttccttcttgaaggaccatggcctcacgtcggagggcaggacaagccctttctgtctgcttggcccggaaccgtggtgagcgagggacagcacgtgaccctacagtgtcggagccgcctggggtttaatgagttctcactgtctaaggaggatgggatgcctgtgcccgaattatataatcgtatatttcggaatagcttcctgatggggcctgtcacgccagcccacgccggaacataccgttgttgctctagccacccacattcacctacgggctggagtgccccaagcaaccctgtggtgatcatggtgactggagtgcatcgcaagccatcgctgctggcgcaccctggtcccctggtgaagtcgggcgagacagtgatcctgcagtgctggagtgacgtcaggttcgagcgtttcctgctgcatagagagggcatcaccgaggatccgcttcgcctgattgggcagctgcacgatgctggcagtcaggttaattatagtatgggaccaatgacaccggcactggcaggaacctaccgctgttttggctcagtaacccacttgccctacgagcttagcgccccaagtgaccccttggatatagtggtggtgggactgtacggaaagccttccctgtcggcacagccaggacctacggttcaagccggagaaaatgttacactatcttgcagctccaggtcccttttcgatatatatcacctgtctagggaggccgaggcaggggaattgagactgaccgcagttctgagagtcaacgggacattccaagctaatttccccctcggaccagtgacccacggtgggaattaccgctgttttggcagcttcagggcgttacctcatgcctggtctgatccaagcgaccctctaccagttagcgtgacgggaaactctcgctacttgcatgcccttatcggcacctccgtcgttattattccatttgctatcctactcttcttcctactccatagatggtgcgccaataaaaaaaatgccgtggtcatggatcaagagcctgccggtaaccggaccgtgaatagggaggactctgatgaacaggacccccaggaagtaacctacgcccagctgaaccattgcgttttcactcagcgcaagattacccgcccaagccagcggcctaaaacgcctcccacagacacctcggtgtag

SEQ ID NO: 227739 - DNA, 1047 bp, synthetic construct
  misc_feature 1..1047: note = Description of Artificial Sequence: Synthetic coding sequence
  source 1..1047: mol_type = other DNA
atgagcctgctcgtcgttagcatggcctgtgttgggttttttctgctccagggagcatggcctcacgagggcgtccacagaaagccttcactgcttgcacacccagggaggctggtgaaaagtgaagagacagtgatcctgcagtgttggtcagatgtcatgttcgagcactttcttctgcatcgtgaaggcatgtttaacgatactttaagactgataggtgagcaccacgatggcgtgagcaaggccaacttctcaatctccaggatgacgcaggacctggccggaacgtatcgctgttatgggtcggtaacgcatagcccttaccaggtcagtgccccatcagaccccctggatattgtgattatcggattatacgaaaagccatccttgtctgctcaactaggcccaaccgtcttggctggagagaatgtgacactgagctgttcaagccgctcgagctatgatatgtatcacctgagccgagagggggaagcacatgagcggaggcttcccgctgggcctaaagtgaacggcacctttcaggctgactttccacttgggcctgccacccatggcggaacgtaccgatgctttggaagcttccatgactccccttacgaatggtctaagtcttcagatccacttctggtgagtgttaccgggaacccctcaaattcttggccctctcccaccgagcccagtagtaagactggtaacccccgtcatctgcacatcttgattggcactagcgtagttataatactgttcattctcctcttcttccttcttcacagatggtgttctaacaagaagaatgccgctgtgatggatcaagagagtgcgggtaacagaaccgccaatagcgaggattctgatgagcaagacccccaagaggtaacttacacacagctcaaccattgtgtgttcactcagagaaagatcactaggccgagtcagcgacccaagaccccacccacagacatcatagtttacacagaactccccaacgcagaatctagaagtaaggtggtttcatgtccgtag

SEQ ID NO: 227740 - DNA, 1026 bp, synthetic construct
  misc_feature 1..1026: note = Description of Artificial Sequence: Synthetic coding sequence
  source 1..1026: mol_type = other DNA
atgtctctgatggttgtgagcatggtttgcgtgggcttttttctgctgcaaggtgcttggccccatgagggtgttcaccgcaagccctctctactggcccatccagggcctctggtaaaatcagaagagaccgttatactgcagtgctggtccgacgtccgttttcaacattttctactgcatcgggaaggcaaattcaaggacacactccatttgattggtgagcaccacgatggagtgtcaaaggcgaatttctctatcggtccaatgatgcaagatctcgctggcacctatcggtgttacggcagtgtcacccattctccataccaactctccgccccatcagatcctttggatatcgtgattaccggattgtatgagaagccaagcctgagtgcccagcccggtccaaccgttcttgctggcgagtccgtgaccctgagttgctcatcaaggagttcctacgatatgtatcatctgtcccgtgaaggggaggctcacgagcggaggttcagcgctgggccaaaagttaacgggacatttcaggccgacttcccgctgggacctgcaacacacgggggtacatacaggtgtttcggctctttcagggactccccatacgaatggtccaattcttccgatccattgttggtatctgtcactggcaatccctctaactcctggccaagtccgaccgagccctcatccgaaacaggcaatcctaggcatctccacgtgctgatagggacaagcgtggttatcatactgttcatcctcctgctcttttttctgcttcatcggtggtgctgcaacaaaaagaatgcagtcgtgatggatcaagaaccagccggaaaccgcactgtcaacagggaagactccgatgagcaggacccacaggaggtaacttatgcccagctaaatcactgcgtgtttacgcagagaaaaattacaagaccctcacagcgtcctaagaccccccctaccgatatcatcgtatacactgagctgccgaacgcggaaccctag

SEQ ID NO: 227741 - DNA, 1047 bp, synthetic construct
  misc_feature 1..1047: note = Description of Artificial Sequence: Synthetic coding sequence
  source 1..1047: mol_type = other DNA
atgtccctcatggtggtgagcatggtatgcgtcggcttctttttactgcagggggcatggccccacgagggcgtccacagaaaaccaagcctgttggcccaccccggacctttggttaagtcagaggaaactgtaatattacagtgctggagcgacgtccgctttcagcactttctcctccatcgggaaggtaaatttaaagacacactacacctgatcggggagcaccatgacggggtatctaaagccaatttctccatcggacctatgatgcaagacttggcaggtacttaccgctgttatggaagtgttactcattcaccataccagttaagcgcaccatccgacccgctggacatcgttatcactggcctatacgaaaagccctctttatccgcccagccaggcccaacagtcctggccggagaatccgttacgttatcatgttcctcccggtcatcctacgatatgtatcacctgtcacgagagggagaagcccatgagcggaggtttagtgccggtccgaaagtcaacggtacatttcaggccgacttcccgctgggccctgccactcacggcggtacctacagatgttttggctccttccgggactccccatatgaatggagcaattctagcgatccattgcttgtgtcagtaacaggcaacccctcaaattcctggcccagtccaactgaaccaagctccaagacaggcaatccccgacatctgcatatcctgatcggcacgagcgtggtaattatactatttatcctgctttttttcttacttcatagatggtgctcaaacaaaaaaaatgccgcagtgatggaccaggagtccgccggaaaccggacagcgaattccgaagattccgatgagcaggacccacaggaagtcacgtatacccaactcaatcattgtgtttttacccagaggaagattacaaggccatcccagaggcctaagacccccccaacggatattattgtatacaccgagctgccgaatgctgagtccaggtctaaagtcgtgtcgtgtccatag

SEQ ID NO: 227742 - DNA, 1029 bp, synthetic construct
  misc_feature 1..1029: note = Description of Artificial Sequence: Synthetic coding sequence
  source 1..1029: mol_type = other DNA
atgtcaatgagccccaccgtgatcatcctagcatgcctaggctttttcttggaccaaagcgtgtgggctcatgtcgggggacaagacaaacccttctgctcagcttggccctcagctgtcgtgccccagggaggccacgtaactctcaggtgccattacaggagaggatttaatatctttaccctgtacaaaaaggacggagttcctgttcctgaactctacaaccggatcttctggaactcttttctgatttcaccggtgactccggcacacgcgggaacgtataggtgcagaggctttcatccgcacagtccgactgagtggagcgctccgtcaaatcccttggttataatggtgacaggtttatacgagaagccctcacttaccgcacggcctggtccgacggtgcgggctggtgagaacgtgaccctgtcctgttcttctcagagcagcttcgacatctaccatctgagcagggagggggaagctcatgaactccggctgcctgccgtgccttcaattaacggaactttccaagccgattttcccctggggccagccacacatggagagacatacagatgctttggttccttccatggttcaccgtatgaatggtctgacccctctgaccctctgcctgtcagcgtgaccggaaaccctagcagctcttggcctagtccaaccgagccttctttcaagaccgacgcagccgttatgaaccaggaacccgcaggtcacaggacagttaatagagaggactcagacgaacaggaccctcaggaggtgacatatgcccagctggaccactgcattttcacacagcggaaaattactgggccttcccagagaagtaaaaggcctagcacagatacttctgtttgtatagaactccccaatgcagaacccagggctctgtctccagctcacgagcatcattcacaggccttgatggggtcttcccgagagacaacagccctgtcccagacacagttggctagttctaatgttcctgcagctggcatttag

SEQ ID NO: 227743 - DNA, 978 bp, synthetic construct
  misc_feature 1..978: note = Description of Artificial Sequence: Synthetic coding sequence
  source 1..978: mol_type = other DNA
atgagcatgtctcccactgtgatcatactggcgtgcttggggttcttcctggatcagagtgtgtgggcccatgtgggtggccaagacaagcccttttgctctgcttggccttctgctgtcgtccctcagggcggacatgtgaccctacggtgccactatcgtcggggattcaatatctttactctctataagaaagacggtgtcccagtacctgagctctacaataggattttttggaattctttcctgatcagcccagtaacacccgctcacgccggaacatacagatgcaggggctttcaccctcactcccctacagaatggtccgccccttccaacccacttgtgatcatggtgactgggttgtatgagaagccctcgctgactgcacgtcccggtcctacggtgcgagcgggtgagaacgtcacgttgtcttgcagcagtcaatcctcttttgacatataccatttatctagggagggggaggctcatgagctcaggctcccagccgtaccgtcgattaacggcacctttcaggcagactttccactgggcccagctacgcacggggaaacgtaccgctgctttggcagcttccacggtagtccttacgaatggagtgacccatcagatccgctcccggtgtcagtaaccgatgccgctgtgatgaatcaggagccagccggtcaccggacagtgaatcgagaagattcagatgaacaggaccctcaggaggtgacttatgcgcagctggaccactgcatttttacccagagaaaaattacgggtcccagtcagcgctccaagagaccttcaacggacacatctgtgtgcattgagctgcccaatgcagaaccgagagcgctctctccagcccacgagcatcattcacaagctctaatggggtcatcccgcgaaacaaccgctctgtcacaaacacaactcgcctcaagtaacgtgcccgcagcagggatttag

SEQ ID NO: 227744 - DNA, 1194 bp, synthetic construct
  misc_feature 1..1194: note = Description of Artificial Sequence: Synthetic coding sequence
  source 1..1194: mol_type = other DNA
atgagtctcatggtggtgtcaatggcctgcgtagggtttttcctagatcagtcagtgtgggcccacgtcggtggccaggacaaacctttttgttcagcttggccgtctgctgtggtaccacagggaggccatgtgaccctgcggtgtcattacaggcgcggatttaacatttttacactctataaaaaggacggcgtgccagtccccgagctatacaaccgtatcttctggaacagcttcttgatttcccccgtgacccctgctcacgccggaacatatagatgtcggggttttcatccccactctccaaccgagtggtccgctccctccaaccccctcgtgatcatggtcacaggcctgtacgaaaagccctccttaaccgcccgtccaggtcccacagtgcgagctggggaaaatgtcacattgtcctgcagctcacagtcctcgttcgacatataccatctgtctcgagaaggcgaggcccatgagctgcggctcccggctgtgccatccattaatggaacctttcaagcagattttcctttagggccagctacgcatggggaaacctaccgttgctttggctcatttcatggctccccgtatgagtggtccgacccctccgaccctctgccagtgtctgtgaccggaaatccgagctccagctggcctagccccacagagccttcttttaagacaggcatcgcgaggcacctccatgctgtgatcaggtactctgtcgccatcatcctgttcacaatcttgccatttttcctgcttcacagatggtgctcgaagaagaaagtgagcttgactaagcaacggcctgaaaattctggcccatgcgctgaggccggatgggagcacgctgacgccgctgtgatgaatcaggaaccagcaggccaccgcactgtgaatcgggaagacagcgatgagcaggatccccaggaggtgacgtatgctcagctggaccactgcattttcacccagcgcaagattacaggcccatctcaaagaagtaagcgaccctcgacagacaccagtgtgtgtatcgagttaccaaatgctgaaccacgagcactgagccccgcacacgaacaccatagtcaagcattgatgggatcatcccgggaaaccaccgctctttcccagactcagttggcatcctccaatgttccggctgccggtatttag

SEQ ID NO: 227745 - DNA, 693 bp, synthetic construct
  misc_feature 1..693: note = Description of Artificial Sequence: Synthetic coding sequence
  source 1..693: mol_type = other DNA
atgtcaatgagccccacagtgattattctggcatgcctgggattctttctggatcagagcgtgtgggctcatgttggcctgtatgagaaaccttccttgacggccagacctggccctactgtgcgggcaggggaaaacgtcacccttagctgctcgtcccagagcagcttcgatatctatcatctatcccgtgaaggagaggctcacgagctacgactgcctgccgtaccgtccatcaacggcacgttccaggctgattttccactggggccagcaacgcacggggagacttataggtgtttcggttcttttcacggtagtccttatgagtggtccgaccccagcgacccactgcccgtgtctgtaacagatgcagccgtgatgaatcaagagcctgccggacaccgaactgttaatcgagaagactcagatgagcaggatcctcaagaagtgacatatgcacagctggatcactgcatttttacccagcgcaagattacaggaccgagccagaggagtaagcggccaagcactgacaccagcgtgtgcatcgagctgccgaacgccgagcccagagctttatcacctgcccacgagcaccactcccaggctttgatgggttccagtagagaaacaacggccctgtcacagacacaacttgcatctagtaatgtccccgcagctggcatctag

SEQ ID NO: 227746 - DNA, 762 bp, synthetic construct
  misc_feature 1..762: note = Description of Artificial Sequence: Synthetic coding sequence
  source 1..762: mol_type = other DNA
atgagttgtactatcgagaaggctttggccgacgccaaggccctggtggagcggttgagggaccatgacgacgccgcagaatccctgatcgagcagacaacagcgctcaacaaacgagtggaggccatgaagcagtaccaagaagaaattcaggaactcaacgaagtcgcccgtcaccggcctagaagtactctggtgatgggcatccagcaggagaatcgccagatacgggagctgcaacaggagaacaaggagctccgtacctccctcgaggagcatcaatctgctctggaactgattatgtccaagtacagggagcagatgttcagactactgatggcgagcaaaaaggacgaccctgggatcataatgaaattgaaggagcagcattcaaagattgatatggtccacagaaacaagagcgaggggtttttccttgacgcttctaggcatatactggaggcgccacagcacggcttggaacgtcggcacttggaagcaaaccagaacgaattacaggcccacgtggaccagataacagagatggccgcagtcatgaggaaggccattgaaatcgacgagcaacaggggtgcaaggaacaggaaagaatcttccagcttgaacaggagaataaagggcttcgcgaaatactacagattacaagagaatctttcctgaatctgaggaaagacgacgcctctgagtccaccagtctcagcgcgctggttactaactctgatctgagcctgagaaagtcttag

SEQ ID NO: 227747 - DNA, 648 bp, synthetic construct
  misc_feature 1..648: note = Description of Artificial Sequence: Synthetic coding sequence
  source 1..648: mol_type = other DNA
atggacaaccagggtgtgatctatagcgacctgaacctgcctcccaatcccaaaagacagcagcgcaaaccaaaagggaataagaattccatcttagccactgaacaggaaatcacctacgcggaactcaatctccagaaagcctcacaggatttccaggggaacgacaagacctaccactgtaaagacctgccttcagccccagagaagctcatcgtgggaatactgggaattatctgcttaatcttgatggcctctgtggtaacaatagtagtcattccgtccagacattgtgggcattgccccgaagaatggatcacctacagcaacagctgttattatattgggaaagaacgcagaacctgggaggaatccctgcttgcgtgtacctccaagaattcatctttattaagcattgataacgaagaagaaatgaaattcctttccattattagccctagttcatggatcggagtgttcaggaactcttcccaccacccgtgggtgactatgaatggcctggcatttaagcacgagatcaaggattcagacaacgccgagttaaattgtgctgtgctccaagtgaatagactaaagagtgcacagtgtggcagctcaatcatttaccactgtaagcataagctgtag

SEQ ID NO: 227748 - DNA, 702 bp, synthetic construct
  misc_feature 1..702: note = Description of Artificial Sequence: Synthetic coding sequence
  source 1..702: mol_type = other DNA
atggataaccagggcgtgatctattcggacttgaacctccctccgaaccctaaaaggcaacagcggaaacccaagggaaataagaacagcattttggcaacagaacaggagatcacatatgctgagctcaaccttcaaaaggcgtcccaagactttcagggtaatgacaagacttatcattgcaaagatctgccaagtgccccagagaagttaatcgtgggcattttaggaatcatctgtttgattcttatggcaagtgtggtgaccatcgtagttatcccaagcacactaatccaacggcacaacaacagttccctgaatactcggacacagaaagccagacattgtggacattgtccagaggaatggatcacctattcaaattcctgttactatataggtaaggagaggcggacatgggaagagtcactgctcgcttgtacgtcaaagaattcctcactcctgagcatcgataacgaggaagaaatgaagttcctgtccatcatctctcccagctcctggatcggagtgttccggaatagctcccatcatccctgggtgactatgaacgggctggcatttaagcatgagatcaaggactctgacaatgccgagctcaattgtgcagtgctacaggtgaatcggctcaagagcgcgcagtgcggctccagcattatctatcattgcaaacacaaactttag

SEQ ID NO: 227749 - DNA, 648 bp, synthetic construct
  misc_feature 1..648: note = Description of Artificial Sequence: Synthetic coding sequence
  source 1..648: mol_type = other DNA
atggataaccagggagtgatttattcagatctgaacctgcctcctaatccaaagcggcaacagagaaaacccaaaggcaacaagaacagtattcttgcaactgagcaagagataacgtacgcggaactgaaccttcaaaaagccagtcaggatttccagggcaatgataagacttaccattgtaaggatctcccatcggccccagagaagctcatagtgggaattctgggaattatctgtctgatcctgatggcgtccgttgtcacaatcgtggttataccctcaagacactgcggtcactgccccgaagaatggattacctattccaacagttgttactatatcggtaaggagcggagaacgtgggaggaatccctcctcgcctgtacctccaagaactctagtctgctttcaattgacaatgaggaagagatgaagttcctgtccatcatcagcccaagcagctggattggcgtcttccggaacagctcccaccatccttgggttaccatgaatggactggcctttaaacacgagatcaaggacagtgacaatgctgaactaaactgtgccgttctccaggtcaataggctgaagtccgcccagtgtggaagtagtatcatttatcattgtaaacacaaactgtag

SEQ ID NO: 227750 - DNA, 702 bp, synthetic construct
  misc_feature 1..702: note = Description of Artificial Sequence: Synthetic coding sequence
  source 1..702: mol_type = other DNA
atggacaaccagggcgtgatttactccgacctgaatctcccgccaaatcctaagaggcagcagagaaaacctaaagggaataagaatagcatcctggctaccgaacaggagatcacctatgcggagctaaacctgcagaaggcctcccaagattttcagggcaacgacaagacgtatcattgcaaggaccttccctcagcgcctgaaaagctgatagtaggaatcctgggaattatctgcctaatactcatggcatctgtggtgacgattgtggtcatcccatccacattaatccaaaggcataacaacagctccctcaacacccggactcagaaggctagacactgtgggcactgtccggaagaatggataacgtattcaaattcctgttactacattggcaaagaaagaaggacttgggaagagtctctgctggcctgcacaagcaagaactcaagccttctgtcaatcgataatgaggaggagatgaagtttcttagcatcatctcccccagttcttggatcggggtgttcaggaattcatctcatcacccatgggtaacaatgaatggcctggcattcaagcacgagattaaggactccgataacgcggagcttaattgtgccgtgctgcaggtgaaccgactgaagtccgcccagtgtggatcctctatcatttatcattgtaaacataagctgtag

SEQ ID NO: 227751 - DNA, 696 bp, synthetic construct
  misc_feature 1..696: note = Description of Artificial Sequence: Synthetic coding sequence
  source 1..696: mol_type = other DNA
atgaataagcagcgagggaccttttctgaggtgtcactggcccaggatccaaagcggcagcagcgcaagcccaaggggaacaaatctagtattagcggcaccgagcaggagatatttcaagtggagctcaacctgcagaatccgagcttaaaccaccaaggtatcgacaaaatctatgattgtcaaggattactgccaccaccagagaagctgactgctgaagtgcttggaattatttgcatcgttctaatggcaacagtgctgaaaactattgtgctgattcccttcctagagcagaacaactcaagcccgaacactcgaacccaaaagacgcggcactgtggacactgcccggaggagtggatcacctacagcaattcatgttactacatcgggaaggagagacggacctgggaggagtcactgttagcatgtactagcaaaaatagtagcctcctgagtattgacaatgaggaagaaatgaagtttttagcttcgattttaccaagctcctggatcggggtgttccggaactcaagtcatcacccttgggtgaccatcaacgggctcgcattcaagcacaagatcaaagatagcgataatgcagagctgaactgcgccgtgctccaggtgaatagacttaaatctgctcagtgcgggtctagcatgatataccactgcaaacataaactctag

SEQ ID NO: 227752 - DNA, 696 bp, synthetic construct
  misc_feature 1..696: note = Description of Artificial Sequence: Synthetic coding sequence
  source 1..696: mol_type = other DNA
atgaataagcaaaggggtactttctcagaggttagcctggcacaggaccctaagagacagcagagaaagccgaaggggaacaaatcctccatcagtgggacagagcaggaaattttccaggtggagctcaatctgcagaacccatctctcaaccatcaaggcatcgacaagatctacgactgtcagggccttcttccaccacccgagaagctgaccgccgaggtgctggggattatctgcatcgtgctgatggcgaccgtgcttaagacaatcgtcctcatcccattcctcgagcaaaataattttagcccaaacacacggacccaaaaggcacgacactgcggacactgccctgaggaatggataacgtatagcaactcctgctattacattgggaaggagcggagaacctgggaagagtccctcttagcgtgcacttccaagaattcgtcattgctctctatagataacgaagaagaaatgaagttccttgcctccatcctgccctctagttggatcggtgtattccgcaactcatctcaccatccctgggtgaccatcaatggactcgctttcaaacacaagatcaaagatagcgacaatgcagaactgaattgcgctgtcctgcaggttaaccggctaaagtccgctcaatgcggctcttccatgatataccattgtaaacacaagttgtag

SEQ ID NO: 227753 - DNA, 375 bp, synthetic construct
  misc_feature 1..375: note = Description of Artificial Sequence: Synthetic coding sequence
  source 1..375: mol_type = other DNA
atgataccgacgaggcattgtggacactgtcctgaagagtggattacttactctaactcttgttactatatcggcaaggaaaggcgaacatgggaagaatccctcctcgcatgcacctcaaaaaactcaagcctgctgagcattgataacgaggaggagatgaaattcttggcctctattctccctagttcttggataggtgtttttcgcaattcttcacatcatccctgggtaaccatcaatggactcgctttcaaacataaaataaaggattccgacaatgcggaactgaactgcgctgtcctgcaagtgaatcgcctcaaaagtgcccagtgtggctctagcatgatttaccactgcaagcataaattatag

SEQ ID NO: 227754 - DNA, 774 bp, synthetic construct
  misc_feature 1..774: note = Description of Artificial Sequence: Synthetic coding sequence
  source 1..774: mol_type = other DNA
atgagtaaacagagaggcaccttctctgaagtgagtttggctcaagaccccaaatggcagcagcgcaaacctaaaggaaataaaagttcgataagcggaaccgaacaggagatctttcaggtagaactgaaccttcagaatgctagcctgaatcatcagggaattgacaagatatacgattgccagggactcctgccccctcccgaaaaactgaccgcagaggtactgggtatcatctgcatcgttctcatggcaacggttctgaagactattgtactcattcctttcctggaacagaacaactcaagccccaacgcacgaacccagaaagccagacattgtggacactgtcctgaagagtggattacttacagcaactcttgctactatatcggtaaagagaggaggacttgggaagagtcgcttcaggcctgtgctagcaagaattcaagctcattgctctgcatagacaatgaggaagagatgaagttcttagcaagcatactcccgagtagctggattggggtattccgcaactcctcccatcatccttgggtgaccattaatgggctggcatttaagcacgaaatcaaagatagcgatcacgctgaacgcaattgcgctatgctacacgtgaggggcctgatcagcgatcagtgcggaagttcccgaattatcgtgtcaatttcatttagaattaaagccttagagcttgccgtccatcaaattaagttttatatttgcagcaaccggaacgacatcatgatcgcctag

SEQ ID NO: 227755 - DNA, 723 bp, synthetic construct
  misc_feature 1..723: note = Description of Artificial Sequence: Synthetic coding sequence
  source 1..723: mol_type = other DNA
atgtcaaaacagaggggtactttcagtgaggtatccctggctcaagatcctaagtggcaacaacgcaagccgaaaggcaataaatcaagcatatctggcacagagcaggagatctttcaggttgagctcaacctccagaatgcaagcctcaaccatcagggcattgacaagatctacgactgtcaaggtttgctgccgccacccgagaaactcacggctgaggtcctggggattatttgtatcgttctcatggccacagtcctgaagactatcgtcttgattcctttcctagaacagaataacagctccccaaatacccgcacacagaagacgcgacattgcggacattgtcccgaggagtggatcacgtactcaaactcatgttactatataggaaaagagagaaggacgtgggaggagtctcttcaagcctgcgcctctaagaattcatcaagtctcttgtgtatcgacaatgaagaggagatgaaattcttggcgtccatcctgccgtcgtcatggataggcgtctttcgcaacagctctcaccacccctgggtaaccatcaatggtctcgcatttaagcacgagatcaaggactcggaccatgccgagcggaactgtgccatgttacacgtccgaggacttatatccgaccaatgtggctcatccaggatcatccgtagagggttcatcatgcttactagactcgttttgaattcatag

SEQ ID NO: 227756 - DNA, 723 bp, synthetic construct
  misc_feature 1..723: note = Description of Artificial Sequence: Synthetic coding sequence
  source 1..723: mol_type = other DNA
atgagcaagcagcgtgggacattttccgaagtctcacttgcacaagacccaaagtggcaacagcggaaacctaagggtaataagtccagcatttcaggcacagagcaagaaatattccaagtcgaattgaatcttcagaatgccagcctgaaccatcagggcattgacaagatttacgactgtcagggtttgttgccgcctcctgagaaacttacggctgaggtgctcggtattatttgtattgtactgatggcgacagtgctgaagaccatcgtgctgatcccatttttagaacaaaacaacagcagtccaaacgcacggacacagaaggctagacattgcggacattgtccagaggaatggattacttattctaattcttgttactacattggcaaagagagaagaacgtgggaagagagcctccaagcgtgcgcaagcaagaacagctcatctcttctgtgcattgacaacgaagaggaaatgaagttcctagcttccatattgccgagttcttggataggagtattccgcaacagttctcatcatccttgggtaaccattaacggcctggcattcaaacatgaaatcaaggacagcgaccatgccgagaggaactgcgcaatgctgcacgttcggggtctaatatccgaccagtgcggatcctcccgtattattaggaggggtttcatcatgctgacccggttagtgcttaattcttag

SEQ ID NO: 227757 - DNA, 477 bp, synthetic construct
  misc_feature 1..477: note = Description of Artificial Sequence: Synthetic coding sequence
  source 1..477: mol_type = other DNA
atgaacaagcagcgaggtacatacagcgaggttagtttggcacaggaccccaagaggcaacaaaggaaattaaagggtaacaaaatctcaatctcagggactaagcaggagatcttccaggtggagctgaaccttcagaacgccagttctgaccatcaagggaacgataagacgtatcattgcaagggactcttgccccctcctgaaaagcttacagccgaggtactggggatcatttgcatcgttttaatggctactgttctgaagaccatcgtactgattccctgcatcggagtgttggagcagaacaacttttctcttaatagaagaatgcagaaagcccgtcattgcggccactgtcccgaagaatggataacgtacagtaactcttgctactacattggaaaggaacgccgtacatgggaggaaagagtgtgctggccagttctgaggagaaccttaatatgctttctttag

SEQ ID NO: 227758 - DNA, 540 bp, synthetic construct
  misc_feature 1..540: note = Description of Artificial Sequence: Synthetic coding sequence
  source 1..540: mol_type = other DNA
atggcagtgttcaagacgaccctctggaggctcatcagtggcacactcggaataatttgcctgtcactaatgagcaccttgggaattttgctgaaaaatagcttcaccaaattgagcattgaacccgctttcacccctggcccaaatattgagcttcagaaagacagcgattgttgtagctgtcaagagaaatgggttgggtatcgctgcaattgctattttatcagttcagaacaaaagacttggaatgagtctcgccacctgtgtgcttctcaaaagtcttccctgctccaactgcaaaacacagatgagctcgacttcatgtcgagctcccagcaattctattggattggcctgagttatagcgaagaacacactgcctggctatgggagaacgggtccgctctctcccagtatcttttccccagctttgaaaccttcaacacgaagaactgcatagcctataaccctaatggcaacgcactggacgaaagctgcgaagacaaaaaccggtacatttgcaaacagcagctgatttag

SEQ ID NO: 227759 - DNA, 447 bp, synthetic construct
  misc_feature 1..447: note = Description of Artificial Sequence: Synthetic coding sequence
  source 1..447: mol_type = other DNA
atggcagcctttacaaagctttctatagaacctgcctttaccccgggtcccaatatcgagctgcaaaaggattccgattgttgctcctgccaggaaaagtgggttggataccgctgtaattgttatttcatctcctccgagcagaagacctggaatgaatccagacacctgtgcgcctcacagaaaagtagtctcttgcagttgcagaatacagacgaattggatttcatgtcgtcatcacaacaattctactggattggactctcctactcagaagaacacaccgcctggctctgggaaaacgggtccgccctaagccagtacctgtttccctcattcgaaaccttcaacacgaaaaactgcatcgcatataaccctaacggcaacgccctcgacgaatcttgtgaggacaagaaccgctatatctgcaagcagcaactcatctag

SEQ ID NO: 227760 - DNA, 540 bp, synthetic construct
  misc_feature 1..540: note = Description of Artificial Sequence: Synthetic coding sequence
  source 1..540: mol_type = other DNA
atggccgtttttaagactacgctgtggcgacttatctccgggacactggggatcatttgcctgtctctgatgagcaccctgggtatactactgaagaactccttcaccaaattgtcaattgagcccgctttcacccctggaccaaatattgaactacagaaggactccgattgctgttcctgccaggaaaagtgggtgggctatcgttgcaattgctacttcatatcttcagagcaaaaaacttggaatgagtctaggcatctgtgcgcttcccagaaatcaagtctgctgcagcttcagaatacagacgaactggacttcatgagctccagtcaacagttctattggattggattgagctactccgaggaacacaccgcgtggttgtgggagaacggatccgccctctcccagtacttgttccctagcttcgagacttttaataccaaaaactgcatcgcttataatccaaatgggaatgcactggatgaatcttgcgaggataagaaccggtacatctgtaagcagcagctgatctag

SEQ ID NO: 227761 - DNA, 543 bp, synthetic construct
  misc_feature 1..543: note = Description of Artificial Sequence: Synthetic coding sequence
  source 1..543: mol_type = other DNA
atggcagttttcaaaactactttgtggcggttaatttcaggaacactgggaataatttgcctgagcctgatgagcacactgggtattctgttaaaaaattcctttacaaagctgagcatcgaacctgcgtttaccccagggcctaatatagagctccaaaaagacagtgactgttgtagttgtcaagagaaatgggtcgggtaccgttgtaattgctactttatcagcagtgagcagaagacctggaatgaatcccggcacctgtgcgcttctcagaaatctagtttactccagctgcagaacaccgacgagcttcaggatttcatgagctcatctcagcagttctactggatcgggctttcatactcagaggagcacacggcatggctatgggagaacgggagtgccttgtcccagtacttgtttcctagcttcgaaacattcaacacaaagaactgtattgcctacaatcctaatggaaacgctctcgatgaatcatgtgaagacaaaaaccgttacatctgtaagcagcaactgatatag

SEQ ID NO: 227762 - DNA, 156 bp, synthetic construct
  misc_feature 1..156: note = Description of Artificial Sequence: Synthetic coding sequence
  source 1..156: mol_type = other DNA
tccgcattgtcacagtacctcttcccgtctttcgagacatttaacacaaagaactgtatcgcttataaccccaatgggaatgctctggacgagtcctgtgaggataagaaccgctatatctacaaagtgctgctgtgctgccccggatggtcgtag

SEQ ID NO: 227763 - DNA, 420 bp, synthetic construct
  misc_feature 1..420: note = Description of Artificial Sequence: Synthetic coding sequence
  source 1..420: mol_type = other DNA
atggccgcatttacgaagctatctatcgaacccgcattcactcccggtcccaacatcgagctgcagaaggatagcgattgttgtagctgtcaggaaaagtgggtgggctatcgctgtaattgctactttatttctagcgagcaaaagacctggaacgagtctaggcatctgtgtgcatcccaaaagagcagccttttgcagcttcaaaacactgacgagctggactttatgagctccagccaacagttctactggatcgggctgtcttacagcgaagagcatacagcatggctgtgggaaaacgggtccgcactttcgcagtacctcttcccatcttttgaaacttttaacactaaaaattgtatcgcctacaatcctaatggcaacgcgctggatgagtcctgcgaggacaaaaattag

SEQ ID NO: 227764 - DNA, 699 bp, synthetic construct
  misc_feature 1..699: note = Description of Artificial Sequence: Synthetic coding sequence
  source 1..699: mol_type = other DNA
atgcaggatgaggaacggtatatgacccttaacgtgcagtccaagaagagatcatctgcacagacttctcagcttacctttaaggattatagcgttaccctgcattggtacaagatcctgttagggattagtggcaccgtgaacggcattctgaccctgacccttattagcctaatcctgctggtgtcccagggcgtgctgctgaagtgccagaaggggagctgcagtaatgccactcagtacgaagacactggcgatctgaaggtcaacaacgggacccgcaggaatatttccaacaaggatttgtgtgcttccagaagtgcggaccagacagtactttgtcaaagtgagtggttaaagtatcagggaaaatgttgctactggttctctaacgagatgaagagctggtccgatagttacgtgtactgtctggagcgcaagagccatttactgattattcatgatcaactggaaatggccttcatccagaagaatctgcggcagctgaattacgtttggatcggtctgaatttcacttcgctaaaaatgacttggacatgggttgatggatccccaattgattctaaaatcttctttattaagggcccagccaaagaaaatagctgtgctgctattaaagaaagtaaaatcttttccgagacctgcagctccgtgttcaagtggatatgtcagtattag

SEQ ID NO: 227765 - DNA, 549 bp, synthetic construct
  misc_feature 1..549: note = Description of Artificial Sequence: Synthetic coding sequence
  source 1..549: mol_type = other DNA
atgcaggatgaggagcgttatatgacgctgaatgttcaatctaagaagcgatcatccgctcaaacctcccaattgacctttaaggattattcagtgacattacactggtacaaaatactccttggaatctccggaactgtgaatgggatcttgacactgaccctgatatccttgattctgctcgtgctgtgtcagagtgagtggctgaagtaccaggggaagtgctgttactggttctctaatgaaatgaaaagttggtccgactcatacgtgtattgcctggaaaggaaaagccacttgctgattattcacgaccaactggaaatggccttcatccaaaaaaaccttcggcagttaaattacgtttggattggcctgaacttcacatcacttaagatgacctggacctgggtggatggctcacccatcgattcgaaaatcttcttcatcaaaggtcctgcgaaggaaaactcgtgtgcagctatcaaagagtccaagatctttagcgagacctgcagcagtgtcttcaagtggatctgccagtactag

SEQ ID NO: 227766 - DNA, 195 bp, synthetic construct
  misc_feature 1..195: note = Description of Artificial Sequence: Synthetic coding sequence
  source 1..195: mol_type = other DNA
atgcaggatgaggaaaggtacatgactctgaatgtccaaagcaagaaaaggagtagcgcgcagaccagtcagctgacgttcaaagactatagcgtcaccctgcattggtacaaaatcttgctgggaatcagcggcaccgtcaatggcatactgacacttactctgatctcactcattctgttagattcctcttag

SEQ ID NO: 227767 - DNA, 588 bp, synthetic construct
  misc_feature 1..588: note = Description of Artificial Sequence: Synthetic coding sequence
  source 1..588: mol_type = other DNA
atgaccgatagcgtgatctactccatgctcgaactgccaacagcgactcaggcccagaatgattacggccctcaacagaagtcatcgtcttccaggccctcctgttcttgcttagtggctatcgccttaggtctgctgaccgctgtcttattgagtgtcctactataccagtggattctgtgtcaaggctcaaattacagcacatgtgccagctgcccaagttgccccgaccgctggatgaaatatggcaatcactgttattacttctccgtggaggagaaggactggaattctagtctcgagttttgtctagcacgggatagtcacctcttggtgatcacagacaaccaggagatgtctctgctccaggtcttcctgtctgaggccttctgctggatcggcttacggaacaactccgggtggaggtgggaagacggttcccccctgaacttcagcaggattagctctaactcttttgtgcagacatgcggtgccattaataagaatggcctacaggcttccagttgcgaggtgccgctgcattgggtctgcaagaagtgtccctttgccgatcaggccttgttttag

SEQ ID NO: 227768 - DNA, 570 bp, synthetic construct
  misc_feature 1..570: note = Description of Artificial Sequence: Synthetic coding sequence
  source 1..570: mol_type = other DNA
atgaccgatagcgtcatttattccatgttagagctgccaaccgcgacacaggctcagaacgactacggaccgcagcagaaaagctccagctcacggccaagctgttcctgcttggtggctattgctctgggtctgttgactgccgttcttctatctgtcctgctttatcaatggattctgtgccagggctccaactacagcacatgcgcctcatgtccatcctgtcccgatcgctggatgaaatacggtaatcactgttactatttcagcgtggaggaaaaagactggaattcatcactggagttctgtctagccagggacagtcatctcctggttatcaccgataaccaggagatgagccttcttcaggttttcctgtccgaagccttctgctggatcgggctgcggaacaattccggctggaggtgggaggatggcagccctcttaatttttcgcgtatcagcagcaattcctttgtgcagacatgcggagcaattaataaaaacggcttgcaagcgagttcctgcgaggtgccactgcactgggtgtgcaagaaggtccggctgtag

SEQ ID NO: 227769 - DNA, 651 bp, synthetic construct
  misc_feature 1..651: note = Description of Artificial Sequence: Synthetic coding sequence
  source 1..651: mol_type = other DNA
atgggttggatccgagggaggcgatcccggcactcctgggagatgagtgagttccataactacaatctggacttgaagaagtctgacttttcaacacggtggcagaagcagcgttgtccggtggtgaagagcaagtgccgcgaaaacgcctctccattttttttctgttgcttcattgctgtagcgatgggcattcgcttcatcataatggtgaccatatggtcagccgtcttcctcaattccctcttcaaccaggaggtgcagatcccacttactgagtcctattgcggcccatgtcccaaaaattggatctgttacaagaataactgttatcaattttttgatgaaagcaaaaactggtacgagtcccaggcttcatgtatgagtcagaacgcatctctcctgaaagtgtatagcaaggaggatcaggatctcctaaagctcgtcaaaagctaccactggatgggcctcgtgcacattccaaccaatgggtcttggcagtgggaggacggaagtatcctgtcgcccaatctgctgaccattatcgagatgcagaaaggcgactgtgccttgtatgccagctcgttcaagggttatatcgaaaattgtagcacccctaacacgtacatatgcatgcaacggaccgtgtag

SEQ ID NO: 227770 - DNA, 243 bp, synthetic construct
  misc_feature 1..243: note = Description of Artificial Sequence: Synthetic coding sequence
  source 1..243: mol_type = other DNA
atgggctggatacggggacgcagatctcgtcattcgtgggagatgagcgagttccacaattacaacttggatctgaaaaagtccgacttctccaccaggtggcagaagcagaggtgccctgtcgtgaagagtaaatgcagagaaaatgccagccccttttttttctgttgcttcattgctgtagccatgggcattagattcatcatcatggtaaccatttggagtgctgtgtttctcaactag

SEQ ID NO: 227771 - DNA, 651 bp, synthetic construct
  misc_feature 1..651: note = Description of Artificial Sequence: Synthetic coding sequence
  source 1..651: mol_type = other DNA
atgggttggatccggggaaggcgtagcaggcacagctgggaaatgagcgagtttcataattacaatttagatctgaaaaagtctgacttttccacaagatggcagaagcagagatgccccgttgtgaagtcaaagtgccgggaaaacgcttcgccatttttcttctgttgttttatcgctgtcgccatgggaatccggtttattatcatggtgaccatctggtcagctgtgttcttgaactctctgttcaatcaggaagtccagatccccctcaccgagagctattgtgggccttgccccaagaattggatctgttacaagaacaactgctaccagttttttgacgagtccaagaattggtacgaatctcaagcaagctgcatgtctcagaacgcgtctctgctgaaggtctactctaaggaagaccaagatcttctgaagcttgtcaaatcataccactggatggggcttgtgcacattccaacaaatggttcctggcaatgggaagacgggagtatactgtcacctaatcttctgacgatcattgagatgcagaagggggattgcgccctgtacgccagtagcttcaagggttacatcgagaactgctcaacaccgaatacatacatctgtatgcaaagaacggtttag

SEQ ID NO: 227772 - DNA, 537 bp, synthetic construct
  misc_feature 1..537: note = Description of Artificial Sequence: Synthetic coding sequence
  source 1..537: mol_type = other DNA
atggaccgcccagggcctggcagcgccagaccagggaggaccgtgcacgtatgggggtaccgcgtggagtggaaggtcagaaatggacgaaaactgcagccctcagaatgggccggaagaggggatctgggaggctttaagcgcaggtggaaggacacaagggcaactgtggggactacttttaggagacgctctcgtgtgtcactggttggtgagctgagtaaattccccctgccaagcgactccagcggaggaaaatcaagctcttcttttgcccgaggcgctcttgcttggtgccgacaaaggaacccaaacccgtcatgtgccgctgctgaaaccggcgctcggacatctctgcctaaggagcggtgcaggggatggagactagggaactggctccacaagcacccacatccaaacacttgccccaggctgccggcatgttggttaccgccaatattaacagaacgcggagagcgggtgcccaaactggtgccattattggcctgctaccctaagtctaagcctaaagactag

SEQ ID NO: 227773 - DNA, 1902 bp, synthetic construct
  misc_feature 1..1902: note = Description of Artificial Sequence: Synthetic coding sequence
  source 1..1902: mol_type = other DNA
atgctgcggatgagagtgcccgctctgctcgtgttgctgttctgttttcggggtcgcgcagggccatctccacactttctgcagcagcccgaagatctggttgtgctgttaggcgaggaagcgaggcttccatgtgctctgggcgcttattggggacttgtccagtggactaagagcggcctcgccctggggggacagcgggatctaccagggtggagccgctattggatctccgggaacgcagctaatggccagcacgatctccacatacggcctgtcgaactggaggacgaggcgagctatgaatgccaggctacccaggcaggtttgagatcaaggcctgcacagttgcacgtgctggttccccctgaagctcctcaggtgctgggcggaccttcggtgtcactggtggccggtgtgccagcgaatctgacctgtaggtccagaggcgatgctcgtccaacacctgagctgctgtggtttagggatggagtcctgttagacggggcaactttccaccagactctcctcaaagagggcacgccaggcagcgtggagagtacactgaccctcacaccatttagccacgacgatggtgccaccttcgtatgccgggctcgaagccaagcactgccaaccggacgggatactgccatcaccctgagcctacaatacccacctgaggtgactctatcggccagcccccacacagttcaggaaggcgagaaggttattttcctgtgccaggccacagcccagcctccagtaacggggtaccggtgggccaaaggaggatcccccgtgcttggagcaaggggtccaaggttggaagtggtagccgatgcctccttcctgaccgaaccggtgagctgtgaagtgtccaacgctgtgggatctgccaataggagtaccgcccttgacgtcctgttcggccctatcttgcaggctaagcctgaacccgtatctgtcgacgtgggagaagatgccagcttctcctgcgcgtggagaggaaacccccttccgagggtgacctggacccgtcggggaggggcacaggttctgggtagcggcgctactctgaggcttccatccgtgggccctgaagacgccggtgattacgtttgtcgcgcagaggcaggtctgagcggcctccggggaggcgcagccgaagctcgcctgacagttaatgctcccccagttgtgactgcactacatagcgctccagcttttttgagaggcccagctcgcctgcaatgtctcgtgtttgcatcccctgctcctgacgccgtggtgtggagctgggacgaggggttcctggaagctgggtcacagggccgattcctggtcgagaccttccccgcacccgaaagccggggaggcctgggacccggtttaatctccgtcctgcacataagcggaacacaggaatccgatttttccagaagcttcaactgtagcgcgcgtaatagactcggagaggggggtgcccaggcctctctaggtcgccgagatttgctaccaacagtgagaatcgttgccggtgtcgccgctgcaacgaccacactgctgatggtgatcacaggagtggccctttgctgctggcgccactccaaggcctcagctagctttagtgaacagaagaatctgatgcgcattcccggatcttccgacggatccagttccagaggacctgaagaggaagaaacaggctctagagaagaccggggtcccatagttcacaccgaccacagcgatctggtgctagaagagaagggcactttggaaaccaaagaccccaccaacggttactacaaggttagaggagtcagtcctcctgcttcccctgattcacgcgtgacctctttccagtggaagtcccctggcattagcaatctcccctag

SEQ ID NO: 227774 - DNA, 660 bp, synthetic construct
  misc_feature 1..660: note = Description of Artificial Sequence: Synthetic coding sequence
  source 1..660: mol_type = other DNA
atgctgcgaatgcgcgttcctgcattactggtgctcctgttctgcttccgaggtcgcgctggcccatccccccacttcctgcagcagcctgaggacctggtggtgctccttggagagggcggtgctcaggctagtctcggaaggagggctagcgccagctttagtgagcagaaaaatctaatgaggattccaggatctagcgacggctcctcaagccgaggacccgaggaggaggaaacgggttctcgagaggatcgcggacctattgtccatacagatcatagcgacttggtactggaagagaagggcactctcgagacaaaagaccccactaacggatattacaaggttcggggtgtgagcgtttctctctccctaggcgaggccccaggaggtggcctctttttgccccctcccagtcccctgggacccccaggaacaccaacattctacgacttcaaccctcaccttggcatggtgccaccttgccggctttaccgagctagggccggttacctgacgaccccgcatcctcgagctttcacatcttatatcaaaccaacatcctttggacccccagatctggctcccggaacacccccatttccctacgccgcattcccaaccccctcccatcctcgattgcagacacacgtgtag

SEQ ID NO: 227775 - DNA, 2067 bp, synthetic construct
  misc_feature 1..2067: note = Description of Artificial Sequence: Synthetic coding sequence
  source 1..2067: mol_type = other DNA
atgctacgcatgagagtccctgccctgctggtgctgcttttttgtttccgtgggagggccggaccttctccacatttcttgcagcagccagaggacttagtggtgctgctgggagaagaggctaggctgccgtgcgccctgggcgcttattggggactcgtccagtggacaaaatcagggctcgcgctcggcggacaaagggacctgcccggatggagccgatattggattagcggcaatgcagccaatggccaacacgacctgcacatacgtcccgtagaacttgaggatgaggcaagctatgagtgtcaggctacccaggccggactgcgtagtcgacccgcacaacttcacgtgttggtgccgccagaagcaccacaggtcctagggggaccttccgtttcactcgtggctggcgtccctgcaaatctcacatgccggtctcgaggcgacgccaggccaacaccagagctcttatggttccgcgacggagtgctgctggacggagccacattccaccaaactctgctcaaagagggaacccccggaagcgtcgagtctaccctgacccttcccaccgggcgagataccgcgatcaccctatccctgcaatatccacccgaggtgaccttgtcagcctccccacataccgttcaagagggagagaaggtcatcttcctttgtcaagcgactgcgcagccgcctgtgactggctatcgatgggccaagggcggatctcccgtgctcggagcccgtggcccaaggcttgaagttgtcgcggatgcttcattcctcacagaacccgtttcatgtgaggtctccaatgcggtgggcagcgccaatcgctccaccgcattagacgtcctgttcggccctattctgcaggcaaagcctgaacccgtaagcgtggacgtcggcgaggacgcatcgttttcttgcgcctggagaggaaatcctctgcctcgagttacatggaccaggcggggaggggcacaagtgctgggcagtggggcaactcttcgcctgccttctgttggcccagaggatgctggagactacgtgtgtcgtgcagaagcgggactgtccggtctgagggggggtgccgctgaggcccgtctaaccgtgaatgccccacccgtcgtgactgcacttcacagtgccccagcatttcttagaggacctgcaaggttacagtgcctggtcttcgccagcccagcgccagacgctgtggtatggtcttgggacgagggatttctggaggctgggtcacaggggaggtttctggtggagacgtttccggcaccagaatctaggggaggactcgggccagggctaatttctgtattacatataagtgggacgcaggagagcgactttagcaggtccttcaactgttcggctaggaaccgcctgggggaaggtggggctcaggccagtctaggcaggagagatcttctccccactgtgagaatcgtcgctggggtggcagccgctactactaccctgctgatggtcattacaggcgtggcattatgctgctggagacactcaaaagcgtcagcctccttctcagaacagaagaatctgatgaggattccagggagctctgacggaagttcctccagggggccagaagaagaggagaccggtagtagggaggatagggggccaattgtgcatactgatcactctgacctggtccttgaagaaaaaggcacccttgagaccaaagatcctacaaacggatactataaagtgcgcggagtgtcagtcagcttgtcattgggtgaagcgcctggcggaggactgtttctcccacccccttcgcctctgggcccacccggaacccctactttctacgattttaacccacacctgggaatggttcccccttgtaggttgtatagagctagagccggttacctgactacaccacatcctcgggcattcacctcttacatcaagcctacgtccttcgggccacctgatctggcccctggcacgcccccttttccgtatgccgcatttcctaccccatcacaccctcggttacagacccacgtatag

SEQ ID NO: 227776 - DNA, 1752 bp, synthetic construct
  misc_feature 1..1752: note = Description of Artificial Sequence: Synthetic coding sequence
  source 1..1752: mol_type = other DNA
atgttacggatgagggtgccagccctcctggtcttgctcttctgcttccggggacgagctggctggtctcgctactggatcagtgggaacgctgccaacggccagcacgatcttcacatccggccagtggagcttgaggatgaagcatcctacgaatgtcaggcgacacaggcaggactccggagccggcctgcccagttacatgtgctggtacccccagaagcccctcaagtcctaggcggaccgtcagtgtccctcgtggcaggagtacctgccaaccttacctgtaggtcgcggggtgatgctagaccgacgcccgagctgctttggtttagagatggggtgctcctggatggcgctacctttcaccagactttgctcaaggagggaacacccggatctgtggagagcacattgacactcactccatttagccatgacgacggtgcgacattcgtgtgcagggcacgctctcaggccctgccaacaggcagggacaccgccatcaccctgtctcttcagtatcccccagaggtgactctcagcgcttcaccacatacggtccaggagggcgaaaaggtgatctttctatgccaggccaccgcacagccccctgttaccggataccgatgggcaaagggaggatcaccggtgctcggggcacgcggacctagactggaagtggtggccgatgccagttttctgacagagcccgtatcttgcgaggtgagcaatgccgttggcagtgctaacagatcaacggctctcgatgtcttgtttgggcctatccttcaggccaagcccgaacctgtgagcgtggatgtgggcgaagatgcttcattctcatgcgcctggcgcggaaatcccctcccccgagtgacttggacgagacgagggggagcacaggtgctggggtctggcgctactcttcggctgccatcagtaggacccgaagacgctggtgactatgtatgtcgagccgaagcgggtttgagcggcctacggggtggcgctgccgaggcacgtctaacagtaaatgcccctccagtcgtcaccgcccttcatagcgctccagccttcctgaggggaccggctcgtttgcaatgcctagtatttgcctcaccagcgcctgacgccgtggtctggagttgggacgaaggttttctggaggcagggtctcaaggaaggttcctggtagagacatttccagccccagagtctcgcggagggttgggacccggtctgatttccgtccttcatatctcagggactcaggagtccgatttcagtcgctcattcaattgcagcgcccgaaatcgactgggtgagggaggtgcacaggcctcactggggaggagggacttgctccctactgtgcggatcgtggcaggcgtcgcagcagccacgacaactcttctgatggtgattaccggcgtcgcactatgctgctggaggcactccaaggccagtgcctcattttcagaacagaagaacttaatgcgtatcccgggatcttcggatggaagtagttctagagggccagaggaggaagagacaggcagcagggaggatcgtggacctatcgtgcataccgatcattcagaccttgtgctcgaagaaaagggcacactggaaacaaaagatcccaccaatgggtactacaaggttagaggagtgagcccacccgcatctcctgatagcagagtgacctcttttcagtggaagtcgcccggtatttctaacctcccatag

SEQ ID NO: 227777 - DNA, 2127 bp, synthetic construct
  misc_feature 1..2127: note = Description of Artificial Sequence: Synthetic coding sequence
  source 1..2127: mol_type = other DNA
atgctccgcatgagagtgccggcacttcttgtccttcttttctgttttagggggagagctggcccttcccctcactttctccagcagcctgaagacctagtagtcctgctgggagaggaggctcgcctgccctgtgccctcggagcttattgggggctggtgcagtggaccaaatccggacttgctctgggcggacagcgcgaccttcctggttggtctcgctactggatttcaggaaacgcagccaatggacagcatgatctccacattagacccgtcgagctggaggatgaggcatcatatgagtgccaggctacccaggcgggtttgcgctcgagacctgctcagctccatgtgttagttcctcctgaagcccctcaggtattgggcggaccaagcgtatctttggtcgctggagtgcccgcaaacctcacttgcaggtcccgaggcgacgctagacctacccctgaactcttatggttccgagacggagtgctgctcgatggagccactttccatcaaactttactgaaggaaggcacgccaggatccgtggagtcaactctgactttgactccctttagccacgatgacggcgctacattcgtctgtcgggcaagaagccaggctctgcctactggtagagataccgccataaccctctctttgcaatatcccccagaggtgaccttatctgcctccccacatacagtgcaggagggtgaaaaggtcattttcctttgccaggccaccgctcaaccccctgtgactgggtatagatgggcgaagggcggaagccccgtcttgggcgctagggggcctcgactggaggtcgtggctgacgcctcgttcctgaccgaacctgtctcttgcgaggtgagcaacgccgttggcagtgccaaccggtccaccgcgctcgacgttctgttcggtccaattctccaggcaaaacctgaaccagtgagcgtggatgtcggcgaggatgcaagcttctcctgtgcgtggcgagggaatcccttgccaagggtgacatggacccggagaggcggtgcacaggtgctgggatcaggagctactttaagacttccaagcgtagggccagaggacgccggtgactacgtctgtcgggcagaagccggattatcaggtctgagaggaggtgcagccgaagccaggttgaccgtcaatgcccctcccgtggtcaccgccttgcacagcgctcccgcttttctgaggggacctgccaggctgcagtgcttggtgttcgcaagccctgcaccagacgcagttgtgtggtcttgggatgaaggattcttggaagcaggttctcagggacgtttcttagtggaaacattccccgctccagagtccagaggagggttaggcccaggtctgatatccgtgttacatatttctgggacgcaggagtccgattttagcaggagctttaattgctctgcccgaaatagactgggggagggaggcgcacaagcaagcctgggacgcagggatctgttacctacggtccggatcgtcgcaggggtggctgcggctactacgaccctccttatggtgataacaggtgttgccctctgctgctggcggcactctaaagcctctgcaagtttttcagagcagaaaaacctgatgcggattcctggaagtagtgacggaagctccagcagggggcctgaggaggaggaaacaggcagtagagaagaccgcggacccattgtgcacacagatcatagtgacctggttctggaggagaaagggacattagagactaaggatcctacaaatggctactacaaggttcgaggcgtgtcagtgtctctgagcttgggagaggctccaggcggtggcttgtttttaccacccccaagccctttgggcccacccggtactccaactttttatgacttcaatccccaccttggcatggtgcctccctgtaggctatatcgtgccagagcaggttacctgactaccccgcaccctcgcgctttcacaagctacatcaaacccacttcctttggacccccagacctggccccaggtactcctcccttcccgtacgcggcatttcctaccccaagccaccccaggctccagacgcacgtttag

SEQ ID NO: 227778 - DNA, 738 bp, synthetic construct
  misc_feature 1..738: note = Description of Artificial Sequence: Synthetic coding sequence
  source 1..738: mol_type = other DNA
atggcggtgatcataggcgtggctgtgggggctggtgtagcctttctcgtgctcatggccacgatcgtcgctttctgctgtgctaggtctcagcgaaatcttaaaggggttgtcagtgcgaaaaatgatatcagggttgagattgtgcataaggaaccagcctcaggacgggagggtgaagagcactcaacaataaaacagctgatgatggaccgtggagaattccaacaagattcggttctgaagcaactcgaggttcttaaggaggaggaaaaagaattccagaatttgaaggatccaactaatggctattactctgtgaatacattcaaagagcaccattcaacacctaccattagcttgtcctcctgccagcccgaccttcggccagcagggaagcaacgcgtccccaccggtatgagcttcactaacatttactctactttgagtggtcagggcagactttacgactacggccagcggttcgtcctcggaatgggctctagctccatcgaactttgtgaaagagagtttcagcgcggaagcttatccgattcaagctcctttctcgatactcagtgtgattcatccgtcagtagttcgggaaagcaggatggttatgtacagtttgataaggcctccaaagcctccgctagcagtagccaccactctcagtcatccagccagaattcagacccatccaggccactgcagagaagaatgcaaacccatgtgtag

SEQ ID NO: 227779 - DNA, 2337 bp, synthetic construct
  misc_feature 1..2337: note = Description of Artificial Sequence: Synthetic coding sequence
  source 1..2337: mol_type = other DNA
atgaagcctttccagctggatctcctgtttgtgtgcttcttcctgttctcacaggagctgggcctgcaaaagcggggttgctgcctggtgctgggatatatggcaaaggacaagttcagacgcatgaatgaggggcaggtgtacagtttttctcagcagcctcaggatcaggtcgtggtttctggacagccagtcaccctcctgtgcgccatccctgagtatgatgggtttgtgttgtggattaaagatggactcgcacttggtgttggacgtgacttaagcagctatccccaatacttggttgtgggcaaccacctgtccggggagcaccacctgaagattctgcgcgctgagctgcaggacgacgcagtgtatgagtgtcaagcgatccaggccgctatccgcagtcgacccgctcggttgaccgtgctggttcctccagatgatccagtcatcttgggaggcccagtcatctcccttcgagcaggggaccccttgaatctcacatgtcacgcagataatgctaagcctgcagcgtcaatcatatggctccgtaagggcgaagtcataaacggagcgacatactctaaaacactgctccgcgacggtaaacgggagagtatcgtcagcaccttgttcatatctcccggagatgtagagaacggacagtcaattgtatgcagggcaactaacaaagccattcctggaggaaaggagacctcagtgacaattgacatccagcatcctccactggtgaatctgtcagtggagccgcagcccgtcctcgaggacaatgtggttacttttcactgctctgccaaagccaatcctgctgtgacccagtaccggtgggccaaaagagggcaaatcatcaaagaggccagcggcgaagtctatagaaccactgtcgactatacttacttctctgaacctgtctcgtgcgaggtgactaacgccctggggagcactaacctgtctcgcacagttgatgtctacttcgggccacggatgacaacggagcctcagtctttgcttgtcgacctgggcagtgacgcaatcttcagttgcgcgtggacagggaatcctagtcttaccattgtttggatgaagcgaggaagcggcgtggtgttatctaacgagaaaacacttactttgaagtctgtcagacaggaagacgccggaaagtatgtatgtcgcgctgttgtacccagggtgggggctggggaacgcgaagtaactctcacagtcaatggtcctcccatcatatcaagcactcagactcagcatgctctccacggcgagaaagggcaaattaaatgttttatcagatcgaccccccctcccgatcgtatcgcctggtcatggaaggagaatgtcttggagagtggaacctctggtcgttatacagtcgagactatcagcactgaagaaggggtaatcagcacactgacaatctcgaacattgtccgcgcagactttcaaaccatttataactgtactgcatggaatagctttggctctgacactgagattattagattaaaagagcaaggatctgagatgaagagcggtgcaggactggaagccgagtctgtgcccatggcagtcattatcggcgtcgcagttggggctggtgtcgccttcctggtgctaatggccacaatcgtagctttttgttgtgcccgaagccaacgtaatttgaagggggtggtgtccgccaaaaatgatataagagtcgaaattgtacacaaggaacccgctagtggcagggagggagaggaacactcgactatcaagcaactcatgatggaccgcggagagttccaacaagacagcgtgctcaaacaactcgaagtcctcaaggaagaggaaaaggagttccagaacctaaaggatccgactaatggatattacagtgtgaacacttttaaagaacaccactccacgcccacaatctccctgtcctcttgccagcccgacctaagaccagccggtaagcagagagtccctacgggaatgagcttcaccaatatctacagtacactcagtggacaaggtcggctttatgattacggccagcggttcgtgttggggatgggttcctcctctatcgagctgtgcgaacgagaattccaacgaggttcactgagcgatagcagctctttcctggacacgcaatgtgacagttcggtgagctcaagtgggaagcaggacggatacgttcaattcgataaggcgtcaaaagcgtctgcgagctcatcgcatcactctcagtcttccagccagaattccgatcctagtcggccactgcagcggcgtatgcagacacatgtttag

SEQ ID NO: 227780 - DNA, 1803 bp, synthetic construct
  misc_feature 1..1803: note = Description of Artificial Sequence: Synthetic coding sequence
  source 1..1803: mol_type = other DNA
atgaagccctttcagctcgatctcttgtttgtgtgtttctttctcttcagccaagaactggggttgcagaaaaggggctgttgcttagtgctggggtatatggctaaagacaaatttcgacgaatgaatgagggacaagtctactctttctcgcaacagccgcaggaccaggtggtcgtgtcaggccagccagtcaccctgctatgcgcaatacctgagtatgacggatttgtgttatggatcaaggacggactcgccctaggtgtgggacgcgatctcagcagttacccacagtatttggtggtcggcaaccatctttccggtgagcatcacctgaagatattacgcgcagaactgcaggatgacgctgtatacgagtgccaggcaattcaggctgccattaggagcagacccgctcggctcaccgttctggtgccccctgacgatccggtgatcctcggcggacccgtcatttctttacgagcgggagatcccttgaacttaacatgtcacgccgataatgcgaagcccgctgctagcataatttggctgcggaaaggagaggtgataaatggcgcaacctattcaaagactctgctgagggatggcaaacgggaaagcattgtgtcgaccctcttcatcagccccggagacgtcgaaaatggccaatctatcgtatgtcgggcaaccaataaggcgatcccaggcggtaaggagacaagcgtgaccattgacatccagcaccccccactggtcaacctgagcgtcgaaccccagcctgtgctggaggataatgttgtgacattccactgttcggccaaagcaaacccagccgtaactcagtatcgctgggctaaaagaggtcaaattatcaaagaagcatccggggaggtgtatagaacaactgtggattacacttatttcagtgaaccagtgagctgcgaggtgaccaacgccctgggcagcacaaacctgagtcggactgtcgacgtttattttggcccaagaatgactacggagccacagagcctcctcgtggatttaggaagtgatgccattttttcctgcgcctggaccggcaatccttctctgactatcgtgtggatgaagcgcggtagtggcgtcgtgctgtcaaacgagaaaacacttacactcaagagcgtcaggcaggaggatgcaggcaaatatgtctgccgggctgttgtgccacgggtcggagccggtgagcgggaggtcactctgactgtcaatggtccccctatcatctccagtacacagactcagcacgctctccacggtgagaaaggacagataaaatgcttcatacgttctaccccccctcccgataggatcgcctggagctggaaagaaaatgtactcgaaagtggaacctcggggaggtacacagtggaaacgatttctactgaagagggggtgatctcaaccttgactatctcgaatattgtgagagccgacttccaaacgatctacaactgcaccgcctggaattcgtttggaagcgatactgagattatcagattaaaagagcaagggtcagagatgaaatccggagctggtctcgaggctgagagcgtgcccatggccgttataattggtgtggcggttggggcaggggtcgctttcctcgtgctaatggccactatcgttgcattttgttgtgctcgctcccagagaagcactggcggtaggagcgggatcagcggcagaggtaccgaaaaaaaagctcgtctgcgcctcccgaggagagcctcgaagcaggagtgtaatgaacaaggatcctag

SEQ ID NO: 227781 - DNA, 2301 bp, synthetic construct
  misc_feature 1..2301: note = Description of Artificial Sequence: Synthetic coding sequence
  source 1..2301: mol_type = other DNA
atgaagccctttcagttagatctccttttcgtgtgttttttcctcttttcgcaggagctgggtcttcaaaagagaggatgctgtctggtgctgggttacatggcgaaggacaagttccgtagaatgaatgaaggccaggtgtattcctttagtcaacagccccaggaccaggtggtcgtgagcgggcaacctgtgactttactctgcgcaatccctgaatacgatggcttcgtgctttggatcaaagacggtcttgctctgggggtaggtagagacctatcctcttatccgcagtacctcgtggttggtaaccacctatctggagaacaccacctgaaaattttaagagccgaactgcaggacgacgcagtgtatgagtgtcaggctattcaggctgctattaggtcccgcccagcgaggctgacagtgctcgtgccaccagatgatcctgtgatactcggaggcccagttattagcctgcgggcaggagatccgttaaacctcacatgtcatgctgacaatgctaagcccgctgctagcattatctggctgaggaaaggtgaggtcatcaacggtgcaacctatagcaagacactcctcagagacggcaagagagaatccatagtctctactctgttcataagtccaggtgacgtggagaatgggcagtcaatagtctgtagggctacaaataaggctatacccggaggaaaagagactagcgtcacaatcgatattcaacatcccccactggttaatctgagcgtggagccccagcccgtactcgaggataacgtggtgacattccattgtagtgcaaaagctaaccccgctgtgacacagtatcgatgggccaagcgaggacagatcatcaaagaggcttcaggggaggtctatcggaccacagttgactacacatatttctctgaaccagtgagctgtgaagttaccaacgcactgggctcaaccaacctgagccgaacagtggatgtctactttgggcctcggatgacaactgagccccagtctttgcttgtcgatctgggctctgacgccattttctcctgcgcctggactggaaacccatctttgacaatcgtgtggatgaagaggggcagcggggtcgtgctatccaatgagaagactctgactctgaagtcagtgcggcaggaggacgctggcaagtatgtctgcagggcagtagttccccgtgtcggcgcaggagaaagagaggttaccctaacagtaaacggtccacccattatatcctctactcaaacacagcacgcattgcatggcgagaagggccagattaaatgttttattcgctccacccctcctccagacagaatcgcatggagctggaaggagaatgtactggagagcgggaccagcggaagatacacagtcgaaaccattagcaccgaagagggcgtgatctcaacgctgaccataagcaatattgtgcgggcagattttcagacaatctacaattgcaccgcatggaatagctttggatccgatacagagatcattcgtctcaaagaacaggagtctgtcccaatggcagtgataatcggggtggccgtaggggcaggcgtggccttcctcgtgctcatggcgaccatcgtcgcattctgctgtgccaggtcccaaagaaatcttaagggggtggtgagcgcaaaaaacgatattcgggtcgagatagtccacaaggagccagcgtccggtagagaaggcgaagagcacagcaccattaagcaacttatgatggaccgaggagaatttcagcaggacagcgtgcttaagcagctggaggttctgaaggaagaggagaaggaattccagaaccttaaagatccaaccaatggatattactctgtgaatacatttaaagagcatcacagtactccaaccattagtttgtcatcctgccagcctgatctgcgccctgccggaaagcagcgggtccccacaggcatgtcatttaccaacatctactccacgctctccggacaggggaggctctatgactacggacagcgctttgtgctcggcatggggtcctcctcaatcgaattatgcgagagggaatttcagagaggctccctgtcggactcttcctcttttctggatacacaatgtgacagtagcgtgagctcctccggaaaacaagatggatatgtgcagtttgacaaagccagcaaggcatccgcatcctcaagccatcattcccaatcaagtagccaaaattcagaccccagccggcctctccagcgtcggatgcagactcatgtttag

SEQ ID NO: 227782 - DNA, 1182 bp, synthetic construct
  misc_feature 1..1182: note = Description of Artificial Sequence: Synthetic coding sequence
  source 1..1182: mol_type = other DNA
atggggaaaagcgactttctgacccctaaggccatcgctaacaggattaagtcgaaaggattgcagaagctgcgctggtactgccagatgtgtcagaaacagtgcagggacgagaacggtttcaagtgtcactgcatgagcgaaagccaccagcggcaactccttttggcgagcgaaaaccctcagcaatttatggactatttttcagaagaattccggaatgattttctggaattactgagaaggcggttcggtactaaaagggttcataacaacattgtgtataacgaatatatctcccaccgggaacatattcacatgaatgccacacaatgggagactctcaccgactttaccaaatggttgggaagagaaggactgtgcaaagtggatgagaccccgaagggttggtatatccagtacattgacagggaccctgaaaccatccgcagacaactggagttggagaagaagaaaaagcaagaccttgacgatgaggagaagactgctaagttcattgaagaacaagtgagacgcggtctcgaagggaaagaacaggaagttcccacatttaccgaattgtcacgcgaaaatgatgaggagaaggtcacctttaacctgtctaagggtgcatgctcatccagcggtgccacctcttctaagtcttctacactcggccctagcgccctgaagacaatcggaagtagcgccagtgtgaagagaaaggagtcttcgcaatctagtacccaaagcaaggagaagaagaaaaaaaaaagcgcactcgatgagattatggagatagaggaagagaagaagagaacagccaggacagattattggttgcaacccgagatcatcgtgaaaatcatcaccaaaaagctgggcgagaaatatcacaagaaaaaagctatcgtgaaagaggtgattgataagtacacagctgtggtaaaaatgattgactccggcgacaagctaaaactcgaccaaacacacctggagacagtgattcccgcacctgggaagagaatcctggttctaaatgggggttatcgaggcaatgagggaacactagagagcatcaatgagaaaacctttagcgccacaatagtgatcgagaccggcccacttaaggggaggcgcgtggagggcatccagtacgaggatattagcaagctggcctag

SEQ ID NO: 227783 - DNA, 1125 bp, synthetic construct
  misc_feature 1..1125: note = Description of Artificial Sequence: Synthetic coding sequence
  source 1..1125: mol_type = other DNA
atgggaaagagtgactttctcacacccaaggccattgctaaccgaatcaaaagtaagggcctccaaaaacttcgttggtactgtcagatgtgccagaagcaatgtcgtgatgagaatggctttaaatgccactgtatgagtgaaagtcatcagcgacagctcctgttggcatccgagaacccacagcagtttatggattacttctctgaagagttccgtaatgattttctcgaactgcttaggcgaaggtttggtacaaaacgtgttcacaataacatcgtgtataatgagtacatttctcaccgtgaacatatacatatgaatgctacacaatgggagacactgaccgacttcactaagtggcttggtagagaggggttgtgcaaggtggatgaaacaccgaaaggatggtacatccagtacatagacagagaccctgaaaccatcagacgtcaactcgaactcgagaagaagaaaaaacaagacctggacgacgaggagaaaacagcaaagttcattgaggaacaggtgcgcaggggtcttgagggcaaggagcaggaagtaccaacctttacagagctttctagagaaaatgacgaggagaaagtgacctttaacctgtccaaaggagcttgtagcagcagcggggcaacatcgagcaagtctagtacactcggaccctcagccttgaaaactatcggatcgtccgcctctgtgaagcgcaaagagtcatcacagtcctccacacaaagcaaggagaagaaaaaaaagaagtccgctcttgacgagatcatggaaattgaagaagaaaaaaagagaaccgccaggaccgattactggctccagcctgaaatcattgtaaagatcattacgaagaaactcggagagaaatatcacaagaaaaaagccattgtgaaggaagtgatagacaagtatactgcggtcgttaagatgatcgactcaggggataagctcaaattggaccaaacccatctggagacagtaatccctgccccaggaaaacgaatcttggtactaaacgggggttatcgaggaaatgagggcacattagaatcgataaacgagaaaactttttcggccacaatcgtgattgagactgtttag

SEQ ID NO: 227784 - DNA, 867 bp, synthetic construct
  misc_feature 1..867: note = Description of Artificial Sequence: Synthetic coding sequence
  source 1..867: mol_type = other DNA
atgaacgcaacgcaatgggaaacgctgaccgacttcacaaaatggctcggtcgcgagggactgtgcaaagtagatgaaacccctaaaggctggtacatacagtacatcgacagagacccggagacaatccgacgccagttggaactagagaaaaagaagaagcaggacttagatgatgaggagaagactgccaagttcatcgaggagcaggtacgacgaggactcgaaggcaaagagcaggaagtccctacctttacggaattatcacgggaaaatgacgaagaaaaagtgactttcaatttgtccaaaggggcttgctcttcctctggagcaaccagtagcaaaagttctaccctggggccaagtgctctgaaaactattggttcctcagcttccgtgaaaaggaaggaaagtagccagtcctcaacccagtccaaggagaagaagaagaagaagtctgctctggatgagatcatggagattgaggaggaaaaaaaaagaaccgcccgaacagactattggcttcagcccgaaattattgtcaaaattattaccaaaaagctgggagaaaaatatcacaagaaaaaggccatcgtgaaagaggtgatcgacaagtataccgccgtggttaagatgattgacagcggcgataagctgaagctggaccagactcacctagagaccgttatccctgctccagggaaacgaatactggtgcttaatggaggctataggggtaacgagggtacactggagtcgattaatgaaaagacattttctgcaactatagttatcgagaccgtcagcctgttcacacagcggcagaaattccaaaatgccctgaaaatgtgtcactctttcttttag

SEQ ID NO: 227785 - DNA, 2361 bp, synthetic construct
  misc_feature 1..2361: note = Description of Artificial Sequence: Synthetic coding sequence
  source 1..2361: mol_type = other DNA
atgaatgaagcaaaagtcaaagaaacgctacgacgttgcggggctagtggggatgaatgcggaagactccaatacgccctgacctgcctgcggaaggtcactggcctgggaggggagcataaggaggacagctcttggtccagtttggacgcgcgaagagaaagcggctctgggccttcgactgataccctatctgctgctagtttgccctggccacccggaagtagccagctgggaagagcaggcaactctgcgcagggccctcgctctatatccgtaagtgctttaccggcatccgactctcctaccccgagtttttcagagggactgagcgatacatgtatcccgctgcatgctagcggaagactgacccctagggctttgcatagtttcatcacacctcctaccaccccccagctccgcaggcatacgaaattgaaaccacccagaacgcctcctccgccatctagaaaggtctttcagttgctccctagcttccctacgctcactaggtctaaatcgcatgagtcacaattggggaacaggatcgatgacgtgtcttcaatgagattcgatctctcccatggtagtccgcagatggttcgacgggatattgggctgtcagtgactcatcgcttcagcactaaatcatggctgagccaggtgtgccatgtgtgtcagaaatctatgatattcggggtaaaatgtaagcactgtcgccttaagtgtcacaataaatgcaccaaggaggccccagcgtgtagaattagctttctccccttaacccgccttcgacgtaccgagtcggtaccgtctgacatcaataaccctgtcgaccgcgcagcagaaccgcacttcggcaccctgcccaaggccctgactaaaaaagagcaccctcccgctatgaatcacctagatagcagctcaaacccatcctccacaacatccagcacaccatcaagccctgccccattcccaacaagctctaaccctagctcggccaccactccgcctaacccgtcccccggacagcgggactcccggtttaactttcccgcagcatatttcatccaccacagacagcagtttatcttcccggtgcctagtgcaggtcattgttggaaatgcctgctgatcgctgagagcctgaaggagaacgccttcaacatttccgcatttgcccatgctgcacctctcccagaggctgcggacgggactagattggacgaccagccaaaggcggacgtcctcgaagctcacgaggctgaagctgaggagcctgaggccggaaagtcagaagccgaagacgacgaagacgaggttgacgacctgccttctagccggagaccctggcgtgggcctatctccagaaaagcctcacagacctcagtgtacttacaggagtgggacatcccctttgagcaggtagaactgggcgaacccatagggcagggcagatgggggagagtgcaccggggtcgttggcatggtgaggtggcgattcggcttctggaaatggacgggcataaccaagatcaccttaagctgtttaaaaaggaagtaatgaactatcggcaaactaggcacgaaaatgtagtcttgtttatgggagcatgtatgaatcccccacacctggccatcataacctctttttgcaaaggcaggactttgcactctttcgtccgcgacccaaaaacaagtctggacatcaataaaaccaggcagatcgcccaagaaatcatcaaaggcatgggctatctccacgcgaagggaattgtccacaaagacttaaaatccaagaatgtgttttatgacaatggcaaagttgtgatcaccgattttggcctattcggcatctcaggtgtcgtgagagagggtcgaagagaaaaccagctgaaactgtcgcacgattggttatgctatctcgcgcctgagatcgttcgagagatgacacctggcaaagacgaggaccaactgcccttctctaaggctgccgacgtttacgcgttcggaacggtgtggtacgaactccaagctagagattggccccttaagaaccaagctgcagaggcttccatatggcagattgggagtggggaagggatgaagcgggtgcttacctcggtgagcctgggaaaagaggtcagcgagatcctgtcagcttgctgggccttcgaccttcaggagagaccgagcttcagtctgctgatggacatgctggagaagctccccaaactgaacagacgtctgtcccatcccggtcacttctggaagagcgctgacattaattcatctaaagtggtcccacgctttgagagatttggtctgggcgtgctcgaaagcagcaaccccaaaatgtag

SEQ ID NO: 227786 - DNA, 2772 bp, synthetic construct
  misc_feature 1..2772: note = Description of Artificial Sequence: Synthetic coding sequence
  source 1..2772: mol_type = other DNA
atggacagagcggctctacgcgcagcagccatgggggaaaagaaagaaggaggcggaggaggtgatgcagccgcagccgaggggggtgccggagcagcggcaagcagggcgcttcaacaatgtggacagctgcagaagctcattgacatttcaatcggttccttgagaggcctcaggactaagtgcgcagtttccaacgatttgacccagcaagaaatcaggaccctggaagcaaagctcgtacgatacatctgcaagcagaggcaatgtaaactctcagtggctcccggtgagaggacccctgaactcaattcatatccgcgtttcagcgattggttgtacaccttcaacgttcggccagaagttgtgcaggaaatccccagagacctcactcttgatgcgctgctcgagatgaacgaagctaaggttaaggagacactacgtagatgtggtgctagtggtgacgaatgcggacggctgcaatacgcactcacttgcctacgaaaggtgacaggcctcggcggagagcataaggaggatagctcatggtcctcactggacgctcggagagaatcaggctccggcccaagcactgacacattgtccgccgcatcgctcccttggcccccaggctccagccagctggggcgagccggtaactcagctcaaggaccacgcagcataagcgtgtcggcactgccagcctccgattccccgaccccgtctttcagtgagggactgtctgatacgtgcatccctctccatgcctctggaagactgacgcctcgcgcactccactcttttatcactcccccaacaacaccccagctcagacgccacacaaaacttaaaccacccagaactccgcctcccccttctaggaaggttttccaattgcttccaagttttccaaccctgaccaggtccaagagtcatgaatctcaattgggcaatcggatcgacgacgtaagttccatgcgctttgacctgtctcatggcagtccacagatggtccggagggatattggactgtcagtgacccataggtttagtacaaaaagctggctttctcaggtgtgtcacgtttgccagaaatccatgatttttggggtgaaatgcaagcactgtcgactgaagtgtcataataagtgcaccaaagaggccccagcttgccgcatcagcttcctgcctctgacgcggctgcgtcgcactgaatcggttccctccgacattaataatcccgtagacagagccgcagaaccccactttggaaccctgcccaaggccttgacaaagaaagagcacccaccagctatgaatcacttggactcaagttctaacccaagtagcacgacctcttcaaccccctccagccctgccccattccccacaagtagcaatccctcatccgccactactccacctaacccatctccgggacagagagacagccgattcaacttccccgctgcctatttcatacaccaccgacaacagttcatctttcccgtgccttcggctggccattgttggaaatgcctgcttatagccgagtcactgaaagagaatgccttcaatatatctgcctttgctcatgcagctcccttacccgaggccgctgatggcacccggttggacgaccaaccaaaggccgacgtgctggaggcccatgaggcggaagccgaggaaccggaagctgggaagtctgaggccgaagatgatgaggatgaggtggatgacctgccctcgagccggcgtccctggcgtggcccaattagtcgcaaagcttcccagacgtccgtgtatctgcaggaatgggacatacccttcgagcaggtagagttgggggaaccaatcgggcagggacgctggggaagagttcacagaggtcgctggcatggcgaagtcgcgatccgcctcctggaaatggacgggcacaatcaggaccacctcaagctttttaaaaaagaagtcatgaactataggcaaacccgccatgaaaatgtcgtgctgtttatgggagcttgcatgaatccacctcatctggcaattatcacttctttttgtaaggggaggactctgcattcattcgtccgagatccgaagactagtctcgatattaacaagacaagacaaatcgcacaagagatcatcaagggaatgggctacctgcacgctaaaggaatcgttcacaaggatctgaaatctaagaacgtgttttatgataacggaaaagtagttattaccgacttcggtctgttcgggatcagtggtgtagtgcgtgaaggccgacgagaaaaccaacttaaactgagtcacgactggctctgctatctggccccagaaatagttagagagatgactcctggaaaagatgaggatcagctgcccttttccaaagccgctgatgtgtatgcgttcggcaccgtgtggtatgagctccaggccagagattggcccctgaaaaaccaggccgcagaggcctcaatctggcagattggtagcggagaggggatgaagcgcgtgctaacatctgtcagtctcggaaaggaagtctccgagatcctctccgcatgctgggcattcgatttgcaggagaggccatccttctccctgctcatggatatgctcgaaaagcttccaaaactaaataggagacttagccatccaggccacttctggaagagtgccgacatcaactcaagcaaggtcgtcccccgatttgagagattcggtctcggggtgttggaatccagtaatccaaaaatgtag

SEQ ID NO: 227787 - DNA, 2289 bp, synthetic construct
  misc_feature 1..2289: note = Description of Artificial Sequence: Synthetic coding sequence
  source 1..2289: mol_type = other DNA
atgaatgaagccaaggtaaaggagaccctgaggaggtgcggcgcatcaggagacgagtgcggaagattgcagtacgccctcacgtgtctccggaaggttaccgggctgggcggtgagcacaaggaggactcgtcttggagcagtttagacgccagacgtgagtctgggagtgggccatcaactgatacactatctgccgcaagtctcccttggccaccaggttcatcccagctaggtagggccggaaattccgcccaggggcctcggtccatttccgtctccgccctgcccgcttctgatagtccgaccccttcattctctgaggggctcagcgatacttgtatccctctccacgcatctggccgattgacacccagggctctccactctttcattacccctcctacaacacctcagcttcgccgacatacgaagcttaagccgccacgtacgccaccaccccctagcaggaaagtcttccagttgttacctagcttcccaactctcactagaagcaagtcgcatgagtctcagctgggcaaccgcattgacgacgtcagcagcatgcgatttgacctcagccacgggagccctcagatggtcagaagagacattggactgagtgtcacacatagattttccacgaagtcttggttgtctcaggtgtgccacgtgtgccaaaaatccatgatcttcggagtgaagtgcaaacattgccgactgaaatgccacaataaatgcacaaaagaggctcccgcttgtcgcataagctttctgccactgaccaggctccggaggaccgaatccgttccatccgacatcaataaccctgtcgatcgagctgctgagccgcatttcggcacactcccgaaagcgctcacgaagaaggagcacccgccagctatgaaccacttggactcaagctcaaatccatcgtccaccacctcgagtacgccatcttcacctgcaccgtttcccacctccagtaacccatccagtgctacaacaccaccaaacccttcacctggccaacgtgacagcagatttaacttccctgccgcatattttattcaccacaggcagcaattcattttcccagtaccgtcagccggacactgttggaaatgtttgctgatcgcggaatccctaaaagagaatgctttcaacatcagtgccttcgcgcatgccgctcctctacccgaggcagccgatggaacacgtctagatgaccagcccaaggcagacgtgctggaggctcacgaagcggaagctgaggaacccgaggcgggtaagagcgaagcggaggacgatgaggacgaggtcgacgatctcccttcatcccgcagaccttggcgagggccaatctccaggaaggcatcgcaaactagcgtgtacctgcaggaatgggatatccctttcgagcaggttgaactcggagaaccaattggacagggtaggtgggggagggtgcaccgcggacggtggcacggggaggtggcaataaggcttctggagatggacgggcataaccaggaccatcttaagctgtttaaaaaagaagtcatgaattatcggcagactcgacatgaaaatgtagttctttttatgggtgcctgtatgaatcccccacacttagcgatcataacaagcttttgtaaagggcgaactctgcactctttcgtgcgtgatcctaagacatcccttgatattaataaaacccgccagattgcacaggagattattaaagggatggggtacctgcacgctaagggcattgtccacaaggaccttaagtccaagaacgtattctacgacaacggcaaagttgtgatcaccgatttcgggttgtttggaattagcggtgtggtgagagaagggaggcgcgagaatcagctgaagctcagccatgactggttgtgctacctggccccagagatcgttagggaaatgactcccggaaaggacgaggaccaactgccattctccaaggccgctgacgtgtatgcgttcggcacggtttggtatgagctgcaagccagggactggcccttaaaaaatcaggctgccgaggccagtatttggcaaatcggcagcggagagggcatgaagagggtgttgacgagtgttagcctcggtaaagaagtgtctgagattctgtctgcctgttgggcctttgatctccaggagcggcctagtttttctcttcttatggacatgttagagaagcttcctaagttgaacagacgtttgtcccaccctggccatttttggaaaagcgctgagctatag

SEQ ID NO: 227788 - DNA, 375 bp, synthetic construct
  misc_feature 1..375: note = Description of Artificial Sequence: Synthetic coding sequence
  source 1..375: mol_type = other DNA
atgcaagcggatctcgaaatcccacgcgatttaacgcttgatgctctgctcgaaatgaatgaggccaaggtcaaggaaacactgcggaggtgtggagcgtccggggatgaatgtgggagactccagtatgccttaacctgtcttcggaaggtgacaggacttgggacatgggggctcccaccctccccactgccagggctggttccactgggcttatggcccagcctgtggtgggtcatggagcgagggaagagaggacctgggttcttaggccagccaggaaaagctcgggttgggtgctcccagcctcctgagaaactgagtcagggccctcagggcagcggatcctggtgggtgtggcctggccgtatatag

SEQ ID NO: 227789 - DNA, 1842 bp, synthetic construct
  misc_feature 1..1842: note = Description of Artificial Sequence: Synthetic coding sequence
  source 1..1842: mol_type = other DNA
tgacacagtttcattacgcccccaacaaccccacagctgagaaggcatactaagttaaaacctcctcgaacccctcctcctccctctcgcaaagtgtttcaactgctgcctagctttcccaccctgacacgaagtaaatctcatgagtcccagttggggaaccgaatagatgatgtgtcctctatgcggttcgatctctcacacggctccccccaaatggtgcggagagacattggcctttctgtgacccaccggttctcaacaaaatcatggcttagccaggtttgccacgtttgtcagaaatcaatgatctttggcgtgaaatgcaagcactgtaggctgaaatgtcacaataagtgcactaaggaagccccagcatgccgaattagtttcttacccttgaccaggctccgcagaaccgaatctgtgccaagtgatatcaataaccccgtcgacagggctgccgagccacatttcggaacactgcccaaggcgcttactaaaaaggaacacccacctgccatgaaccacctggactcgtctagtaatcctagctctacgaccagctctaccccatcaagcccagcaccctttccgaccagtagcaatccctcatcagccacgactccccctaatcccagcccaggccagcgcgattctaggttcaacttcccagccgcttactttatccaccacagacaacaattcatcttccctgacatttccgcctttgcccacgccgcaccactgccggaagccgctgatggcacgagactggacgaccagccaaaggccgatgtgcttgaagcccacgaggccgaggccgaggagcctgaggcaggaaaatctgaagctgaagacgacgaggacgaagtggatgatctgccttctagcagaaggccatggaggggacctatatcccgcaaggcctcccagaccagtgtctacctccaggagtgggacatccctttcgagcaggtggagcttggcgagccaattggccaaggcaggtgggggcgagtccatcgaggacggtggcacggggaggtcgcgattaggctgctggaaatggatggacataatcaggatcatttgaagcttttcaaaaaagaagttatgaattacaggcagaccagacacgagaacgtagttctatttatgggagcttgcatgaatccccctcatctggcaattattacatctttttgcaaaggtaggaccctccattctttcgtacgcgaccccaagacgagtctcgatattaacaagacacggcagatcgcccaggagataatcaaagggatgggctacctgcacgctaaggggattgttcacaaagacctgaagagcaagaacgttttctacgataatggtaaggtggttatcacagatttcggcctgttcggcatcagtggtgttgtccgcgaaggtaggcgtgagaatcagctcaaactgtcgcacgattggctctgttatctagcccctgagattgtgagggaaatgactcccggaaaagatgaagatcaactgccattctctaaggctgctgacgtgtatgcttttggtaccgtgtggtatgagctccaggctcgggactggccacttaaaaaccaggccgctgaggctagtatatggcaaatcggatccggggaagggatgaagagagtgttgacctctgtgagtttggggaaggaggtctctgaaattctgtccgcctgctgggccttcgatctccaagagcgaccctcttttagtctgctgatggacatgctggagaagcttcccaaacttaataggcgtcttagccatcccggacatttctggaaaagcgcggagctgtag

SEQ ID NO: 227790 - DNA, 2634 bp, synthetic construct
  misc_feature 1..2634: note = Description of Artificial Sequence: Synthetic coding sequence
  source 1..2634: mol_type = other DNA
atggaccgggctgccctgcgcgctgccgcaatgggagagaaaaaggaaggaggcggaggcggagatgcagccgcagccgagggcggtgccggagccgctgcaagccgcgctctccagcagtgtggtcagctccagaagctgatcgacatcagcattggaagtctgcggggtctgagaacaaagtgcgctgtttccaacgatctcactcaacaggagatacgtacactggaggctaagctcgtgaggtacatctgtaaacagcgccagtgcaagttgagtgtcgctcctggcgaacgaacccccgagctcaacagctaccccagattcagcgattggctgtacacctttaacgtgcgtcctgaggtggtacaggaaatccctagagacctcacgttggacgcactactagaaatgaatgaggccaaagttaaggaaacactgcgccgttgcggtgcctctggcgatgagtgcgggaggctgcagtacgcacttacctgtctgcgtaaagtgacaggcctgggcggagaacacaaggaggattccagctggtcatctcttgatgccaggagggaaagcggatccggccctagcaccgacactctgtctgctgccagcctgccttggcccccaggctctagccagctgggcagggccggaaactctgctcaagggcctagatcaatatcagtgtctgcccttcctgcaagcgacagccctactcctagcttttcggagggtttgtctgatacctgcatacccttgcacgcttccgggcgtctgaccccaagagccctccactctttcattacacctccaactaccccgcaacttcggaggcacacgaaattgaaacctcctaggacaccgcctccaccatctcgcaaagtcttccagctcctgccttcttttcctactctgactagatccaagtcacatgaatcccagctcggtaaccgtatagatgatgtcagttccatgagatttgatctgtcacatggaagcccacaaatggtcaggagagatatcggccttagtgttacgcatcggttcagtaccaagagctggcttagccaggtgtgtcacgtctgccagaagtccatgatattcggagtcaaatgtaagcattgtcgtctcaaatgccacaataaatgtactaaggaggcacccgcatgcagaatctctttcttgccattgacccgattgcgccgaacggagtccgtcccttcagatatcaataacccagtggatagagctgctgaaccccactttggaaccctccctaaggctttgactaagaaagagcatccacccgctatgaaccacctggattcttccagtaacccgagctccaccacgagctctacgccctctagcccagctccctttcctacttcctcaaaccccagtagcgccacaaccccacctaacccctcccccggtcaacgagactcaaggtttaattttcctgcagcatacttcattcatcatcgtcagcagtttatctttcctgatatcagtgcgtttgcccacgctgccccactacccgaggcagctgatggaacccggctagatgaccagcccaaagctgacgttttggaagcgcacgaagcagaggccgaagaaccagaggccggaaagagcgaagccgaggatgacgaggatgaggtagacgacctaccctcctcacgcagaccctggcggggtcctatctcaagaaaggcaagccagactagtgtgtacctgcaggaatgggacatcccattcgaacaagtggaactgggcgagccaatcggccaaggacgttgggggcgagttcaccgcggtaggtggcatggcgaggtggcgatccgactgctggagatggacggccacaatcaggatcatctgaaactgtttaagaaagaggtaatgaactacaggcagacaagacatgagaacgttgtgctctttatgggggcatgcatgaatccaccccacctcgctattatcacaagcttttgcaaaggaaggacactgcacagcttcgtcagggatccgaagacaagtttggacatcaataagacgaggcagatcgcccaggagataatcaagggaatgggatacctccacgccaaaggcatcgttcacaaagacctgaagtcaaaaaacgtgttttatgacaacgggaaggtggtcatcactgatttcgggctgtttggcattagtggggtcgtacgcgagggtagacgagagaaccaactgaaactgtcccacgattggctgtgttatctggctcctgaaatagtccgcgaaatgacacctggtaaggacgaagatcagctcccattctctaaggccgctgacgtgtacgcctttggcaccgtgtggtatgagctgcaggctcgtgattggcccttaaaaaaccaagccgctgaggccagcatatggcaaataggcagtggagagggtatgaagcgagtgctgacctccgtgagtctggggaaggaagtctcagagatactgtctgcttgttgggccttcgatctgcaggagcgcccatcatttagtctattgatggatatgctggagaagcttcctaaactgaacagaagactgagtcatcccggacacttctggaagtctgctgagctgtag

SEQ ID NO: 227791 - DNA, 1311 bp, synthetic construct
  misc_feature 1..1311: note = Description of Artificial Sequence: Synthetic coding sequence
  source 1..1311: mol_type = other DNA
atgtacaacaagaaagccaagatggagcctaacgccagtgagagtgctattcctgccagaagacaaaggcaaccgagagcaaagaaaaagagtaagcctttgaacttaaagatccacagtagcgtgggaagttgtgaaaacattccctcccagcagcgtagccctcttttaagtgagagaagcttgcgcagttttttcgtgggacatgccccatttcttccctccacccctcctgtccacacagaggccaacttcagcgcgaacacactgagtgtccccaggtggagtccccagattcccaggcgtgacctgggcaattccatcaagcaccgattcagcactaaatactggatgtcccagacgtgtacagtttgcggcaaaggaatgttgttcggactgaagtgcaagaactgcaagctcaaatgtcacaacaagtgtacaaaagaagctcctccgtgccacctattgatcatccaccggggtgaccccgctcggcttgtacgtaccgaatccgtcccttgtgatatcaataaccctctcagaaagccccctcgttactccgaccttcacatttcgcagacccttcctaaaaccaacaaaatcaataaagatcacattcccgtaccctaccaacctgacagctctagcaaccccagcagcactacctccagcacacctagctctccagccccacccctgcccccaagtgccacccctcccagcccgttacatccctcacctcagtgcactcgccagcagaaaaattttaacctgccagcaagtcactactacaagtacaaacaacagttcatctttcccgatgttgtgcccgtaccagagacgcctacccgcgctcctcaggtaatcctacatccagttactagcaaccctattctcgaggggaatccgctgctccaaatagaggttgagcctacctcagaaaatgaagaggtccacgacgaagcagaggagtcagaagatgatttcgaagaaatgaacttgagcctcctgtccgccagatcattccctaggaaggcctcacagacaagcatattcttacaggagtgggatatcccctttgaacagctggagatcggcgagctgattggtaaaggacggttcggccaggtataccacgggagatggcacggcgaagtcgccattcgtcttattgatatcgagagggacaacgaggatcaactgaaggcttttaaacgtgaggtgatggcctacagacagacacgccacgaaaatgttgtgctgtttatgggcgcatgtatgtcccctccccatctagctatcatcacctag

SEQ ID NO: 227792 - DNA, 2853 bp, synthetic construct
  misc_feature 1..2853: note = Description of Artificial Sequence: Synthetic coding sequence
  source 1..2853: mol_type = other DNA
atggacgaggaaaatatgaccaagagtgaagaacagcagcccctgagtttacagaaagccctacagcagtgcgaacttgtgcagaatatgatcgatctgtctatctcaaacctggaaggcctcaggacaaagtgcgccacttccaatgacctgacccaaaaagaaatccggacactggagagtaagctggtgaagtattttagccgccaactttcctgcaaaaagaaggtggccctgcaagagcgaaatgctgaactggacgggttcccccagcttcgtcactggttccggatcgtggacgtcagaaaagaagttctcgaggaaatcagccctggtcagttgagtctggaagatctactggagatgaccgacgagcaggtgtgtgaaacagtcgaaaaatacggcgctaatcgggaggagtgcgccagactgaatgcttcccttagctgcctcagaaatgttcacatgtcaggaggaaatctgtccaagcaagattggacaattcagtggccaaccacggaaaccggcaaagagaataacccagtttgtcccccagaaccgactccatggattagaacccatctgtcgcaatcccctcgcgtgccatcaaagtgcgtgcagcactattgccacacgtctcccactcctggggcacccgtgtatacgcatgtcgatcggctaaccgtggacgcctatcccggactgtgtccccctcctccactggagtccggacatcggtccctgcccccatcgcccaggcagaggcatgcggtccggacacctcctcgcacccctaatattgtgactaccgtgactcctcctggaaccccccctatgcggaagaaaaataagctcaaaccgcctggcactcccccaccatcctccaggaaactcatccatctcattcctggattcaccgccttacataggagtaaatcacatgaatttcaattgggacaccgtgtggatgaggcccacaccccgaaagcgaaaaagaagagcaagccacttaatctgaagattcattcaagtgttggatcctgtgaaaatatcccttctcagcagagaagcccattgttaagtgagaggtctctgagaagtttcttcgtgggtcatgcgccttttctgccaagtaccccgcctgtgcataccgaagctaacttttctgcgaacaccctgagcgttcctagatggtcccctcagattcctcgccgagacctagggaacagtattaagcatagattcagtaccaaatattggatgagccaaacctgtacagtttgcgggaaaggaatgctgttcggtttgaaatgcaagaactgcaagctgaaatgccacaacaagtgtaccaaggaagctccgccatgccatctactcatcatccatcgtggagaccccgctcgcctggtccggaccgagtccgttccctgcgatataaataaccccctccgaaagccccctcggtattcagatctgcatatctcccaaaccttgcccaagactaacaagatcaacaaggatcacattccagtcccttaccaacccgactcatcttcgaatccctcgtcgaccacatcctctacaccatcctctccggctccacccttaccaccatcggcaacccctccgagcccactccatccttcaccacagtgtacccggcaacaaaaaaacttcaacttaccggcatcacactactataagtataagcagcagtttatttttcctgatgtggtgcccgtccctgaaactcctacgagggcaccacaggtcatccttcatcccgtcacctccaacccaatcctggaaggcaatcccctcctgcagatcgaagtggaaccgacgagtgagaacgaggaggtgcacgatgaagccgaggagagcgaggacgactttgaggagatgaatctgtctctgctgtccgcacgttcgttcccgaggaaagcatcccagacttctattttcttacaagagtgggacataccattcgagcagttggagattggtgaattgatcggtaagggccgatttgggcaggtctatcacggtcgttggcacggtgaagtggcgattcgcttgatcgacatagagcgagataacgaggatcagctaaaggctttcaagcgggaagtaatggcgtaccgtcaaacacggcatgaaaacgtggtcctgttcatgggagcttgtatgtcccccccacatctggcaattatcacaagcctctgcaagggcagaaccttatacagcgtggtgagagatgcaaaaatagtcttggatgtcaacaagactcgacagatcgcacaggaaatagtgaagggcatgggctacctccacgcaaaggggattctccataaggatttgaagagtaagaacgttttttacgacaatggcaaagttgtcatcacagactttggtttgttctctatttcaggagttctgcaagccggaagacgggaagacaagctacgtatccagaacggctggttgtgtcatctggccccagagatcattcgccagctgtcccccgataccgaggaggataagctccctttttctaaacattcagatgtattcgccctgggtaccatctggtatgagctgcacgcgagagaatggccctttaagacacagccggctgaggcaatcatctggcagatggggactggcatgaaacccaacttgtcccagattgggatgggtaaagaaatctccgatattctgctgttctgctgggcttttgagcaagaggagcgaccgacatttactaaactgatggatatgctggaaaaactgcccaagaggaatcggcgactctcgcacccgggtcacttttggaagtctgctgaactgtag

SEQ ID NO: 227793 - DNA, 2766 bp, synthetic construct
  misc_feature 1..2766: note = Description of Artificial Sequence: Synthetic coding sequence
  source 1..2766: mol_type = other DNA
atgatcgacctgtcaataagtaatctcgagggactcaggacaaagtgcgccaccagtaatgatcttacacagaaggagattcggaccctggagtctaaactggttaaatacttctcccgccagctaagttgcaagaaaaaagtggctctccaggagaggaacgccgaactggatgggttcccgcagttgcggcattggttccggatcgtggatgtgcgcaaagaggttctggaggagatttccccaggtcaactgagtcttgaagatctgctggaaatgacagacgagcaagtatgcgagacagttgaaaaatacggcgctaacagggaggagtgcgctcgactaaacgccagtctctcgtgccttagaaacgttcacatgagtggcggaaacctatcaaaacaagattggactatccagtggcccactacagagaccggtaaggaaaataaccccgtctgtcctcctgagcctactccgtggatcagaacacatcttagtcaatctcctcgcgtgcctagcaaatgtgtccagcactactgccacacttctcctactccaggcgctcctgtgtacactcacgtggatagactgacagttgacgcgtatcccggactttgtccccctcctcctctggagtcgggacatcgatcccttccccctagcccgaggcaacggcacgctgtaaggactccaccaagaacgcccaacattgtgacgactgttaccccacctggtacgccccctatgagaaagaaaaataagctgaagccacctggcactccgcctccaagctccaggaaactgatccacttgatacctggtttcacagccctgcaccgttctaaatcccatgaattccaactgggccaccgcgtagacgaagcccacacacccaaggccaagaaaaagtctaaacctttgaacttgaaaatccactccagtgtgggatcttgtgaaaacatcccctcacagcagcgcagcccccttctctccgagcgcagtcttcgctccttcttcgtcggccacgctcctttcttgccatctacacctccagtccatactgaagctaatttctccgccaacaccctgtccgtcccccgatggtccccccagattcccaggcgcgacctgggtaacagcatcaagcaccggttttccaccaagtactggatgtctcagacctgtaccgtatgtggaaagggcatgctgttcggattaaaatgtaagaactgcaagcttaagtgtcacaacaagtgtacaaaagaggcccctccatgccacctgctgattatacacagaggggaccccgcaaggttggtgcgcactgagtctgtgccctgtgatattaataatcctttgaggaaacctccaaggtactccgacttgcacatttcccaaaccttgcccaagacaaacaagatcaataaagatcatatacccgtgccctatcaaccagattcctcatccaatccatccagtacgacaagctccactcctagcagccccgcaccacccctccctccatctgctaccccacctagtccactccatccatccccacagtgtaccagacagcaaaagaattttaaccttcccgcaagccactactacaagtacaagcaacagtttatctttcctgatgtggtgcctgtccctgagaccccaacacgtgctccacaggtgatattgcaccctgtgaccagtaaccccatcctcgagggcaacccactcctccagatcgaggtcgagcctacctccgagaatgaggaggtgcatgatgaggcagaggagagtgaagacgactttgaggaaatgaacctgagcctgttaagcgccagaagctttccacgcaaggcttcccagacaagcatctttcttcaggagtgggatatcccatttgagcaactcgaaatcggcgagttgatcggcaaaggcagatttgggcaggtgtaccatggcagatggcacggcgaggttgctattcggttgatcgacatagagcgcgacaacgaagaccagctgaaggccttcaagagggaagtgatggcatataggcagacacgacatgagaacgtggtgctctttatgggcgcttgcatgtcaccccctcacttggccatcatcacaagcctgtgtaaagggcgtacactctactccgtggtgagggacgctaaaattgtgctggatgtgaataagacccggcaaattgcacaggaaatcgtgaagggaatgggctacctccacgcaaaaggcattctgcacaaggatctgaagagtaagaacgtcttctacgataacggcaaagtcgttattactgactttggactgttctctatcagtggggtattgcaagctggcagaagagaagataaactgcgaattcagaacggttggctgtgtcatctcgcacccgagataatccgacagctgagccctgacactgaagaggataagctgccgttttcaaagcactcagacgtgttcgcccttggaacaatttggtacgagctgcacgcccgagaatggcccttcaagacacaaccagccgaggctataatttggcagatgggcaccgggatgaagccaaacctttcccagatagggatgggcaaggagatctccgatatcctgctgttctgctgggccttcgagcaggaggagcgccctacgtttactaagctcatggacatgctcgaaaagcttccaaagcggaaccgacgcttatcacaccctgggcacttctggaaatccgccgaattgtag

SEQ ID NO: 227794 - DNA, 1245 bp, synthetic construct
  misc_feature 1..1245: note = Description of Artificial Sequence: Synthetic coding sequence
  source 1..1245: mol_type = other DNA
cgcgcaaaaaagaaatcaaagcctctaaatttgaaaatccatagctctgtgggctcttgtgaaaacattccctcacagcagcgatcccctctactttcggaacgatccctgaggagttttttcgttggccacgcaccattcctaccaagtaccccacccgttcataccgaggcgaatttctcagccaatactctcagcgttccgcgttggagcccccaaattccaaggagggacctggggaactccatcaagcatagattctcaacgaagtactggatgtcccagacatgtaccgtatgtggtaagggtatgctcttcggtctgaaatgcaagaattgcaaactgaaatgtcacaataagtgcacaaaggaggcgcctccatgccatctgctgattatccatcgcggtgatcccgctcgcctcgtgcgcaccgagagtgttccttgcgacattaacaaccctctccgaaaacctccgcgatacagcgacttacacatctcccaaactctgcctaagacaaataaaattaacaaagatcatattcccgtgccctatcaaccggattcctcatctaatccctcttctacaacatcctctactccaagtagcccggcacctccactgcctccaagtgcaaccccacctagcccactgcacccaagtccacagtgtaccaggcaacaaaagaacttcaacctgccagcgtcacactactataaatataagcagcaatttatcttccctgatgtggtacctgttcctgaaaccccaactcgggcaccccaggtaatacttcatcccgttacgtcgaaccctattctggagggaaaccccttgctgcagatcgaggtcgaaccgacttccgaaaacgaggaggtccatgacgaggcagaagagtccgaggatgacttcgaagagatgaatttatctctgttaagcgcacgtagtttcccaaggaaggcctcgcagacttccatcttcctgcaggagtgggatattccctttgagcagttggagatcggagagctcataggaaagggcagattcgggcaggtgtatcacgggcgatggcacggtgaggtcgctatcagactcatcgacatcgagagagacaatgaagatcagctaaaagcgtttaagcgagaggtgatggcttaccgccagaccaggcatgagaatgtggtcttattcatgggagcatgcatgagtccccctcatctcgctatcattaccagacccgtttag

SEQ ID NO: 227795 - DNA, 3921 bp, synthetic construct
  misc_feature 1..3921: note = Description of Artificial Sequence: Synthetic coding sequence
  source 1..3921: mol_type = other DNA
atggagttctatgaatccgcctatttcattgtcctcatcccttctatagtgataaccgttatttttctgttcttttggctcttcatgaaggaaacattatacgacgaagtccttgccaaacagaagcgggaacagaagcttattcctacaaagaccgataagaaaaaggctgagaagaaaaaaaacaaaaaaaaagagatccagaatggaaatttacatgaatcggattctgagagcgtgccccgtgattttaaattatccgacgccctggctgtcgaagacgaccaagtggctccagtgcctttaaacgtggttgagacgtcctcctctgtcagagaaagaaagaaaaaggagaagaaacagaaacccgtgcttgaagaacaggttatcaaagaatccgatgccagtaaaatcccaggaaaaaaagttgagcctgtcccagttacaaaacaacccacccccccaagcgaagcagcggcatctaagaaaaaaccaggccagaagaaatcaaaaaatggctccgacgatcaggataagaaggttgagacccttatggtcccatctaagcggcaggaagccttacctctgcaccaggagacaaaacaggagtccggctctgggaaaaagaaagccagttcaaagaagcagaaaaccgagaacgtatttgtagacgagcctcttatccatgccacgacctatattccactgatggacaacgcagacagtagtcctgtggtcgacaagagagaagtgatagatctgctcaaacccgatcaggtcgagggaatacaaaaatctggaacgaagaaattaaagactgaaacagataaggaaaacgccgaagtgaagttcaaggattttttactctctttgaagacgatgatgttttcggaagatgaagcactgtgtgtcgttgatctccttaaagagaagtcaggtgtaatacaggacgcactaaagaaaagctcaaaaggggaactgaccaccctgatacatcagttgcaggagaaagacaagctgctggctgcagtcaaggaagatgccgcagccactaaagatcgatgcaagcaactgacccaggagatgatgacagagaaagaacgctcaaacgttgtaatcactcgtatgaaggataggatcgggacactagagaaggaacataacgtgttccagaacaaaatacatgtttcataccaggagacacagcagatgcagatgaagtttcagcaggtgcgcgaacagatggaggcagagattgcacatttgaagcaggaaaatgggatccttcgcgacgcagtcagtaataccaccaaccaactagagagtaagcaatctgcagagcttaataaactgcggcaggattacgccaggctagtgaatgagctgactgaaaaaactgggaagttgcaacaggaagaagtccagaaaaagaatgcagaacaagccgctacccagctaaaggtccagctccaggaagccgagcggcgttgggaggaagtacagtcctacatacggaaaaggacggccgaacacgaagcagctcagcaagatctgcaatccaagttcgtggcaaaagagaacgaggtgcagagcctgcacagtaagctgacagacacactcgtttcgaagcagcaattagaacagcggctcatgcagcttatggagtctgagcagaagagggtgaataaggaagagtctttgcagatgcaggtccaggacattctggagcaaaatgaagcgctgaaagcccagattcaacaattccacagtcagattgccgctcagacttcggcgtccgtgctggctgaagagttgcacaaagtgattgctgagaaggacaaacaaatcaaacagactgaggacagtctggcttccgaacgggataggctgacatccaaagaggaggaactgaaggacattcagaacatgaactttctgctaaaggcagaggtgcagaaactccaggccttggctaatgaacaagcagccgctgctcacgagcttgagaaaatgcagcagtctgtttatgttaaggatgataagatacgcctgcttgaggagcaactgcagcacgagatcagcaacaagatggaagaatttaaaatcctcaatgatcagaataaggctcttaaatccgaggtgcagaagctgcagactctggtctccgaacagccaaacaaggatgttgtggaacagatggagaagtgtatccaggagaaggacgaaaaactgaagacagtcgaagaattgcttgaaacaggtctgatccaggtcgccacaaaggaagaggagttgaatgcgatccgaactgaaaactccagcctgaccaaagaagtccaggacctcaaggccaagcaaaacgatcaggtcagtttcgccagcctcgtggaagaactaaaaaaggtcatccacgaaaaggacggcaaaatcaaatcagtcgaggagctactcgaggctgaattgttgaaagtggcaaataaagagaagacagtccagctctctatcacatccaaagtgcaggagctgcagaatctgctgaagggcaaggaagagcagatgaacacaatgaaggcggtactggaggagaaggagaaggatctcgccaatacgggtaagtggttacaggacctccaggaagagaacgaaagcctcaaggcacatgtccaggaagtggcccagcacaacctcaaggaggcatcttcggctagccagtttgaggaacttgagattgtgctcaaggagaaagaaaatgagctgaagcgactcgaggccatgctgaaggaacgagaatccgatctaagctctaaaacacagctactgcaggacgtccaggacgagaataagctgtttaagagccagattgagcagctcaaacaacagaattaccaacaggcaagctcgtttccaccacacgaagaattactcaaagtcatcagcgaacgcgaaaaggaaatctctgggttgtggaacgaacttgatagtcttaaagacgccgtcgagcaccaaagaaagaaaaacaatgacctgagagagaaaaactgggaggccatggaggccctagctagcaccgagaagatgttacaggacaaggtgaataagacaagtaaggaacggcaacagcaggttgaagctgtggagctggaagccaaggaggtgttgaagaaactcttcccaaaggtgtccgtaccctccaatctatcctatggcgagtggctgcatggctttgaaaagaaggccaaagagtgtatggcaggaactagtgggagtgaggaggtcaaagtgctggagcacaagttgaaagaggcggatgaaatgcatacgttgctgcagcttgagtgcgaaaaatataagagcgtgctggctgaaactgaggggatcctgcagaagctccagaggtccgtcgagcaggaagagaacaagtggaaagtgaaagtcgacgagtcacacaagaccatcaagcagatgcagagctcgttcacttcaagcgaacaggagctggagcgcttgcgaagcgaaaacaaagacattgaaaacttgcgcagagagagagagcatttagaaatggaattggaaaaggcagagatggagagatccacttacgttacagaagtgagagaactgaaggcacaactgaacgagactctcacaaaactgagaacggagcagaacgagcgccaaaaagtcgccggtgatctgcataaggctcagcagagcctggaactgattcaaagcaagatagttaaggccgctggagacacaaccgtcatcgaaaatagtgatgtcagccctgaaaccgagtcaagcgaaaaggaaacaatgagcgtatctctgaaccaaactgtgacccagctgcagcagcttctgcaggctgtcaaccaacagttgaccaaggagaaagagcactaccaggtactggaatag

SEQ ID NO: 227796 - DNA, 4074 bp, synthetic construct
  misc_feature 1..4074: note = Description of Artificial Sequence: Synthetic coding sequence
  source 1..4074: mol_type = other DNA
atggagttctatgagagcgcttactttattgttctgattccatcaatcgttatcacagtgatcttcctgtttttctggctctttatgaaggaaaccttgtatgacgaagtgctggccaaacaaaagagggagcagaaactgattcctactaagaccgacaagaagaaagctgagaaaaagaaaaataaaaaaaaagaaatccagaatggcaatctccacgaatccgattccgagagcgtgcccagggatttcaaactgagcgatgcactggcagtggaagatgaccaggtggccccagtgcctttgaatgttgtggaaacgagttccagtgttagggaacggaagaagaaagaaaaaaagcagaaacccgtccttgaggaacaggtcataaaagaatcggacgcatcgaagatacccggaaaaaaagtagagcctgtgcccgtgactaagcagcccacaccacccagcgaagccgctgcatcaaagaagaagccaggccagaaaaagtcaaagaatggctcagacgatcaggacaaaaaagtggaaaccctgatggttccatccaagagacaggaggctttaccactgcaccaggaaacaaagcaagaatctggctccggaaagaagaaggctagcagcaaaaaacagaagactgagaatgtgttcgtcgacgagcctctgattcacgcaaccacatatatccccctgatggataatgcggatagttcgcctgttgtggataagcgagaagtgatagatctgctcaagccggaccaggtggagggcattcagaaatccggcacaaagaagttaaagaccgagacagacaaagaaaatgccgaggtgaaattcaaggatttcctgctctctctgaagaccatgatgttcagcgaggatgaggctctttgtgtggtggacctcctgaaggagaaaagtggagtgattcaggacgctctcaaaaaatccagtaaaggggaattgacaactcttattcatcagctgcaagagaaggacaagctcctcgctgccgtcaaagaggacgcggcagctaccaaagacagatgcaagcagttgactcaggagatgatgaccgaaaaggaaagatctaatgttgtaattactcgaatgaaagacagaattggtacccttgagaaggaacacaacgtatttcaaaacaaaattcatgtctcttatcaggaaactcagcagatgcagatgaaatttcagcaggttcgtgaacagatggaggccgagatcgcacatctaaagcaggagaacgggattcttcgagatgccgtgtccaacaccactaatcaattagagagcaaacagtccgcggaactgaataaacttagacaggactatgccagattggtaaacgagcttacagagaagaccggcaaactacagcaggaggaagtgcaaaaaaagaacgctgagcaggcggctactcagctgaaagtacaattgcaagaggcagagcggagatgggaggaggttcagtcgtacattcggaagcgcaccgctgaacacgaggccgcacagcaggatctacagtctaaatttgtagccaaagaaaatgaggtgcagtctctccactctaagctaactgatactctagtgtctaaacagcagctagagcagcggttaatgcaactaatggaatctgagcagaaacgggtgaataaggaagaaagtctacagatgcaggtacaggacatccttgaacagaatgaggcactaaaggcacagatccagcagttccattcacagatcgccgcacaaacctccgcctcagtgctggcagaagagctgcacaaagtgatcgctgaaaaagacaagcagatcaagcagacagaggattccctggcgagtgaacgagaccgactcacgtccaaggaggaggaactcaaagacattcagaatatgaacttcttactgaaagccgaggtacagaaactgcaagctcttgccaatgaacaggccgctgctgctcatgaactggagaaaatgcagcagagcgtgtacgtcaaagatgataaaatccgtctgttagaggagcagctgcagcacgagatctctaacaagatggaagaatttaagatcttaaacgaccagaataaggccctaaagagcgaggtgcagaaactccagaccttggtctctgagcagccaaacaaagacgtggtcgaacagatggaaaaatgtattcaagagaaagacgaaaagctgaaaacggttgaggaactgcttgagacaggactcatccaggtggccaccaaggaggaggaactgaacgcaataaggacggagaactcaagcctgaccaaggaggtccaggacctgaaggccaaacagaatgaccaagtgagcttcgcctctttggttgaagagctgaagaaagtgattcatgaaaaggatggcaaaatcaaatccgtggaggagctgttggaagctgagctcctgaaagtggccaacaaggagaaaaccgttcaagatttgaagcaggaaatcaaggcgcttaaagaggaaattggcaatgtacagctcgagaaagcacaacagctctcgataactagcaaggtgcaagagctgcagaacctgctaaagggcaaggaggaacagatgaacacaatgaaagcagttcttgaggagaaagagaaagacttagctaatacaggcaaatggctccaggatctgcaggaggagaatgagtccctgaaagcccatgttcaggaggtagcacagcacaacctgaaggaggcaagtagcgcttcacaattcgaggagctagagatcgttttgaaggaaaaagagaatgaactgaagaggttagaagccatgctcaaggagcgagaatcagatctgtcctctaagactcaactcctgcaggatgtgcaggacgaaaataagctttttaaaagtcaaatcgagcagctcaaacagcaaaattaccagcaagcatcgagtttcccgccacatgaggagctgctgaaagtgatttcggaaagagagaaagagattagtggactctggaacgagctagacagcctgaaagacgcagtggagcaccagcgaaaaaagaacaatgacctccgagagaagaactgggaagcaatggaggctctggcctccacagaaaagatgctacaagataaggttaacaaaaccagcaaagagaggcagcagcaggtcgaggccgtcgaactggaagccaaagaggtgttgaagaaattgttccctaaggtgagtgtgccttccaatcttagctacggcgagtggcttcatggtttcgagaagaaagccaaagagtgtatggcagggacaagcgggtctgaagaggtgaaggttctggagcacaagctcaaagaagctgatgaaatgcacacactgctgcagcttgagtgtgagaagtacaaatccgtgcttgccgagacagaagggatcttacagaaactgcagcgaagtgtcgagcaggaagaaaataagtggaaggtcaaggtggacgagtcacacaagaccattaagcaaatgcagagtagtttcacctcctctgaacaggagctcgagcggcttcgttcagagaataaggatattgagaacttacggagagaaagagagcacctggagatggaattggagaaagccgagatggaaaggtctacctacgtgaccgaagttcgagagcttaaagacctgctgaccgaattgcaaaaaaagttagacgatagttatagcgaagctgtgcgacagaacgaggagctcaacctgctgaaagcccagctgaatgaaacgctcactaaactaaggaccgagcagaacgaacgccagaaggtggccggtgatctacacaaagcccagcaatctctcgaactcattcagtccaaaatcgtgaaagcggctggagatacaaccgtcattgagaattcagacgtgtccccagagacagagagctccgagaaggagaccatgtcagtatccctgaatcagacagtgacgcagctccagcagttactccaggccgtgaaccaacagcttactaaggaaaaagaacactatcaagtccttgaatag

SEQ ID NO: 227797 - DNA, 3921 bp, synthetic construct
  misc_feature 1..3921: note = Description of Artificial Sequence: Synthetic coding sequence
  source 1..3921: mol_type = other DNA
atggagttctatgagtccgcttactttatcgtcctcataccgagcatcgtgattactgtgatattcttatttttctggttattcatgaaggaaactctgtatgacgaggtcttggcgaaacaaaagcgcgagcagaagctgattcccactaagaccgataaaaagaaagctgagaagaaaaagaacaagaagaaggagattcagaacggcaatctacacgaaagcgatagcgaatccgtacctagggatttcaaactgtctgatgccttagcagtggaggacgaccaagtggctccagtgcctctaaacgtcgtggagacgagcagctctgtgcgggagcgaaaaaagaaggagaaaaaacaaaagcctgtcctggaggagcaggtgatcaaggagtctgatgcaagtaagatcccaggcaaaaaggtcgaacctgttcccgttaccaagcagcctacaccaccatctgaggctgcagcctcaaagaaaaagccgggacagaagaagagtaagaacggttcagacgaccaggacaaaaaagtcgaaaccctcatggtacccagcaagaggcaggaggctctgcccctgcaccaggagacaaagcaggagagcggatctggcaaaaagaaggcctcctccaagaagcagaagaccgaaaacgtatttgttgacgagcccctgatccatgccacgacctacattccattgatggataatgcagatagttcgcccgtggttgacaagagggaagttatcgacttgttgaagccagatcaagtggaaggcatccagaaaagcggcactaaaaagctgaagactgaaacggataaggagaatgccgaagtgaagttcaaagactttctcctgagcctgaagactatgatgttttccgaggacgaggccctgtgtgtggtggatttgctgaaggaaaagtccggcgttatccaggatgccctgaagaagagctccaagggtgagctcacgacattaattcatcaactgcaggagaaggacaaattgctcgctgctgttaaggaggacgccgcagcaactaaggatcgatgtaaacagctgacccaggagatgatgacagaaaaggagagatctaatgttgttatcaccaggatgaaagatagaattggaactctggaaaaggagcacaatgtgttccagaataaaattcacgtgagttatcaggagacccagcaaatgcaaatgaaatttcagcaggtgcgcgagcagatggaagctgaaatcgcccacttaaagcaagaaaacggcatcctgcgcgacgctgtcagcaacacgaccaatcaactggagagcaagcagagcgctgagctaaacaagcttcgtcaggactacgccaggctggtcaatgagcttactgaaaaaaccggtaaactacagcaggaggaggtccagaaaaagaacgccgaacaagctgccacgcagcttaaggttcagctgcaggaagcggagaggaggtgggaggaagtgcaatcctatatcaggaaacggacggcggaacacgaggcagcgcagcaggacttgcagtccaagtttgtagcaaaggagaacgaggtgcaatcacttcacagcaagctaactgacacactggtctccaaacagcaactagaacagcgactgatgcagctcatggagagtgaacagaagcgggtgaacaaagaggagtcgctgcagatgcaggtgcaagatatccttgaacaaaatgaagcattaaaagcgcaaatccagcaattccactctcaaattgctgcccaaactagtgccagtgtcctggcagaggaactccacaaggtgattgctgagaaagataaacagattaagcagactgaggatagccttgcttcagagagagatcgcctgacgtcaaaagaagaggaactgaaagacatccagaatatgaactttctcctgaaagcagaggttcagaaactgcaggcattggccaacgagcaggcagccgctgcccatgaactcgagaaaatgcagcagtccgtgtacgtcaaggacgacaagattcgcctcctggaggaacagcttcaacacgagatctctaataaaatggaggaattcaagattctcaatgatcagaataaggcattaaaatctgaagtccagaaactgcagacacttgtaagcgaacagccaaacaaggatgtcgtcgaacagatggagaagtgtatccaggaaaaagatgaaaaactaaaaacggtggaagaactgctggaaacaggtttaattcaggtggctacaaaagaggaggagttaaatgccatccgaacagaaaactcttctctgaccaaggaggtacaagatctgaaggccaaacagaatgatcaggtctcttttgcatctcttgtcgaagagctcaagaaagtaattcatgaaaaggatggcaaaattaaaagtgtcgaggagctgctggaagctgagctcctaaaggtagcaaacaaagaaaaaacagtgcagctgtcaattacttccaaggttcaggagctgcagaacctgctgaaggggaaagaggaacagatgaacacaatgaaagcagtccttgaagaaaaggaaaaagacctggccaacactggtaagtggttgcaggatctgcaggaagagaatgagtcgctgaaggcccatgtgcaggaggtggctcaacacaacctgaaagaggcgagcagcgctagccaattcgaagagctggagatagtactcaaagaaaaagagaatgagctaaagaggctcgaggctatgctcaaggaaagagaatccgatctatcctccaaaacgcagttattgcaggacgtccaagatgaaaataaacttttcaagtcccagatcgaacagctcaagcagcagaactaccaacaggcgagttctttcccaccgcacgaggaactcctgaaggtgattagcgagagagagaaggaaataagcgggctgtggaatgaactggactccctgaaggacgctgtggagcatcagaggaagaagaacaatgatctgagagagaagaactgggaagccatggaggcactggccagcaccgagaaaatgctacaagacaaagtcaacaaaacctctaaagagcgacagcagcaggtagaggccgtcgagctcgaagctaaggaggtgctgaagaaattgttcccaaaagtaagtgtgccatctaacctgtcttacggtgagtggctgcacggcttcgagaagaaggcaaaagagtgtatggctggtaccagcggatctgaagaagtcaaagtgttggagcataagctcaaagaagcagacgagatgcatacacttctccagctagaatgcgagaagtacaagtcagtgctggccgaaacggagggcattttacagaaactgcaacggagtgtagagcaggaggagaataagtggaaggtgaaagttgacgagtctcataagaccataaaacaaatgcagagctccttcacatcttctgagcaggagcttgagagactccggtcagagaataaagacattgaaaatttgcgcagggagagagaacatctggaaatggaactggaaaaggccgagatggagcgctcaacgtacgtgaccgaagtgagagaactgaaagctcaactcaacgaaactctaaccaagctacgcaccgaacagaacgagagacagaaggttgctggggatttgcacaaggcacagcagtctctcgagcttattcagtcaaagatcgtcaaagctgccggtgacaccactgttatcgagaattccgacgtgagcccagaaacagaatcctccgagaaggagactatgtccgtgagtctcaatcaaaccgttacccaactgcagcagctgctccaggcagttaatcaacagctcaccaaggagaaggaacactatcaagtgctcgagtag

SEQ ID NO: 227798 - DNA, 4074 bp, synthetic construct
  misc_feature 1..4074: note = Description of Artificial Sequence: Synthetic coding sequence
  source 1..4074: mol_type = other DNA
atggagttctacgaaagtgcctacttcatcgtgcttattccatccatcgtgatcacagttatttttttgtttttctggctcttcatgaaggaaactctgtacgatgaggtgctagcaaagcagaagagagagcagaagctcatccctacaaaaactgataagaaaaaagccgagaaaaaaaaaaacaaaaagaaagaaatccagaatgggaacttgcacgaatctgattcagagtctgtccccagagacttcaagttatctgatgcgttggccgtggaagacgaccaggtcgctcctgtcccactcaacgtagtggaaacctctagctcggttcgggagcggaaaaagaaggaaaagaagcaaaagcccgtcttagaagagcaagtgattaaggaatcggacgccagtaagattcccggaaagaaggttgagcctgtgcctgtgacaaaacaacctacccctccctccgaggccgctgctagtaagaagaaacctggccagaaaaagagcaagaatgggtccgatgaccaggataagaaggtcgaaacactcatggtgccatccaagaggcaggaagctctccctctgcatcaggaaaccaagcaggagtcggggagcggaaagaagaaggccagtagcaagaaacagaaaactgaaaacgtttttgtggacgagcccttgatccacgccactacgtatatcccacttatggacaatgcagacagtagtccggtggtagataaaagggaagttattgacctccttaagcccgatcaagtagaaggaattcagaagtccggcaccaagaaattaaaaaccgagactgacaaagagaacgccgaagtgaagtttaaggactttctgctgtcactaaagacgatgatgttttccgaagatgaagccctgtgtgtggtagacctgctgaaagaaaaatctggggtgatccaggacgctctgaagaagagttctaagggcgagctgacaacactgattcatcagctgcaagaaaaggacaaattgcttgctgcagtgaaagaagatgccgcagctactaaagataggtgcaagcagctgacccaggaaatgatgaccgagaaggaaaggtcaaacgttgtgattactagaatgaaagaccgcatagggacactggaaaaggaacacaacgtgttccagaacaaaatccacgtgtcatatcaagaaacccagcaaatgcagatgaagtttcagcaggtccgcgaacagatggaagccgagatcgctcacctcaagcaggagaacggcatcctccgggacgcagtttccaacacaaccaaccagctcgaatccaagcagtcagccgagctcaacaaacttcgtcaggattacgcacgcctggtcaacgaactgacagagaagaccgggaagctgcagcaagaggaggttcaaaaaaaaaatgctgagcaggccgctacccaactcaaagtccagctgcaggaggcggagagacgctgggaggaagtccagtcttatatcaggaagagaactgcagagcacgaagccgcacagcaggatctccagtccaaattcgtggctaaagagaacgaagtccagagcttgcatagcaagctaaccgatacgcttgtgtcaaaacagcagcttgagcagcgcctcatgcagctgatggaatcagagcagaagcgtgtaaacaaggaggagagtctccagatgcaggtgcaggatatcctcgagcagaatgaggccttgaaagcccaaatccagcagttccatagtcaaatcgctgctcaaacctctgcgtctgttctggctgaagagctgcataaagttattgccgaaaaagacaagcagattaaacagaccgaagatagcttggcgagcgagcgcgatcgactgacgtctaaggaggaggagctcaaggatattcagaatatgaattttcttctgaaggctgaagtccagaaattgcaggccctggcaaatgaacaggctgccgctgctcacgagctggagaagatgcagcaatccgtctatgtcaaagacgataagattcgattactagaagagcagttgcagcatgaaatcagtaacaagatggaagaattcaagattttgaacgaccagaacaaagcgctgaagtctgaagtgcaaaaattgcaaacccttgtcagtgaacagcccaataaagacgtcgtagaacagatggagaagtgcatccaggagaaagatgagaaactgaagacagtcgaggagctgcttgagactggcttaatccaggttgccaccaaggaggaagaactcaacgccattagaaccgaaaacagtagcctgaccaaggaagttcaggatttgaaagcaaaacagaatgatcaggtgagctttgcctcgcttgtggaagaattgaagaaagttattcacgagaaagatggaaagattaagagtgtagaggagctccttgaggctgagttactcaaagtagcaaataaagagaagacagttcaggaccttaagcaagagatcaaagctttgaaagaagagatcggcaatgttcaattggaaaaggcccagcagctgagcatcacaagcaaggttcaggaactgcaaaacctgttgaaggggaaagaagaacagatgaataccatgaaggccgttttggaagaaaaagaaaaggacctcgcgaatactggaaaatggctgcaagatctacaagaggagaacgaatcactgaaggcgcatgtgcaggaagtggctcagcataatctgaaagaagcatccagcgcaagtcagttcgaagaactggagatcgttctgaaggagaaggagaatgagttgaaacgactggaagccatgctgaaagaaagagaaagcgacctttcatccaagacccagcttttacaggatgtgcaagatgagaacaagctgttcaaaagtcagattgaacaactcaagcagcagaactatcaacaggctagttcatttccccctcatgaagaactgctgaaagtgattagcgaacgagagaaagagatttctggcctctggaacgaacttgactctttgaaagacgccgtggagcaccagcgcaaaaagaataacgacttgagggagaaaaattgggaggctatggaagccctggcatccacggagaagatgttgcaagacaaggtgaacaagacatctaaagagcgccagcagcaggtggaagcggtggagctggaggccaaagaggtgctgaaaaaactgtttcctaaagtgtcggtcccttccaatctgagttatggagagtggctgcacggatttgagaaaaaggctaaggaatgtatggctggtacctcaggaagtgaagaggtcaaagttttagaacacaaactgaaagaggcagacgagatgcataccctcctgcagcttgagtgcgagaagtataaatccgttctggctgaaaccgagggtattcttcaaaagcttcaacggtctgtagagcaggaagaaaataaatggaaagtcaaagttgacgagtcacacaaaacaattaaacaaatgcagtcgagcttcacttctagcgagcaggagttggagaggctgcgctccgaaaacaaagacatcgagaacctgcgtcgagaacgagagcacctggaaatggaactggagaaggccgagatggagcggtctacctatgtgaccgaagtccgtgaactgaaggacctcctcaccgagcttcagaaaaaactggatgattcgtattctgaggccgtccggcagaacgaggagttaaacctccttaaagcacagcttaatgaaaccctgactaaactgcggaccgaacaaaatgagcgccagaaggttgcaggtgacctgcataaagctcagcagtctctggaactgattcagtccaagattgtcaaagccgcaggggacactacagtcatcgaaaactccgatgtcagtcctgagacagaatctagtgaaaaggaaacgatgagtgtttcactgaatcagaccgtaactcagctacagcagctcctgcaggccgtcaaccagcagcttacgaaagagaaggaacactaccaggtgctggagtag

SEQ ID NO: 227799 - DNA, 3921 bp, synthetic construct
  misc_feature 1..3921: note = Description of Artificial Sequence: Synthetic coding sequence
  source 1..3921: mol_type = other DNA
atggaattttacgaatctgcttactttattgtgctcattccaagcatcgtgataacagtgatctttctgtttttctggctgtttatgaaggaaacactatatgatgaggtgcttgcaaaacagaagagggagcaaaaattgatacctacgaagacggacaagaaaaaagcagagaaaaaaaagaacaaaaagaaagagatccaaaatggtaatctgcacgaatctgacagtgagtcagtgcctcgcgatttcaagttatccgatgccttagcagtggaagacgatcaggttgcacctgtgcctctgaacgtggttgagaccagttcgtccgttcgtgagcgcaaaaagaaggagaaaaaacagaagcctgtcctcgaggaacaagtgattaaggagtcagatgccagcaagataccaggtaagaaggtcgaaccagtgcctgtgacgaagcagcccacccctcctagcgaggctgccgcaagcaagaaaaagccaggccaaaagaagagtaaaaacgggtctgacgaccaggataagaaggtcgagacactgatggtgccatcaaagagacaggaggctctgcctctgcaccaagagaccaagcaagaatctggctctgggaagaagaaagcctccagtaagaagcaaaagacggagaacgtcttcgttgacgagcctctcatccacgccaccacctatatccccttgatggataatgccgacagttccccggtagttgataaacgtgaggttatagatctgcttaagccagaccaggtagaaggaatccaaaaaagcggcaccaaaaaacttaagaccgagacagataaagagaatgccgaagtaaagttcaaagactttctgctgtcactaaaaacaatgatgtttagtgaggacgaggccctgtgtgtggtcgatcttcttaaggagaagtcaggggttatccaggacgcccttaagaagtctagcaaaggcgagcttaccactctgatccatcagcttcaggaaaaggataaacttttggccgcagttaaagaagacgccgctgcaactaaagatcgttgcaagcaattgactcaggaaatgatgactgagaaggagcggagtaatgtggtgatcacccggatgaaggacagaattggaacgctagagaaagagcataatgtattccaaaacaagatccatgtgagttatcaggaaacgcaacagatgcagatgaagttccagcaggtccgggaacagatggaagccgaaatcgcacatctcaaacaagagaacggaatcctgagagacgccgtgtcaaacactactaaccagctggaatctaaacagtctgcggaacttaataaattgagacaggattacgccaggttggtgaacgaactcactgaaaaaactggcaagctacagcaggaagaggtccagaaaaaaaatgccgaacaggctgctacccaactcaaggtccagctgcaagaagccgagcgtcggtgggaagaagtccaaagttatatcaggaagaggactgccgaacatgaggcggctcagcaggacctgcagtccaaattcgtagcaaaggaaaacgaagtacaatcattgcactccaaactcacagacacactggtatctaagcagcaattggagcagagactcatgcagctcatggagtccgaacagaaacgggtaaacaaggaggaaagcctacagatgcaggtgcaggacatcttggaacaaaacgaagcactcaaggctcagattcagcagttccacagtcagattgcagcccagacttccgcgtccgtgctcgcagaggaattgcataaggtcatcgccgagaaggacaagcagatcaagcagacagaagacagccttgcctcagaaagggatagattgacttccaaagaggaggaacttaaagacattcaaaacatgaattttcttctgaaggcagaagtccaaaaacttcaggccttggccaacgagcaggccgctgctgcacatgaattagaaaaaatgcagcagagcgtctacgtgaaggacgataagatccggctgcttgaagaacagcttcagcacgagatctcaaacaagatggaagaattcaagatcctcaatgaccagaacaaggctctgaagtctgaggtccaaaagctgcagaccctcgtctctgaacagcctaacaaggacgtcgttgagcagatggaaaaatgtatccaggaaaaggacgagaagctaaaaactgtagaggaattgctggaaacaggcctgatccaggtggcgacaaaagaagaggagctaaacgcaatccgcaccgagaactcgtccttaaccaaggaagttcaggatctgaaggccaaacagaacgaccaggtaagctttgcctccctggtcgaggagttgaaaaaagttatccatgagaaggacggtaaaatcaagtcagtggaggaattactggaagcagagctcctcaaagtggcaaacaaggaaaaaaccgttcagctgagcattactagcaaagtccaggaactgcagaatctgctcaaaggaaaggaggagcagatgaacactatgaaggccgtattggaagagaaagaaaaggacctggccaataccgggaagtggcttcaagatttgcaggaagaaaatgaatccctgaaggcccatgtgcaagaagtggcgcaacataacctcaaggaagcatcttcagccagccaattcgaggagctagaaatcgtcctgaaggagaaagaaaacgaactaaagcgattagaggccatgcttaaagaacgcgaaagcgacttatcatcaaaaacacagctgctgcaagacgtgcaagacgagaacaagctatttaagtctcaaatcgaacagctaaaacaacagaattaccaacaagcatcttccttcccccctcacgaggagctcctcaaagtgatttcggaacgtgagaaagagatatcaggattgtggaatgagttggactcacttaaggacgctgtcgagcaccagcggaagaagaataatgatttgcgcgaaaaaaattgggaggccatggaggccttggcatctactgaaaagatgctgcaggacaaggtcaataagacaagtaaagagcgacagcagcaggtcgaagcagtggaactggaggccaaagaagtgctaaagaaactgttccctaaggtttcagtgccatccaatctatcttacggcgaatggctgcacggattcgaaaagaaagctaaggaatgcatggcgggaacatctggctcagaagaggtcaaggtcctagagcataaacttaaggaggctgacgaaatgcatacactgcttcagctggagtgcgagaaatacaagtcagtgctcgctgaaactgaggggatcctacaaaagctgcagcgctcagtggaacaggaagagaacaagtggaaagtaaaggtggacgagtcacacaagacaataaaacagatgcaaagcagcttcactagctcagaacaggagctggagcgacttcggagtgagaataaggatatcgaaaacctacggagagagagggagcacctggagatggagctggagaaggcggaaatggagagaagcacatatgtcactgaggtgagagaacttaaggcgcaactgaacgagacgcttaccaaattgaggaccgaacagaacgagaggcagaaagttgcaggcgacttgcacaaggctcagcagtctctagaactcatccagtcaaagatcgtgaaggcagcaggggacacaaccgtcattgaaaacagtgacgtgtcacctgagaccgagtctagcgaaaaggagaccatgagtgtctcgttaaaccagaccgttactcagctgcaacagttgctgcaggctgtcaatcagcagctcacgaaggagaaagagcattatcaggtactggagtag

SEQ ID NO: 227800 - DNA, 4074 bp, synthetic construct
  misc_feature 1..4074: note = Description of Artificial Sequence: Synthetic coding sequence
  source 1..4074: mol_type = other DNA
atggagttctacgagagcgcctatttcattgtgctgatccctagcattgtgattacagtgattttcctctttttttggctgtttatgaaggagaccctctacgatgaagtgctggccaaacagaaaagggaacagaagctgatcccaacgaagaccgataagaaaaaagcagagaaaaaaaagaataagaaaaaagaaatccagaacggaaacttgcacgaatccgattctgagtccgtgccccgagatttcaagctgagcgatgccctggcagttgaggacgaccaggtggcccctgtccccctgaacgtagtcgaaactagctcaagcgtgcgcgagcgcaaaaaaaaggaaaaaaaacaaaaaccagttctcgaggagcaagttataaaggagagtgacgcaagtaaaatccccggtaagaaggtggaaccagtgcctgtgaccaaacagccaactccaccttccgaggccgcagcgtccaagaaaaaacctggtcaaaaaaaaagcaaaaacggatctgacgaccaggacaagaaagttgaaactctcatggtgccaagtaagcggcaggaggctcttcccctgcatcaggaaactaaacaggaaagtgggtctggaaagaaaaaagccagctcaaaaaaacagaaaacagagaatgtatttgtggacgaaccacttatacatgcaactacctacatcccacttatggacaacgcggacagcagccctgtggtggacaagagagaagtgattgatcttctgaagcctgatcaggtggagggtatccaaaaatctggcactaagaaacttaagacagagaccgacaaggagaacgctgaggtgaagttcaaggattttttgctgtccctcaaaaccatgatgttctctgaggatgaggccctttgtgtggttgacctgctgaaggagaagtctggagtgatacaggacgccctgaaaaagtcaagcaagggagaacttactaccctcatccaccagctgcaggaaaaggataagctcttagcggctgtaaaggaggacgccgcagccacgaaggacagatgcaagcagcttacccaggaaatgatgacagaaaaagaaagatcaaatgttgtgatcacccgcatgaaagaccggatcggaaccttagagaaggagcacaatgtctttcagaacaagattcatgtctcttaccaggagacgcagcagatgcagatgaagttccagcaggttcgcgagcagatggaggccgaaatcgctcatttgaaacaggagaatggcatattgagggacgccgtgtctaatactaccaaccagcttgaatcgaagcaatcagcggaattaaataagctgcggcaggactatgcgcgactggtgaatgagctgaccgaaaagaccgggaagctgcaacaagaggaggtccagaaaaaaaatgctgagcaggccgcaactcagttgaaggtgcagctccaggaggccgagcggcgatgggaggaagttcagtcttacatcagaaagcggaccgccgagcacgaggctgcgcagcaggatcttcagagcaaattcgttgctaaagagaacgaggtgcaatcgcttcactcgaaactcactgatactctcgtcagcaagcagcaacttgagcagaggctgatgcaattaatggagagcgaacagaagcgagtcaacaaagaggagagcctgcagatgcaggttcaggatatcctcgaacagaacgaagcactgaaggcccagatccagcaattccacagccagattgcagcacagactagtgcatccgtcctcgcagaagagctgcataaggtgattgctgagaaggataaacagatcaaacagacagaggactccctggcttccgagagagatagattaacttcaaaggaagaggagctgaaggacatccagaacatgaacttcctcctaaaggcagaggtgcagaagctgcaggctctcgctaacgaacaggcagccgcagcccacgagttggaaaagatgcagcagtccgtgtatgtcaaggatgacaagattcgacttttggaggagcagctacagcacgaaatttccaataagatggaggaattcaaaattctcaatgaccagaataaggctctcaaatcggaggtccagaagctgcagactctcgtttccgaacagccgaataaagacgtggttgagcagatggagaagtgtatccaagaaaaagatgaaaaattgaaaactgtggaggaattgctggaaaccggcctgatccaggtcgccactaaggaggaggagctcaacgctattcgcaccgagaattcaagcctcacaaaggaagtacaggatctgaaagctaaacagaacgaccaggtttcgtttgcctcactggttgaagaactcaaaaaggtgatacatgagaaggacggcaagatcaaaagcgttgaggagctgttagaagccgagctgctgaaagtggccaataaagagaaaacagtgcaggatctaaaacaagagattaaagccctgaaagaagaaattgggaacgtgcagcttgagaaggcacagcagctgagcatcaccagcaaggtgcaggaactgcagaacctcctgaagggtaaggaagagcagatgaacacaatgaaggcagtccttgaagagaaggagaaggacctggcgaacacggggaagtggctacaagacctgcaggaagagaatgagtccctgaaagcccacgttcaggaagtggcccaacacaacttgaaggaggctagttctgcatcacagtttgaggaattagaaatcgttctgaaagagaaggaaaacgagttgaagaggctcgaagcaatgctcaaagaacgggagtcagacctgagctccaaaacccaacttctgcaggatgtgcaagacgaaaataaattgtttaaatctcagatcgagcaactcaagcaacagaattatcagcaggcctcatcctttccccctcacgaggaactcctgaaagtcatatctgaaagggagaaagagatctccggtctctggaatgagctcgatagcctgaaagatgcagtggagcaccagcgcaaaaaaaacaatgacctgcgggagaagaactgggaggccatggaggccctcgctagtaccgagaagatgctgcaagataaagtgaacaaaacatccaaggagaggcagcagcaggtggaggccgtggagcttgaggccaaggaggtcttaaagaaactgtttcctaaggtgtccgtgccctctaatctatcctacggagagtggctccacggctttgagaagaaggcaaaggaatgcatggccggtacgagtgggagcgaagaagtcaaggtcctggaacataagctgaaggaggcagatgaaatgcataccctcctccagcttgagtgtgaaaaatataaatctgtcctggcagaaacagaaggtattctacaaaaactccagcgtagcgttgagcaagaagagaataaatggaaggtcaaggtcgacgaatcccataaaactatcaaacagatgcagagcagctttacttcctcagagcaagagttggagcggctgcggtcggagaacaaggacatcgagaacctgcggcgagaaagggagcacctcgagatggaacttgaaaaagccgagatggaacgttccacctacgtcactgaggttcgcgagttgaaagacctcctcaccgagctccaaaagaagttggacgattcttattccgaagccgtgagacagaatgaggaacttaacctactcaaggcccagctgaacgaaacactcactaagctcagaaccgaacaaaatgaacggcagaaagttgctggagatctgcacaaggctcagcagagtctcgagttgatacagtcgaagattgtgaaagccgctggggatactacggtgattgagaactccgacgtgtcacctgagaccgaatcctcggaaaaggagacaatgtcggtgagcctgaatcagacagtcacccagctgcagcagttgctccaggcagttaaccagcagctgacaaaagaaaaggaacattaccaggttctggagtag

SEQ ID NO: 227801 - DNA, 3903 bp, synthetic construct
  misc_feature 1..3903: note = Description of Artificial Sequence: Synthetic coding sequence
  source 1..3903: mol_type = other DNA
atggagttctatgagtcagcttacttcatcgtgttaatcccctctatcgtaattactgttattttcctttttttctggctgtttatgaaggaaaccctgtacgacgaggttttagccaaacagaagcgagagcagaagctgatcccaacgaagacagataagaaaaaagccgagaaaaaaaaaaataaaaaaaaagagattcaaaacgggaacttgcatgaatccgattccgaatccgtgccaagagattttaagctctcagatgcactggccgtcgaagatgatcaggtggcacctgtgcccctgaatgtcgtagagacttcatcaagcgtacgggaacgcaagaagaaggagaagaaacagaagcccgttttggaggagcaggtgattaaagaaagcgacgcatctaagatccccggaaaaaaagttgagcccgtaccagtgacgaaacagcccaccccaccatctgaggctgccgctagcaagaagaaaccaggacagaaaaagtcgaaaaatggcagcgatgatcaggacaaaaaggtggagactctgatggttccatctaaacggcaggaagccttgccactgcaccaggaaaccaagcaggagtctggaagcggaaaaaaaaaagcatcctctaagaagcagaaaactgaaaacgttttcgttgatgaacctctgatccatgccacaacctacattcccctcatggacaacgcagattcctctcccgttgtcgataagcgagaggttatagatctgcttaagccagaccaggtcgagggaatccaaaaaagcggtaccaagaagctcaagacggaaaccgataaagaaaacgctgaggttaaatttaaggatttcctcctctccctgaaaacgatgatgttcagcgaggacgaggccctgtgtgttgtcgacctgctgaaagagaagtcaggcgtgattcaagatgcgctcaagaaatcctcaaagggggagctgaccacgcttatccaccagttacaggagaaagacaagctgctcgccgctgtgaaggaggacgcagccgctactaaggaccggtgcaaacagctgacccaggaaatgatgaccgagaaggagcgaagtaacgttgtgattacgcggatgaaggatcgaattggaaccttggagaaggaacacaatgtgtttcaaaacaaaattcatgtgtcctatcaggagacgcaacagatgcagatgaagtttcagcaagttcgcgagcaaatggaggcagagatcgcacaccttaaacaggagaacggcatcctgcgggacgccgttagtaatactactaaccagctggagtctaaacagtccgctgaactgaacaagctgcgtcaagactacgcgaggttagttaatgaactcactgaaaaaaccggtaaacttcagcaggaggaagtacaaaaaaaaaatgccgaacaagccgcaacgcagctgaaggtgcaattgcaggaagcagagaggcgatgggaggaagtgcagtcttacataagaaagaggactgcggaacatgaggccgctcagcaagatctgcagtccaagtttgtggccaaggaaaacgaggtgcagtctttgcattccaagcttacggacactctggtgagtaaacagcagttggagcagaggctgatgcaactgatggaatccgaacaaaagcgtgtcaataaggaggagtccctacagatgcaggtgcaggacattctggaacaaaatgaggctctcaaagcccagatccagcagttccacagtcagatcgcagctcagactagtgcaagtgttctagcagaggaactccacaaggtgatagccgagaaagataaacagattaagcagacagaggattcgctggcgtctgagcgggatcgattaacctctaaggaggaagagctcaaggacatacagaacatgaattttttgctgaaagccgaagtgcaaaaattgcaggccctagccaatgagcaggctgccgcagcccatgagttggagaaaatgcaacagagcgtgtacgttaaggatgacaaaattcggctgcttgaggagcagcttcagcatgagattagtaataagatggaagagtttaagattctgaacgatcagaataaagccctcaagagtgaagttcaaaagctccagactctggtcagtgaacagccgaataaggacgttgtcgagcagatggagaagtgcattcaggagaaggacgaaaaactcaagactgtggaagaactcctggaaacagggctcatccaggtggccacgaaagaagaagaattaaatgcaattcggacagagaactcgtccctcaccaaggaggtgcaagatctgaaagccaaacagaacgaccaagtctctttcgccagccttgttgaggaattgaagaaggtgattcacgagaaagacggtaagattaaaagcgtcgaagaactactggaggcagaacttctgaaagtggccaataaagagaaaaccgtgcaggacctgaaacaggagataaaggcgcttaaggaggagatcgggaacgtgcagttggagaaggcacagcagctttccatcacctctaaagtgcaagagctgcagaatctcctgaagggaaaagaggaacagatgaacacaatgaaggccgtccttgaggaaaaggaaaaagatctggccaataccgggaaatggctgcaggatctgcaagaagaaaatgaatcactcaaggcacatgtccaggaagtggctcaacataatctgaaagaggcatcatctgcatcacagtttgaagaacttgaaatagtgcttaaagagaaagagaacgagctgaagaggctcgaggccatgcttaaagaacgcgagtctgatttgtcttcaaaaacacagctgctacaggacgtgcaggatgaaaacaagctcttcaagagccaaatcgaacaactcaagcagcaaaattaccagcaagccagctcctttccacctcacgaagaactcctgaaagtgatatctgagagagaaaaggagatcagtgggctctggaacgagctggactccctgaaggacgccgtggagcaccagagaaaaaagaacaacgaacgtcagcagcaggtcgaggcagtcgaactggaagccaaggaagttttgaagaaactattcccaaaagtttctgttccaagcaatctgtcatacggtgagtggctccacgggttcgaaaagaaggccaaggagtgcatggctggtacatcgggatcagaagaagtgaaggtgctagagcataagcttaaagaagctgacgaaatgcacactctgttgcagctggaatgcgaaaagtacaaaagcgttctggcggagactgaggggatcttacagaagttgcaacggtcagttgagcaggaggagaataaatggaaggtgaaagtggatgaatcccataagacgatcaaacagatgcaatcaagctttacctctagcgagcaggaactcgagaggctgcgcagcgaaaacaaagacattgagaatctgcgcagagaaagagagcatctggaaatggaattagagaaggctgagatggagcggtctacttacgtgacagaagtcagggaactcaaggctcaactcaacgaaaccttaacaaaactgcggactgagcagaacgagcgccagaaggtggcgggagacctgcacaaggcacagcaatccttagaactgattcaaagtaaaattgtaaaggctgcaggcgatacaactgttatcgagaactctgatgtgtctccagagaccgaatcgtctgagaaggagaccatgtctgtttccctgaatcaaacggtgacccagctccagcagctactgcaggctgtgaatcagcagcttaccaaagagaaggaacactatcaagtgctggaatag

SEQ ID NO: 227802 - DNA, 4074 bp, synthetic construct
  misc_feature 1..4074: note = Description of Artificial Sequence: Synthetic coding sequence
  source 1..4074: mol_type = other DNA
atggagttctacgagtcagcatattttatcgtgctgattccttcgatagttataaccgtaatattccttttcttctggctgttcatgaaggaaacactgtacgacgaagtcctggccaaacagaagcgggaacagaagctaatcccaacaaagacagataagaaaaaggctgaaaaaaagaagaataaaaagaaggaaatccagaacggaaatctgcatgagagcgattccgaatccgtgccccgtgacttcaagctgagtgacgcattggctgtggaggatgaccaggtggctccggtcccactgaatgtcgtagaaaccagtagctcagtgagggaacgcaagaagaaggaaaagaagcagaaacctgtccttgaggagcaggtcataaaggaatctgatgcctccaagatccccggaaaaaaggtagaacctgtgccagtgacaaaacagcccacccctcctagcgaggccgctgctagcaaaaagaaacccggtcaaaagaaaagcaaaaacggatccgacgatcaggacaaaaaggtggaaactctgatggtcccgtcaaaacgccaggaggcactccccctccatcaggaaacaaagcaagagagcgggtctggcaagaagaaagctagcagcaagaagcaaaagacagagaacgtttttgtggatgaacccctgattcacgccacaacttacatacctctgatggataacgccgactcctctcctgtagttgacaagcgcgaagtgattgatctgcttaaaccagatcaggttgaaggaatccagaagtccggtaccaaaaaactcaaaaccgaaacagacaaggagaacgccgaggttaaattcaaggattttcttctgtcgctaaaaacaatgatgttcagcgaggacgaagccctgtgcgtcgtcgacttgctgaaggaaaaatccggggtaattcaagatgccctgaaaaaatccagtaagggagagctcacaacattgatccaccagctccaggaaaaagataagctgctggccgctgttaaggaagatgctgcagcaaccaaagatagatgcaagcagttaacacaggaaatgatgacagagaaggaacggtctaacgtggttattaccagaatgaaagataggatcggcacgctagagaaagagcacaacgtctttcagaataagatccacgtatcgtaccaggagacgcaacaaatgcaaatgaaattccagcaggttagggagcaaatggaagccgagatcgcccatctcaaacaggaaaacgggatcctgagagatgcagtctctaacaccacaaatcagctcgaaagcaagcaatccgctgagctcaacaaactccggcaggattatgctcggttagtcaacgagctcacagagaaaacaggcaaactgcagcaggaggaagttcagaagaagaacgccgaacaggcggctacccagctcaaggttcaacttcaggaagcagagcggcgttgggaggaggtccagtcttacatcagaaagcgaaccgcagaacacgaggccgctcagcaggacttgcaatcaaagttcgtggctaaagaaaatgaggttcagtcactacattccaagctaaccgataccttggtctcaaaacagcagctcgagcagaggctaatgcaactgatggaaagcgaacagaagcgggttaataaggaagagagtctacagatgcaagtgcaggacatcctggagcagaatgaggctctcaaagcacagatccaacaattccatagtcagatcgcagctcaaactagcgccagtgtcttggccgaagagctccacaaggtgattgccgaaaaggacaagcagataaagcagactgaggacagtctggccagtgagcgagatagattgacctccaaggaagaagaactgaaggatatccagaatatgaattttttgcttaaagctgaggtgcagaagttacaggcactggcaaatgaacaagccgcagccgctcatgagctagagaagatgcagcagagcgtatacgttaaggacgataaaatccgcctcctggaggagcaactgcagcatgagattagcaacaaaatggaggagtttaagatccttaatgaccagaacaaggcactgaaaagtgaggtccaaaagcttcagactctcgtgagcgagcaacctaacaaggacgttgttgaacaaatggagaagtgcattcaggagaaagatgaaaagttgaagaccgtcgaagagctgctggagaccggcctgattcaagtcgccaccaaggaggaggaattaaacgcaatcaggaccgagaacagcagccttaccaaagaagtccaggacctgaaggccaaacagaatgaccaggtgtccttcgctagtttagtagaggaactgaaaaaggtgattcatgagaaagacggcaagattaagtctgttgaggaactcctggaagccgagttgctgaaggtggcaaacaaggaaaaaacagtccaggatctgaagcaagagatcaaggcccttaaagaagaaatcggcaacgttcagcttgagaaggcacagcagctgtccatcacctccaaggtgcaggagctgcagaatttgttaaaggggaaagaagaacagatgaatactatgaaagctgtgctggaagagaaagaaaaagacctggccaacaccggcaaatggctacaagacctgcaggaggagaatgaatcacttaaagcccacgtgcaagaagtcgctcaacacaatctcaaggaggcatccagtgccagccagtttgaggaacttgagatcgtactgaaggaaaaagaaaacgagctcaagcgcctcgaagctatgctaaaagaacgcgagagtgacctcagctccaaaacccagctattgcaggacgtgcaagacgagaacaagctgtttaaaagccagattgagcaactcaagcagcagaactatcagcaggcctcatcatttccccctcacgaggagctgctgaaggtcatttcggagagggagaaggagatcagcggcctttggaacgaactcgatagcctgaaggatgccgtcgagcatcagcggaagaagaacaacgacctgagggagaaaaattgggaggcgatggaagccctggctagcaccgagaagatgctacaggacaaggtcaataagacttccaaagagaggcagcagcaggtggaggctgtcgagctcgaagccaaggaagtactgaagaaactctttccgaaggtcagcgtcccaagtaacctgagttatggggagtggctacatggctttgagaaaaaagccaaggagtgcatggctggtacctcaggtagtgaggaagtgaaggtgttagaacataaactgaaggaggccgatgaaatgcacaccctgctgcagctagaatgtgagaaatataaatccgttctagcggaaacagagggcatactgcagaaactacagcggtctgttgagcaagaagagaacaagtggaaggtgaaggtggatgagtcgcacaagaccatcaaacagatgcagtccagcttcacctctagtgagcaagagctggaacgtcttcgttccgagaataaagacatagaaaatcttcgtcgcgagcgagaacatttagagatggaactggaaaaggctgagatggagagaagtacttatgttacggaagtgcgggaactcaaggacctgctgactgagcttcaaaaaaagctagatgattcctattctgaggctgtccgtcaaaacgaagaactgaatttgctgaaagcacagttaaacgagactctgaccaaactgcgcacagagcagaatgagcgccagaaagtggcaggagatttgcacaaagcacagcagagcctcgaattgattcaatccaaaatcgtaaaggctgctggtgatacaaccgttattgaaaattccgatgtgagccccgagactgaatcatctgagaaggaaaccatgagtgtgtcattaaatcagactgtcacgcagctgcagcagctcttgcaagccgtgaatcagcagttgaccaaagagaaggaacactaccaggttctagagtag

SEQ ID NO: 227803 - DNA, 228 bp, synthetic construct
  misc_feature 1..228: note = Description of Artificial Sequence: Synthetic coding sequence
  source 1..228: mol_type = other DNA
atggaattttacgagtctgcttactttattgtgctgattccatcaatcgtgatcacagttatctttctgtttttttggttgttcatgaaagagaccctgtacgacgaggttctggccaagcagaaacgagagcagaaactaattcccacaaaaaccgacaagaaaaaggccgagaagaagaagaataaaaagaaagagatccagaacgggaacctgcacgagtcctag

SEQ ID NO: 227804 - DNA, 183 bp, synthetic construct
  misc_feature 1..183: note = Description of Artificial Sequence: Synthetic coding sequence
  source 1..183: mol_type = other DNA
atggagttctacgaaagcgcctactttatcgtcctgattccatcaattgtgatcaccgtgatatttcttttcttctggttgtttatgaaggagaccctgtatgatgaggtgcttgccaaacaaaaacgagaacagaagcttatcccaaccaagacagataaaaaaaaggcagagaagaagtag

SEQ ID NO: 227805 - DNA, 3171 bp, synthetic construct
  misc_feature 1..3171: note = Description of Artificial Sequence: Synthetic coding sequence
  source 1..3171: mol_type = other DNA
atggctagccagccaaactcttctgcaaagaagaaagaggagaagggaaaaaacatccaggtggtggtcaggtgtcggccatttaacctggcagaacgtaaagcaagcgcacacagcattgtggaatgtgacccggtgaggaaggaggtgtccgtgagaaccgggggtttagcggataagtcgtccagaaaaacttacacatttgatatggtgttcggggctagtactaaacagatagacgtgtataggtcagtcgtgtgtcccattttggacgaagtcattatgggatataattgcaccatatttgcctatggccagaccggcaccggcaaaactttcactatggagggagagagatctcctaatgaagaatatacctgggaggaggatccgctcgctggcataattccaagaacccttcaccaaatttttgagaaactgaccgacaatggtaccgaatttagtgtgaaggttagtctgctcgagatctacaatgaggaactctttgatctcctgaatccaagttccgacgtgtctgaacggcttcagatgttcgatgatccacgcaataagaggggagtcattattaagggtttggaggagattaccgttcacaacaaggatgaggtatatcagatactggagaaaggtgctgccaaaaggacaaccgcagccacactgatgaatgcctatagctcccgtagccatagtgtgttcagtgttacaattcacatgaaagagactacgatcgacggggaggagctcgtaaaaattggcaaattgaatctggtcgacctggccggaagtgaaaacatcggacggagtggagccgtagacaagcgagcgagagaggccggaaacataaaccagtccctgctgaccctcggcagagtcattactgcacttgtggaacgtacacctcacgttccatatagagagagcaagcttactcgcatactgcaagattccctgggtggtcggacaaggaccagcattatcgcaaccattagtccagcttcactgaatctagaggaaactctgtccactctcgaatatgcccaccgggctaaaaacatactgaacaagccggaagtcaatcagaaactgactaagaaggccctgatcaaagaatatacagaagagatcgaacggttaaagagggatctggcagccgcacgcgaaaaaaacggcgtatatattagcgaggaaaacttcagagtgatgagtggcaagctgacagtccaggaagagcagatcgtggagttgatcgaaaaaattggcgcagttgaagaggaactgaaccgagtgactgaattgttcatggacaacaagaatgaactcgatcagtgcaagtctgacctgcagaataaaacccaggagctcgagaccacacagaaacatttgcaggaaactaaactgcagcttgtgaaggaggaatatatcacatccgctttagagagcactgaggagaagctacacgacgccgctagcaaactgttaaatacggttgaggaaacaacgaaggatgtgtccggcctgcactctaagctggatagaaagaaggccgtggaccaacataacgctgaagctcaggatatattcggaaagaaccttaacagcctgtttaataacatggaagagcttatcaaggatggtagctccaagcagaaggccatgcttgaggtccataagacactctttggcaatttgctctcgtcgtccgtgtcggcattggacaccatcacaacggtggcactgggctcccttactagcattcctgaaaatgtgtctactcatgtttctcagatattcaacatgatcctaaaagagcaatcacttgccgcagagagcaaaaccgtcttacaggagctgattaacgtcctgaaaaccgacctgctttcgtccctagagatgatactctcacctaccgtggtcagtatcttgaaaatcaactctcagctaaagcatatcttcaaaacctcgctgaccgtggccgacaagattgaggaccagaaaaaagagttggacgggtttctgtctattttgtgtaacaacctgcatgagctgcaggagaacaccatttgttctcttgtggaaagtcagaagcagtgcgggaatctgaccgaagacctgaagacgataaagcaaacacatagtcaggaactctgcaagcttatgaacctgtggacagagcgcttttgcgctttagaagagaagtgtgagaacatccagaagcccctgtcatccgtgcaggagaatattcagcaaaagtccaaagatatagtaaacaagatgactttccatagccagaaattctgcgcagattccgatgggttctcccaggaattgcgaaatttcaatcaggaagggacaaaactggtagaagaatctgtgaagcacagcgataaacttaacggcaaccttgaaaagataagccaagaaacagagcagaggtgcgaaagcctgaatacgagaacggtgtacttcagcgaacagtgggtgagttcactcaatgagcgcgaacaggagctacataatttgctggaggtggttagtcaatgctgtgaggcctcctccagtgacattaccgaaaagtctgatgggcgaaaggccgcacatgagaagcagcataacattttcctggaccaaatgacaatcgacgaagacaagctgatagcccaaaatctggagctcaacgagactatcaagattggtctcacaaagctgaattgcttcctggaacaagacctgaagctggacatcccgaccggtaccacacctcagagaaaatcatacttgtatcccagcaccctggtccgaaccgaacctcgggagcatctcctggaccagcttaagagaaaacagcccgaattgctgatgatgctcaactgcagtgaaaacaataaggaagagaccattcctgacgttgacgtcgaggaagcagtcttggggcagtacaccgaggaaccactgtcccaggagccgtcggtcgacgccggagtggactgctctagcattgggggtgtaccattctttcagcacaagaagtcacatgggaaagacaaagagaatagaggtataaataccctcgagcgaagcaaagtggaggagacgacagaacatctcgtgaccaagtcccgactgccactgcgtgcccagattaacctttag

SEQ ID NO: 227806 - DNA, 5418 bp, synthetic construct
  misc_feature 1..5418: note = Description of Artificial Sequence: Synthetic coding sequence
  source 1..5418: mol_type = other DNA
atgtctgatactaaagttaaggttgcagttagagtgaggccaatgaatcgccgagagttggagctgaacaccaagtgcgttgttgaaatggagggcaatcagacagtgctccatccacctccaagtaatactaagcagggcgagcgcaagcctccaaaagtttttgcattcgattactgcttctggtctatggacgagtccaacactaccaagtacgccggtcaggaggtcgttttcaagtgcttaggggaaggcatactggagaaggccttccagggctacaatgcctgtatttttgcctacggacagaccgggagcgggaagtcatttagtatgatgggccatgctgaacagctggggcttataccacgtctatgctgtgccttgttcaagagaatcagtctcgaacagaatgagtcccagacatttaaagttgaagtgtcttacatggaaatttataatgaaaaagtgcgggacttgctagacccaaaaggaagccgccaatctctgaaagtgagagaacataaagtgctaggcccatacgttgacggactgtcgcagctcgctgtgacttcgttcgaagatatcgaaagtctgatgtcagagggaaacaagtccagaacagtggccgcaaccaatatgaatgaggagtctagccggagccatgccgtttttaacatcattatcacgcagaccttatacgatctccagtccggcaatagcggggaaaaagtgtcaaaagtcagtttagtggatctggctgggagcgagcgggtgtccaaaacaggagccgcaggtgaacggctgaaggaaggttctaatatcaataagtccctcaccaccttaggacttgttatcagcagcctggccgaccaggccgctggtaaaggaaagtcaaagttcgtcccgtaccgggacagcgtacttacatggttactgaaagacaacttaggtggtaattcccagacgtccatgatagcaacaatctcaccagcagccgacaattacgaggagaccttatctacactgagatacgctgaccgcgcaaagcggatcgtaaaccatgccgtggtgaatgaagaccccaacgcaaaagtaattcgtgaactgcgagaggaggtcgaaaaactgcgcgaacaactgtcccaagccgaagccatgaaggctccggaactgaaggaaaagctggaggagtccgagaaactcattaaggagctgacagtgacgtgggaagagaagttgaggaaaacagaggaaatagctcaggaacgacaacggcaactggaaagcatgggcattagcttagagatgtcagggattaaggtgggagacgacaaatgttacctggtgaacctgaacgcagatcctgcactgaatgagcttctcgtttactacctcaaagatcatacccgggtgggagccgacacaagccaggatatacagctcttcggcattgggattcaacctcaacactgcgaaatcgacatcgcttctgacggagacgtgacactcactccaaaagagaacgctcggtcttgcgtaaacggcacattggtgtgttcaacaacacaactgtggcacggagaccgcattctgtggggcaacaaccatttttttcgtatcaacctgcccaaacggaaacggagggattggctgaaagattttgaaaaagagaccggcccacccgagcacgatcttgacgctgcctccgaagcttctagcgaacctgactataactacgagtttgctcagatggaggtcatcatgaaaaccctaaacagcaacgacccagttcagaacgtggtgcaagtattggagaagcagtatctagaagagaagagatcagcacttgaggaacaacgccttatgtacgagcgcgagctggagcagctgagacagcaactgtctccagaccgtcagccccagagtagcggacctgatcggctagcttacagttcccagaccgcccagcaaaaggtcacccaatgggccgaggaacgagatgagctgtttcgtcagagtctggctaaactccgggagcagctggtcaaagcaaataccttggttagagaggctaatttcctcgcagaggaaatgtctaagctgacagattaccaggtgactcttcaaatccccgctgctaatctgagcgcaaacagaaagagaggggcaatcgtttctgagccagccattcaggtaaggagaaagggcaagtctacgcaggtatggacaatcgagaaacttgagaacaaactcattgatatgcgtgatctatatcaggaatggaaggagaaggtgcctgaggctaaacgtttgtacggaaaacgcggagacccattctatgaggctcaggagaatcataacctcatcggcgtagccaatgtttttcttgagtgtctgttctgtgacgtcaagctgcagtacgctgtaccaattatctctcagcagggtgaggtcgcaggtaggctgcatgttgaagtcatgcgggtcacgggggcagtgcccgagcgggtagttgaggatgactccagcgaaaactcttctgagagcgggtccttggaagtcgtggacagttccggggaaatcattcatagggtgaagaagctcacatgcagagtgaagataaaagaggcaactgggttacccctgaacctgtccaacttcgtgttttgccagtacactttctgggaccaatgcgagtctaccgttgccgctccagtggtcgatccagaggtcccgtcaccacagagcaaagatgcccagtacaccgtgactttcagccattgtaaagattatgtcgtgaacgtcaccgaagagttcttggagttcatctctgatggggctttggccatcgaggtgtggggtcacagatgtgccggaaacggcagtagcatctgggaggtggacagtctccacgccaagactagaactctgcatgacagatggaacgaagtgacccggcgaattgagatgtggatcagcattcttgaattaaacgagcttggcgagtatgcagctgtagagctgcatcaggcaaaagacgtcaacaccggcggtatcttccaattgcgccagggccattctcgtagagtacaggtcaccgtgaagcctgtgcagcactcaggtacactcccattgatggtagaggcaatcctgagcgtctccataggatgcgttaccgcccgatccaccaaactccagagaggactggactcataccagcgagacgacgaggatggcgatgacatggatagttaccaggaagaagatctgaactgcgtgcgtgagcggtggtctgatgcacttatcaaacgacgggaatacctggatgagcaaattaagaaggtgtccaataagaccgaaaagaccgaagacgatgttgagagagaagctcagttggtggaacagtgggtggggctgactgaagagagaaacgccgtcttagtgcccgctcccggaagtggaatcccaggagcccctgccgattggatccccccacctggcatggaaacccacatccctgtcctgtttctggatctgaacgccgacgacctgtccgccaacgagcaactcgtgggccctcatgcctcaggggttaactccatcctcccgaaagagcacggatctcagtttttctatctccccataattaaacactcagacgatgaggtttcggccaccgccagttgggatagctccgtgcatgactcggtacatttgaatagggtcacacctcagaacgagaggatttatctcattgtcaagacgaccgttcagctcagccatcccgcagccatggaattggtattgcgcaaaagaattgccgcaaatatttataataagcagtcattcacacaatccctgaagaggcggattagcctgaagaatattttctatagttgtggggtgacctatgagatcgtttccaacatcccaaaggccactgaggagatagaagacagggaaaccctcgctctattggcagctagatcggagaacgaaggtaccagcgacggagagacttacatagagaaatacacaagaggcgtcctgcaggtggagaatattctgagcttagaaaggttacggcaggctgtcaccgtgaaagaggccctcagcaccaaggcaaggcacataagacgttctctgagcactcctaacgtccacaacgtatcaagtagtagacctgacttgagcgggtttgatgaggacgacaaaggatggccggaaaaccagctagacatgagcgactattcatcatcgtatcaggacgtcgcttgctacggtactctgcctagagattcgcccagaagaaacaaggaaggttgcactagcgagacaccacacgcattaaccgtgtcccccttcaaggcattcagcccccagccgcctaagttcttcaaacctctgatgccagtgaaggaagagcataaaaagaggatagcactagaagcccgaccactcctttcccaggagagcatgccaccacctcaagcccacaatcccggatgcatagtgcctagcggcagcaacgggagtagtatgccagtcgaacacaacagtaaaagggaaaagaagatcgactctgaggaagaggaaaacgaactagaggccataaatcggaaactcatttcttctcagccctacgtgccagtggaattcgcagactttagcgtatacaatgcctcactggaaaaccgggagtggttcagcagcaaagtcgacctgtctaattctcgtgtcctggagaaggaagtgtccaggagccctactactagttctatcaccagcggatatttctcacactcagcatctaatgcaacacttagcgatatggtcgtcccaagtagcgactcctccgaccagctggctatccagacgaaggatgccgattccaccgagcattcaactcctagcttggtccatgactttcggccttcctctaacaaggagttgaccgaagtggagaaaggtcttgtaaaggacaaaattattgtggtgcctctaaaagagaatagtgcccttgctaagggcagcccatcctctcagtcaattcccgagaaaaattccaagtctctgtgccggaccggttcctgctctgagctggatgcctgcccaagcaagatttctcagccggcaagggggttttgccctcgtgaggtgacggtggaacatacaaccaacatcctcgaggaccacagctttaccgaatttatgggggtcagtgagggcaaggacttcgacggtctgacggactccagcgctggcgagctgtcttcccgcaggagtctccccaacaaaactggcggaaagacagtgtctgatggcttgcaccatccatcccagctgcactccaagctagagaatgatcaggtaatcatcccagaggcagcattttgggtgctgtgctgtcagtaa

SEQ ID NO: 227807 - DNA, 5249 bp, synthetic construct
  misc_feature 1..5249: note = Description of Artificial Sequence: Synthetic coding sequence
  source 1..5249: mol_type = other DNA
atgtctgataccaaagttaaggtagcagtgcgcgtgcgacctatgaacagaagggagctggagctgaacaccaaatgtgtagtcgaaatggagggcaatcagaccgtcctacacccacctccctctaacacgaagcaaggagaaagaaagcctcctaaggtgttcgcattcgactattgtttttggtccatggacgagtcgaatacaaccaagtacgccggacaggaggtagttttcaagtgtctgggagagggcattctggaaaaagctttccagggatacaacgcgtgcattttcgcttatggccagacaggctctggcaaatccttctctatgatgggacacgcagagcaactgggactaataccgcgattgtgctgcgcactgttcaagcgcattagcctcgagcagaacgagtcccagaccttcaaggtggaggtttcttatatggagatctataacgagaaagtccgtgaccttctcgacccaaagggcagcagacagtcactaaaagtgcgggagcataaggttctgggtccgtacgttgacggactgtcccaactggctgttaccagcttcgaagatatcgagtcactaatgtctgaagggaataaaagtagaacggtagccgcaactaatatgaatgaggagtcctcaagatctcatgcagtgttcaatatcatcattactcagacactgtacgatcttcagtccgggaacagtggggagaaagtgtccaaggtgtctctggtcgatttggccggatctgagagagtttccaagaccggcgcagcaggagaaaggttgaaggaggggagcaacatcaataaatccttgaccactcttggtcttgtaatctcgagtcttgcggaccaggctgctggcaaggggaagagtaaattcgtgccctatcgcgacagtgtcctgacctggctgctgaaagataatcttgggggtaatagccagacttctatgatcgcaaccatctcgcccgcagccgacaattacgaggagacgctgtccacactccggtatgcggaccgcgcaaagcggattgtcaaccatgctgtggtgaacgaggaccccaacgctaaagttattcgggaactgcgtgaggaggtcgagaaactcagggaacaattatctcaggccgaagctatgaaggcgccagagctgaaggaaaaacttgaggagtccgaaaaactgattaaggagttgactgtgacctgggaggaaaaacttaggaagactgaggagatcgcacaggagcgacagcggcaattggagtctatgggcatctcactggagatgtcaggtataaaggtaggcgatgacaagtgctatctggtgaatttgaacgctgacccagccctcaacgagctattggtgtattatctgaaggaccacaccagggtgggtgcagatacgtctcaagacatccagctgttcggcattggaatacagccccagcactgtgagatcgacatcgctagtgatggagacgttacacttactccgaaggagaatgctcgctcttgcgttaacggtactctggtgtgctctaccacacagctatggcacggcgataggatactgtggggaaataaccacttctttaggattaacctacccaagcgtaagcgcagggactggctcaaggattttgaaaaggagacaggcccaccagagcatgatctggatgcagcctcagaagcctcttccgaacctgactacaattatgaattcgcccagatggaagtgatcatgaaaacactgaacagcaacgaccccgtgcagaacgtcgtccaggtccttgaaaaacagtacttagaggagaagcgtagtgcgctggaagaacagagactgatgtacgagagggaacttgagcagctccggcagcagctgagcccagatcggcaaccccagagtagcggcccagatcgactggcttacagttcccagactgctcagcaaaaggtcacccagtgggcggaagagcgggacgaactgtttaggcaatcgctggcaaagcttcgtgaacaacttgtgaaagctaataccctggtgagagaggctaattttcttgccgaggagatgtccaaactgacagattatcaagtgaccctccaaatccctgccgctaatctgtctgctaaccggaagaggggggcaattgtgagcgaacccgctattcaggtgcggcgaaagggaaaatctactcaagtgtggacgatcgaaaaactggaaaataaattaatcgatatgcgtgatttgtaccaggaatggaaggaaaaggttcctgaagctaaacgtctgtacgggaaaaggggcgaccctttttatgaagcccaggaaaatcataatcttatcggggtcgcaaatgtgttcttagaatgcctattttgcgacgtgaagcttcaatacgcagtgcccattatctcccagcaaggggaagtggccggtcgtctgcatgtcgaagttatgagagtgacaggagccgtgcccgaacgggtggtggaagacgacagtagtgagaactcctctgagagcgggtccctagaggtagtggactcaagtggcgagatcatccaccgcgttaaaaaactgacgtgtcgggtgaagattaaggaggcaacaggcctgccgcttaacttatccaactttgttttctgccagtacaccttctgggatcagtgtgaatccacggttgcagctcccgttgtggacccagaggtgccctccccgcagtccaaagacgctcagtatactgtgacatttagccactgcaaagattatgtcgtgaatgttacagaagagttcctagaattcatcagcgacggtgccctggcaattgaggtctggggccaccggtgtgctggcaacggctccagtatctgggaggtggactccctacacgcaaaaacgaggacactgcacgaccggtggaatgaggtgacgcgccgaattgaaatgtggattagcattctcgagctcaatgaactgggcgagtatgccgcagtggaattgcatcaggccaaagacgtcaacaccggcggaatcttccagcttaggcagggccacagcagacgtgtgcaagtaaccgtgaaacccgtgcagcattccgggacactgccgcttatggttgaggccattctgagtgtctctattgggtgtgtcactgccagaagcactaaactgcaacgcggacttgattcttaccaggaggaagatttgaattgtgtccgagaacgatggtcagatgcacttattaagagacgggagtacctcgacgaacagatcaaaaaagtgtctaataagaccgaaaaaacagaagacgatgttgagagagaagctcaacttgtcgaacagtgggtgggtctcacggaggaacgcaatgccgttctcgttcctgccccaggcagtgggatccccggtgcaccagctgactggattcccccaccagggatggagacgcatatcccagtccttttcttggatctgaacgctgacgacctgtctgcgaatgagcagctggtgggacctcacgcaagtggtgtcaacagcatcctacctaaagaacacggatcacaattcttttacctcccaatcattaaacacagtgatgacgaggtgtctgctactgcaagctgggattccagtgtccacgacagtgttcatctcaacagagtaactccccaaaacgaaaggatttatctgatcgtaaagacaaccgttcagctttcccatcccgcagccatggaattggtgctccgcaagcggatcgccgctaacatttataataagcagtctttcacacagagtttgaagcgcaggatcagcctgaagaacatcttttatagttgcggtgtcacctacgagattgtgagtaacattcctaaagctaccgaagaaatcgaggacagagagactcttgccttgctggctgccaggtccgagaacgaagggacaagtgatggggagacgtacatagaaaaatataccagaggagtcctacaggtggaaaacatcctttctctggagcgccttcgccaggcagttactgtgaaagaggccctgtccactaaggcgagacacattcggagatctctgtccacgcccaacgtgcacaacgtgagttctagtaggcctgatctttccggtttcgatgaagacgacaaggggtggcctgaaaaccaacttgacatgtccgattactcttcatcatatcaagacgtggcctgctatgggacgctcccgagggattcaccgaggagaaataaggaaggctgcacttccgaaacaccccacgccctcaccgtaagcccttttaaggctttttctcctcagccacccaagttttttaagccactgatgccagtcaaggaggagcacaagaagcgcattgctctggaagctagacctctcctttctcaggaagacagcgaagaggaggagaacgagctggaagctataaacaggaagctgatctcctcgcagccctacgtgcctgtggagtttgctgatttctcagtctataatgcctccttggaaaaccgagagtggttttctagcaaggtggacctgtccaatagccgcgtcctggagaaggaagtaagtaggtcgccaactacctcttccataacgagtggatatttctctcacagtgcctccaatgctaccctctccgacatggtggtgccgtcaagcgattccagtgaccaactggcgattcagactaaggatgccgactccacggaacattcaacgcctagcctagtgcatgatttccgcccttcttctaataaagagctcaccgaggtggaaaaaggccttgttaaggataagattatagtcgtgcctttaaaggagaactccgctctggccaaaggaagcccctcaagccagtccatccccgaaaaaaacagtaagagtttgtgtaggacaggatcgtgctcagagttggatgcctgcccctctaagatcagtcagcccgcaaggggcttttgccctagagaggtaaccgtggagcacaccaccaacattctggaagatcatagcttcaccgagttcatgggtgtgtcagaaggaaaagattttgatgggttgaccgattccagtgccggagagttgagctctcgcaggagtctgcctaacaaaactggcggtaagaccgttagtgatggactgcatcatccctctcagcttcactcgaagttagagaacgaccagggagggaccacaagtcgata

SEQ ID NO: 227808 - DNA, 5312 bp, synthetic construct
  misc_feature 1..5312: note = Description of Artificial Sequence: Synthetic coding sequence
  source 1..5312: mol_type = other DNA
atgtccgatacaaaagtgaaggttgcggtccgcgtgcgtcccatgaatcggagagagctggaactcaatacaaagtgtgtcgtggagatggaagggaaccagacagtacttcatccacccccaagtaacacgaaacaaggtgaacgcaggccaagtcaggtcttcgcctttgactactgcttttggagtatggacgagtcaaataccacaaagtacgccggacaggaagtggtttttaaatgcctaggcgaggggatcctcgagaaggcgttccaaggctacaacgcttgcattttcgcgtacggacagacaggaagcgggaagtccttttcgatgatgggtcatgctgagcaattagggttaatcccacggctctgctgtgctctgttcaagcgcatctccctagagcagaatgagtcacagacatttaaggtggaagtgtcatatatggagatctacaacgaaaaggtacgcgacctgctggatcccaaggggtccagacagagcctcaaggtgagggagcataaggtgttaggaccatatgtggacggactcagtcagctggcagtgacaagtttcgaagacattgagtcacttatgtctgaaggaaacaaaagccgcacagttgctgccacgaacatgaacgaagaatcctctcggagtcatgctgtattcaatattataattactcagaccctttatgacctccagtccggcaacagtggggaaaaggtctctaaagtcagtctggtggatcttgcgggatcagaacgagtcagtaagactggggctgcaggcgaaagactgaaagaaggttccaatatcaacaagtcactcacaactctgggtctggtcatctctagtcttgctgaccaggctgctggaaagggaaagtcaaagttcgtcccctacagggacagcgttctgacgtggctgcttaaagataatctgggcggaaatagccagactagtatgattgctaccatatctcccgcagctgataattatgaggagaccctttcgaccttacgttatgcagatcgcgcaaagcgtatagtgaatcacgccgttgtgaatgaggatcccaacgcaaaagttattcgcgagctccgcgaggaagtggagaagttacgggagcaactttcacaggcagaagctatgaaggccccagagctgaaggaaaaactagaggagtccgagaagctcataaaggaattaaccgtcacatgggaggaaaaattaagaaagacagaggagatcgcccaagagagacaaaggcagcttgagtccatgggcatctccctcgagatgagcggcattaaggtgggagacgacaagtgctatctggtcaaccttaacgccgaccccgctctgaacgaattgctcgtgtattacctgaaggaccatactcgtgtgggggcagacacaagtcaggatatccagctctttggaattggcatccaaccccagcactgcgagatcgatatcgcaagcgatggtgatgtaacgttgactccaaaagagaacgcacgctcttgtgtgaatggaactctggtctgcagtacaacccagctgtggcatggcgacaggattttgtggggaaacaaccacttcttcagaatcaatctacccaaacgtaagagaagggactggctgaaagatttcgaaaaggagacagggcctcccgagcatgatctggacgctgcttccgaggcatctagcgaaccggattataattatgaatttgctcagatggaagtgatcatgaagaccctgaatagtaacgacccagttcagaatgttgtgcaagtcttggagaaacagtatctagaggaaaaacggagtgcactagaggagcagaggcttatgtacgagcgggagcttgagcaattgcggcagcagctgagtcctgaccgacagccccagtccagcgggccagacagactggcttactccagccagactgctcagcagaaggtaactcagtgggctgaagagagagacgaattgtttcggcagtcactcgctaagctccgcgagcagttggtgaaggcgaacacactggttcgagaagctaacttcctggctgaagaaatgagtaagctcaccgattatcaggttacactgcagataccggcagctaacttgagcgccaaccgaaagcggggagctatagtgtccgagcccgctatccaggtgcgacgtaagggcaagtccacccaggtgtggacaatcgagaagttggaaaacaagcttatcgatatgagggatctttatcaggaatggaaagaaaaggttccagaggctaagcgcctttacggaaagagaggggaccctttttatgaggctcaagagaaccacaacttgatcggagtggccaacgttttcctcgagtgcctcttctgcgatgttaagcttcagtatgccgtccccatcatctcgcagcaaggggaggtggcgggtagactgcacgttgaagtcatgagggtgacaggtgccgttcctgaacgggtggtggaggacgactcctctgagaacagttcagagtccgggtcattggaggtggtggactcatctggtgaaataatccaccgggtgaaaaagctgacatgccgggtcaagatcaaggaagcaactggtctgccgctgaacttgtccaacttcgtcttttgtcagtacacgttttgggatcagtgtgaatcaaccgtggccgcacctgtcgtggaccctgaggtgcctagtcctcagtcgaaggatgcccaatacacagtgactttttcgcattgtaaggactatgttgtgaatgtcaccgaagagttccttgagttcatttccgacggcgcattggccatcgaggtatggggacatcgctgcgctggcaacgggtcctctatctgggaggtcgatagcctgcatgctaagactaggactctgcatgaccgctggaatgaggttactaggcggatcgagatgtggatttccatccttgagctgaacgaactgggagaatatgccgctgtggagctccaccaggccaaggacgttaacacaggcggtatcttccaacttcggcagggccattcaagacgagtgcaagtcaccgtaaaacccgtgcagcattcggggactctcccgcttatggtggaagctatcctgtctgtgtctatcggctgcgtgacagcacgtagcactaagctgcagaggggtctggactcttatcaaagggatgacgaagacggcgatgacatggactcttaccaagaggaggacctgaattgtgttagagaaagatggagtgacgctctgatcaaaaggcgcgaatatctggatgagcagattaagaaggtgagcaacaagaccgagaagaccgaggatgacgtcgagagagaggcccagctagttgagcagtgggttggactgacagaggaacggaatgctgtacttgtgcctgcaccaggaagcggcattccaggggctcccgcagattggatcccgcctcccggtatggagacccacatacccgtcctgttcctggatcttaacgccgacgacctgtccgccaatgagcagctggtcggcccacacgcatctggggtgaattctattctacccaaagagcacgggagtcagttcttttatctgcccattattaagcattccgatgatgaggtatccgcaacagcaagctgggactcgtctgtccacgattccgtacatctgaaccgcgtcacaccccagaatgagcggatttatctgattgtgaaaacaactgtccagctttcacacccagcggcaatggaattggtcctccgcaaacgcatcgcagccaacatatacaacaagcaatcctttacccaatcccttaaaagaaggatcagcctcaagaacattttctattcatgtggagtgacctacgaaatcgtttcaaacatccctaaggcgactgaggaaattgaggacagagagaccctcgcccttctcgctgcaaggtccgaaaatgagggaacgagcgatggggaaacttatatcgaaaagtacacccgaggcgtgctgcaggtggagaacatcttgtcactggagaggttgcgccaggctgtcaccgtaaaagaggccctgtcgacgaaggccagacacatccgcagatctctgagcaccccgaatgtgcacaacgtgagcagcagcagacctgacttgtctgggttcgatgaggatgacaaggggtggccggaaaaccaactagatatgagcgactatagcagttcataccaggatgtagcctgttacggaaccctaccgagggatagcccacgcaggaataaagagggctgcacaagcgaaacaccccatgcactgacagtcagcccttttaaagccttttccccccagccccctaaattctttaagcccctaatgccagtcaaagaggaacacaagaaacgtattgccctcgaggcacggccattactcagccaggaggattccgaagaggaggagaatgaactcgaagctatcaatcgcaagcttatctcttctcagccgtatgtgcctgtggagtttgccgatttctcagtgtacaacgcttccctggaaaatagagaatggtttagcagtaaggtggacctgagcaatagcagggtgctggagaaggaggtgagccgatctccaacgacaagcagtattacgtcaggctacttctcccacagcgcgtctaacgctacactgtcagacatggtagtgccttcctctgacagctccgatcagctcgcaattcagacgaaggatgcagactctacagagcactctacaccatcactggtccacgactttcgaccaagctcaaataaagaactaaccgaggtcgaaaaagggctcgtgaaagacaaaataatagtcgttccactgaaagagaactccgctttagctaaaggctcaccaagtagtcaatcaatacctgagaaaaactccaaaagcctgtgccgtacaggatcatgcagtgaactcgacgcgtgtccatcaaagatctcccagcccgcacggggattctgcccgcgtgaggtcaccgttgagcacacaacaaacatactggaggaccatagctttaccgagttcatgggggttagtgaggggaaggactttgacggcctaacggattcttcagcaggcgagctgtcttcacgaaggtctctcccgaacaaaaccgggggaaaaacggttagtgatgggctgcaccacccatcccagctgcactctaaactggagaatgatcaggtgattatccccgaagctgcattctgggtactgtgttgtcagta

SEQ ID NO: 227809 - DNA, 5312 bp, synthetic construct
  misc_feature 1..5312: note = Description of Artificial Sequence: Synthetic coding sequence
  source 1..5312: mol_type = other DNA
atgagcgataccaaagtcaaagtagcagttcgggtaaggccgatgaaccgcagagagctggaactcaatacaaagtgcgtcgttgagatggaaggaaaccaaactgtcctgcatcccccaccctccaatactaaacagggggagcgaaagccccctaaagtgttcgcctttgactactgcttctggtccatggacgagtcaaacacaacaaaatacgcaggacaggaggtggtattcaagtgcctcggggagggcatcctggaaaaagccttccaaggctacaatgcatgcatctttgcttatgggcagactggatctgggaagtcattctccatgatgggccatgctgaacagctcggtttgattcctcgtctgtgttgcgcactgttcaaacgcatttcgctggagcagaacgagtctcagacattcaaggtggaagtgtcctacatggagatttacaatgagaaggtgcgagacctgctggatccaaaaggctcacgccagagcctgaaagtgagagagcacaaagttctgggtccatatgtagatggactctcacagctggccgtgaccagcttcgaagacatcgagagcttgatgtccgaagggaataaatctagaacagttgctgcaacaaacatgaatgaagagtcctcaagatctcacgcagtgtttaatatcatcatcacacagaccctctatgacctgcagtcgggcaattccggcgagaaagtctccaaggtatccctggttgacctcgcagggtctgagagggtttcaaaaaccggcgcagccggagagagactcaaagaggggtctaacataaataaaagtcttaccactcttggactggttatctccagcctagccgatcaagcagccggaaaggggaagtctaagtttgtcccttaccgggattccgttttaacatggcttctgaaggataatctcggaggcaattcccagacatcaatgattgcaacaattagtcctgcagctgacaattatgaggaaacattatcgaccctgcgttatgctgaccgcgcaaagaggatcgtaaaccatgcagtggttaacgaggatccgaacgccaaggtaatccgcgagctccgggaagaggtagagaaactgagagaacagctctcgcaggcagaggcaatgaaagcccctgagctgaaagaaaaattagaggagagcgagaagctcatcaaggaactcacagttacatgggaggagaagctccgtaaaaccgaggaaatcgcgcaggagcgtcagcggcaattggaaagcatggggatttctcttgagatgagtggcattaaggtcggagacgataagtgctatcttgtgaatcttaatgcagatccagccctgaacgagttgttggtgtactaccttaaggatcacacgagagttggggctgacaccagccaggatatccagctgtttggcattggcattcagccccaacactgcgaaatagatattgcttctgacggagacgtaaccctgacacccaaagagaatgccagatcgtgtgtcaatggcacactggtttgcagcactacacagttgtggcatggcgacaggattctgtggggcaataaccactttttccggatcaatctgccaaaaagaaaacgcagggactggctaaaggacttcgaaaaagagaccggaccgcctgaacatgaccttgatgccgctagcgaagcgagttccgagcccgactacaattatgagtttgcgcaaatggaagtgatcatgaagacactgaatagtaacgatcccgtacagaacgttgtacaggtcttggaaaagcaataccttgaggaaaagcgctctgcactggaggagcagcggcttatgtacgaacgcgaattagaacagttacgtcagcagctgtctcctgaccgccagcctcagtcatccgggcctgatcggctggcttacagcagccagactgcccagcagaaagtcactcagtgggctgaagagcgggacgaactgttcaggcaatccctcgcaaagctgagagagcagctggtgaaagccaacacccttgtgcgcgaggccaattttttggccgaggagatgtcgaagctgacggattatcaagtgacactccagatacctgccgctaatctgtcagccaatagaaagagaggcgcaattgtgagtgaacccgctatccaggtgcgcagaaagggcaaaagcacccaagtttggacaattgaaaaattagaaaacaaacttatagacatgcgcgatttatatcaggagtggaaggagaaggttcccgaggccaaaaggctctatgggaaacgaggcgatcctttttacgaggcccaggaaaaccacaatctgatcggcgtagcaaatgtcttcctggagtgtctcttttgtgacgtgaagctgcaatacgcagtaccgattatctcccagcagggagaggtggccggacggctgcacgtggaggtgatgcgggtcacaggggcagtgcccgagcgggtggtagaagacgactcttctgaaaactcgagcgagagtgggtctttagaggtcgtggacagctcaggtgagattatccatagggttaagaaattgacgtgccgtgttaaaataaaggaggccaccggactgcccctgaacctgagcaacttcgtgttttgtcagtacacattttgggaccaatgtgagtcgaccgtggccgctcccgtcgtggaccctgaggtccctagtcctcagagcaaggatgctcagtacactgtgacattttcccactgcaaagattacgtagtgaacgttacggaggaatttctggaatttatttctgatggggctcttgcgattgaggtttggggtcatcgatgtgctgggaacgggtcatctatatgggaggttgatagcttacatgctaagacaaggacactccatgatagatggaacgaagtgacgcggcgtatagaaatgtggatctccatccttgagctcaacgagctcggcgagtatgctgcagtggagctgcaccaagctaaggatgtcaatacgggcggaatcttccaactcaggcagggacattcccgccgagtgcaagtgaccgtaaaaccagtccagcacagtggcaccctgcccctgatggtagaagccatcctctcagtatctatcggatgtgtcacagcgagatcaaccaaacttcagagaggcctagactcataccaaagagatgatgaggatggtgacgacatggatagctatcaggaggaggatcttaactgcgtgcgcgagagatggtccgacgctctgataaagcgcagagagtatctggatgagcaaatcaagaaggtctcaaataaaaccgaaaagacagaagacgacgtggaaagagaggcccagctggtcgaacagtgggttgggctcaccgaggagcgtaacgctgtcttggtgcccgcacctggcagtggaataccaggggcaccagccgactggattccacctccaggcatggagacccacatccctgtgctttttctggatttaaatgctgacgatctgtccgctaatgaacagttggtggggccacacgccagcggcgtcaactccattctgccaaaagaacacgggtctcagttcttttacctgccaatcatcaagcactcagacgatgaggtatctgccaccgcatcctgggactcttctgtccatgattcagtgcaccttaaccgagtgactcctcaaaacgaaaggatctaccttatagttaaaacgaccgtgcagctctctcaccccgcagcgatggagctggtgctccggaagaggattgccgcaaatatttataataaacaaagctttacccagtctcttaaaagacgcatctctctgaaaaatatcttttacagctgcggagtcacttatgagatagtttcaaatataccaaaggcgacagaagagatagaagatagggaaacccttgcactcttggctgctcgctctgagaatgaaggtaccagcgacggcgaaacttatatcgagaagtacactaggggggtgctgcaggtcgagaatatcctttctcttgagaggctgcgccaggccgtgaccgtcaaggaagcgctgagcactaaggcgaggcatattcgacgatctctgtctacccctaacgttcacaatgtttcttcctcacgtccggacctcagtggattcgacgaggatgacaaaggctggcccgagaatcagttagatatgtcagattattccagctcctaccaagacgttgcttgttacggcaccctgccaagggactcaccaaggcgaaacaaagaggggtgtacaagcgaaactcctcacgctctgacggtctcccccttcaaggctttctctccccagccccctaaattctttaaacccctgatgcccgtgaaggaagaacataaaaagagaattgccctggaggccaggcccctgctttctcaagaagactctgaagaagaagagaatgaattggaggctatcaatagaaaactaatcagctctcagccttatgttccggtggaattcgccgacttttccgtttacaatgcttctctggagaacagggaatggttctcctctaaggttgatctctctaacagcagggttcttgaaaaagaggtgagcaggtcacctaccacatcttcaattacttccggttacttctcacacagcgcctccaacgccaccttgtctgatatggtggtcccatccagtgattccagcgaccagcttgccatacagaccaaagacgcagatagcactgagcatagtacaccttcactggtgcacgatttcagacccagcagcaacaaggagctgacagaggtagagaaggggctcgtcaaagacaagattattgtggtgcctctgaaagagaattccgctctggccaaagggagtccctcttcacagagcatccccgagaaaaatagcaaatctttatgccgaacggggtcctgtagtgaactggacgcatgccctagtaagataagccagccagccaggggcttttgcccaagagaggtaacagtagagcacaccacaaatatcctagaagatcacagcttcactgagttcatgggcgtgtctgaaggtaaggatttcgacgggctcactgactcctcagctggggagctctccagccggcgttcccttcccaataagacgggtggcaagaccgtctcagatggccttcatcacccatctcagctgcacagcaaattagaaaatgatcaggtgatcatccctgaggctgctttctgggtgttgtgttgccagta

SEQ ID NO: 227810 - DNA, 5273 bp, synthetic construct
  misc_feature 1..5273: note = Description of Artificial Sequence: Synthetic coding sequence
  source 1..5273: mol_type = other DNA
atgagcgacaccaaggtgaaggtcgcggttagagtcaggccaatgaatcgcagggagctagaactgaataccaagtgcgtcgtcgagatggaaggcaatcagacagtcctgcatccacctccctcgaatacaaaacagggggaacgcaaaccgcctaaggtgtttgcctttgactactgtttctggtctatggacgaatctaatacaacgaaatacgccggacaggaagtcgtatttaagtgcctcggagagggcatcctggagaaagcctttcagggctacaatgcatgtatcttcgcctatggccagacgggctcggggaagtcgttttcaatgatgggccacgctgaacagctcgggctgattccgcgtctgtgttgtgccctgttcaagcgcatttctttggaacagaacgagtcccaaacattcaaggtcgaagtaagttacatggaaatctacaacgagaaagtgcgggacctgctggacccaaaggggtctaggcaatcattaaaggtaagggagcacaaagtcctcggaccttacgtagatgggctgtcccaattggccgtgacctccttcgaggacatcgagagcctgatgtcagaaggtaataagtcccggactgtcgccgcaacgaatatgaacgaggagtcttcccgttcacatgcggtgttcaacattatcatcacacagactctgtatgatctgcagtccgggaactcaggtgagaaggtaagtaaggtttccctggtcgatctggccggaagcgagcgcgttagcaaaaccggcgcagccggtgagcggctcaaggagggatctaatatcaacaaatcgctgaccacactcggtctcgttatctcctctctggcagaccaggccgctggtaaaggaaagagtaagttcgtgccctaccgcgacagtgttctaacctggctgctcaaggacaacctcggagggaacagccagacatcgatgatagccactatcagtcccgcagcagataactatgaagagactctgagtactctccggtatgcagatagagctaagaggatcgtcaaccacgcagtggtgaatgaagacccaaacgccaaagtgatcagggagctgagggaggaggtggagaagctgcgggagcagctgtcccaggccgaagcaatgaaagctcccgaacttaaagagaagctggaagagtctgaaaagcttatcaaggagctaaccgtgacctgggaagagaagctgaggaagaccgaggaaatcgctcaggaacgccaaagacaactagagagcatgggcatcagtctagaaatgagcggcatcaaggtgggggatgacaagtgttatctagttaatctaaacgccgacccggctctgaacgaactgttagtatattacctcaaggatcacaccagggtcggcgcagatacatcccaggatatccagctttttggtatcggtatacagcctcagcactgtgaaatcgacatcgcttctgacggtgatgtgaccttgacccctaaagagaatgcgaggagctgcgttaacggtactctggtctgctccacaactcaactctggcatggtgaccgaatcctatggggcaacaatcacttcttccgaatcaacctgcctaaaaggaagcgtcgcgactggttaaaagactttgagaaggaaaccggacctccggagcacgatctcgatgcagcaagcgaggcctcaagtgaacccgactacaattacgaatttgcccagatggaggtaatcatgaagacactaaactctaacgatcctgtccaaaatgtagttcaggtactcgagaagcagtacctcgaggagaaaagaagcgccctagaagaacagagactgatgtacgagcgagaattagagcagttgagacagcagttaagccctgatagacagccacagagttcaggaccagatagactggcctatagcagccaaacggctcagcagaaagtgactcagtgggcagaagagagggatgagctattccgccagagcctcgctaaattgcgggaacagctggtcaaggccaataccctcgtcagagaggccaatttcctggcagaagagatgtcaaagttaacagattatcaagtgacactccaaatccccgcagccaacctctcagccaacaggaagagaggtgcgattgtgagtgagccagcaatccaggtccgcaggaagggcaagtcaacacaggtctggaccatcgagaagctggagaacaagttgatcgatatgcgagacctgtaccaggagtggaaagagaaagtgcccgaggctaagagactctacggaaaacggggagaccctttttatgaggcccaggaaaatcacaacctgattggagtagccaacgtatttctggagtgcctcttctgcgatgtcaagcttcaatatgcagtccccatcatctcccaacagggcgaggtagccggaaggctgcacgtggaagtgatgcgggtcacgggtgccgtgccagaacgggtggtagaggacgatagttcagagaatagctctgagtcgggctccttggaggtcgtcgatagttccggagaaatcatccatcgcgtaaaaaagcttacatgtcgggtcaagatcaaagaagcaaccgggctgcccctgaatttatcaaactttgttttttgccagtatactttttgggaccagtgcgaatccaccgtagccgctccagtggtggatccggaagtaccgagcccacagtcgaaggatgcccagtatacggtcaccttttctcactgtaaggactatgtagtgaacgtgacagaagagtttctggagtttataagcgacggagcactcgccattgaggtgtggggccatcggtgtgccggaaacgggagctccatatgggaggtcgactccttgcatgctaagacaaggaccttgcatgatagatggaacgaagtaacacggaggatcgagatgtggatatctatcctggagctcaacgaactgggcgagtacgctgccgtggagctgcaccaggctaaagacgttaataccggtggaatttttcagctccgacagggacatagtcgaagggtacaggttaccgtaaagcctgttcagcacagtggcactcttcctcttatggtggaagccatcctctccgtctcaattgggtgtgtcacagccaggtcaactaagctacagcgtgggctggactcttatcaagaggaagacctgaactgtgtgcgggagaggtggtcagatgctctgattaagcgaagggaatacctggatgaacaaatcaagaaagtgtcgaataagaccgaaaagactgaggacgacgtggaacgcgaggcacagctggtggagcagtgggtgggtttgacggaagaacgcaacgctgtactagttcccgcaccaggttccgggatcccgggagccccagcagactggatacctccacctggcatggaaactcacatccccgtgctattcttggacctgaacgcagatgaccttagtgctaacgagcagctggtcggcccacatgcgtctggcgtaaattctattctccccaaagagcacggttcgcagttcttctaccttcccattatcaaacactccgatgatgaggtgtctgccactgcctcgtgggattcatccgtgcacgattcggtccacctaaaccgagtaacaccccagaatgagaggatctacttgatcgtaaaaacaactgtgcagttaagtcacccagctgccatggaactggtgctaagaaaacgtatcgctgccaatatctataacaaacagtcgttcacccaatctcttaagcgacggatctctctcaagaatattttttactcgtgtggggtgacctatgagatagtgtcaaacattccaaaagcaacagaggagatagaagaccgggaaacactagcactgcttgccgctaggagcgaaaacgaaggaacatcagacggcgaaacatacatagaaaaatatacaaggggggtcttacaggtagagaacattttgtccctggaaaggcttcgccaagccgtcaccgttaaggaggctttgagtaccaaggccaggcatatcagaagatcactgtccacgcctaatgttcacaatgtgtcttcatcacggcctgatctgagcggcttcgatgaagacgacaagggttggcctgagaaccagttggatatgagcgattatagctctagttaccaggacgtggcctgctacggtacactgccaagggacagcccccgaagaaacaaagagggctgcacttccgaaactccccacgccctgacggtgagcccattcaaggccttttcaccccagcctcctaagttctttaaacccttgatgcctgtgaaggaagagcataagaagcgcattgctctggaggctagacccctgttaagtcaagaggattccgaagaggaggagaacgagttagaggcaataaataggaaactcatctcttcccagccatacgtcccggtggaatttgcagattttagtgtgtataacgcatcgctcgagaaccgtgaatggtttagctctaaggttgacttgtctaattctcgcgtcctcgagaaggaggtctcaaggagtccaaccacttcctccattacctccggatatttctcacactctgcctctaacgctaccctgtctgacatggttgtcccatctagcgatagcagtgaccaactggctatccagactaaagatgccgactcaacagagcacagtacaccaagtctggtgcatgatttccggccaagctcaaacaaggagctgaccgaggtggaaaaaggccttgtgaaggacaagattatcgtggtccccctaaaggaaaacagcgcattagcaaaaggaagcccctctagtcagagcatccccgagaagaattccaaatcgttatgtcggaccggctcatgcagcgagctggacgcgtgtccatccaaaatcagccagcccgctaggggtttctgccctcgcgaggtgacagtagagcataccaccaatattctggaggaccacagtttcactgagtttatgggtgtctctgaaggaaaggactttgacggcctcaccgactcctccgccggtgagctgtcatcaaggcgttctctacccaacaaaacggggggtaagaccgtgagtgatggcctgcaccatccgtctcagctacacagtaagctcgagaacgatcaggttattattccagaagcagccttctgggtcctctgttgccagta

SEQ ID NO: 227811 - DNA, 213 bp, synthetic construct
  misc_feature 1..213: note = Description of Artificial Sequence: Synthetic coding sequence
  source 1..213: mol_type = other DNA
atgtccgatacaaaggtaaaggtagctgttagagtgagacctatgaacagaagggagcttgagctgaatacgaagtgcgtggtggagatggaaggcaaccaaaccgtgctccaccctccacccagtaacaccaagcagggggagagacttgtcaccgtcgcccatatatctaattcaagcaccctcggcggtcagggcaaacggatcacctag

SEQ ID NO: 227812 - DNA, 1038 bp, synthetic construct
  misc_feature 1..1038: note = Description of Artificial Sequence: Synthetic coding sequence
  source 1..1038: mol_type = other DNA
atgccaaaactcctgaagtcactgttcccagtaagggatgagaaacgcggaaaaagaccgtcaccactggctcaccaggcacagccggaaatgggcccagacgtgctcgtgcagactatgggcgctcccgcactcaagatttgtgataagccagcaaaggtgccatcccctcctcccgtcatcgccgtcacagctgtcacccccgctcctgaggcccaagacggccctccgagtccactgtcagaagcctcatctggatacttcagtcattctgtgtctacggcgaccctgtcggacgcactaggaccaggactggatgccgcagccccacccggtagcatgcccaccgctcctgaagccgagcctgaggcaccgatcagtcatccccctcctcctactgctgtgcccgctgaggaaccacccggaccacagcagctcgtgtcgcccggaagggaaagacctgatctagaggcaccagcacccggttctcccttcagagttaggagggtccgcgcaagcgaactaaggagcttctcccggatgctcgcaggggatccaggctgttcaccaggagcggaggggaacgccccagcccctggagcgggtggacaagccttggcgtcagacagtgaggaagctgacgaggtgccagaatggctccgcgaaggagaatttgtgacagttggcgctcacaagacgggcgtggtccggtatgttggccctgccgatttccaagaggggacctgggtcggcgtcgagctggacctgccctctggcaaaaacgacgggtccattggaggcaagcagtacttccgttgtaaccccggttacggattactggtccggccatccagagtccgccgagccacagggccagtgcgcaggagatctaccgggctcaggcttggggctcctgaggccaggcgctcagcaacattgtccggatctgccaccaacttggcctcactaaccgctgcgttggccaaagccgataggtcacacaagaacccagaaaacaggaagagctgggcgtcatag

SEQ ID NO: 227813 - DNA, 5480 bp, synthetic construct
  misc_feature 1..5480: note = Description of Artificial Sequence: Synthetic coding sequence
  source 1..5480: mol_type = other DNA
atgggtgacagtaaagtgaaggttgcggtgcggatcagaccaatgaatcgaagggaaactgatcttcatacaaagtgtgtcgttgacgtcgacgctaacaaagtgattttgaatcccgtcaatacaaatttgtccaaaggagacgcccgtgggcagcccaaagtgttcgcctacgatcattgtttttggtcaatggatgagagtgtgaaggaaaaatatgcaggacaggacattgtgtttaagtgtctcggtgagaatatcctgcagaatgcgttcgacggttacaacgcttgtatatttgcgtatggccagaccgggagcgggaaaagctacaccatgatggggaccgccgaccagcctgggttaatcccacgcctatgttctggactgtttgaacggacacagaaggaggagaacgaggagcaatcattcaaggtggaggtgagttacatggagatatacaacgagaaagtgagggatctgttggacccgaaagggagtaggcagactctcaaggtacgcgagcactcagtgctgggaccctatgtggatggcctgtcgaaactggctgtcacgagctataaggatattgagtctctgatgtccgaaggtaataagtccaggactgtggccgcaacgaatatgaatgaagagtcctccagaagtcatgccgtgttcaaaattacccttacacatactctgtatgacgttaaaagtggcacctccggcgagaaagtgggtaagttatcactagttgatctggctggtagtgaacgcgctaccaaaacaggagccgcaggcgaccgcctgaaggagggttcaaacattaacaaatctctgacaactctagggcttgtcattagtgcactcgcagaccagtctgctgggaaaaacaaaaataaattcgttccttacagagatagtgtgcttacatggctgctgaaggactctctcggaggcaatagcaaaaccgcgatggttgctactgtgagtccagctgctgataactatgatgagaccttgtccactctgcgttatgccgatcgcgctaaacatattgtgaaccacgccgtggttaacgaagatccaaatgcaagaattattagggacttgagggaggaagttgagaaattacgcgaacaacttactaaagcggaggccatgaagagcccagagttgaaggatcgcctggaggaaagcgagaagctaatacaggaaatgaccgtcacttgggaagagaaactgcgtaagaccgaggagattgctcaggagagacagaagcagctggagtcactaggaattagtctccaatcatctgggatcaaggtcggggatgacaaatgcttcctcgtgaacctcaatgccgatccagcactcaacgagctcctcgtgtattatctcaaagaacacacgctcataggtagcgcgaactctcaagatattcagttatgtgggatggggattctaccagagcattgtattatcgatatcacctctgagggtcaggtgatgctcaccccccagaaaaatacgaggacctttgtcaacgggtctagcgtgtcctccccgatccagttgcatcacggtgatcgcatcctctggggcaataatcatttttttcgactgaacctcccgaagaaaaaaaagaaagcggaaagagaagatgaagaccaggacccctctatgaagaatgaaaacagcagtgagcagctcgatgtggatggagactcgagctcagaagttagcagcgaagtgaattttaactatgaatatgcccagatggaggttacaatgaaggccctggggtctaatgaccccatgcagtctatactgaatagcctagagcagcagcacgaagaggagaaacgctcagccttggagcgccaaagattgatgtatgaacacgagctcgagcagctgcggagaaggctaagtcctgagaagcaaaactgccggtcaatggatcgcttctcattccacagtccttccgctcagcaacgtctgcgccagtgggctgaggagcgcgaggccacattaaacaattccctcatgagattgcgagagcaaatcgtgaaggctaatctgctagttagagaggccaactacattgctgaagagctcgacaaaagaaccgaatataaggtcactttgcagatacccgcaagcagcttagatgcgaaccggaagcgaggcagcttgctgtcagagcctgctatacaggtgcgtaggaagggcaagggtaagcagatatggtcactggagaaacttgacaacaggctcctggatatgcgggacttataccaggagtggaaggaatgcgaagaagacaatcctgtgatccgcagttactttaaacgtgccgaccccttctacgatgaacaggaaaaccacagtctgatcggagtcgccaacgtgtttctagagtctctcttctatgatgttaagttgcagtatgcagtgccaattatcaatcaaaaaggtgaggtcgcaggcaggttacatgtggaagttatgagactgagtggggacgtaggagagaggatcgcaggcggtgacgaagtcgcagaggtttccttcgagaaagaaacccaggaaaacaagctcgtgtgtatggttaaaatcctgcaagcaacgggcctgccccagcacctgagtcacttcgtgttctgtaaatatagcttttgggatcaacaggagcccgtcatcgtggctccagaagtggatacctcctctagttccgtttccaaggagcctcattgcatggtggtctttgatcactgcaatgagttcagtgtcaatattacagaggactttatcgagcacctgtctgaaggggctcttgcaatcgaggtgtacggtcacaagatcaatgaccctcggaaaaacccagccttgtgggacctaggtatcatacaagccaagacccgttctctcagggaccggtggtcggaggttacccggaagctggaattctgggtccagatactcgagcagaatgagaacggcgaatattgccctgtggaagtgattagcgcgaaagatgtcccgacagggggaatattccaactgagacagggccaaagcaggcgcgttcaagtcgaggtaaagtccgtgcaggagtctggaactttgcctctcatggaagaatgcatactctctgtgggcatcggctgcgtaaaggtgagaccgctacgggcacctcgcacacacgaaacatttcacgaagaagaggaggacatggatagttatcaggacagggatctggagagactgcgaaggaagtggctgaatgctctgaccaaacggcaggaatacctggaccagcaactgcaaaaactagtgtccaaaagggataaaactgaggatgacgcagacagagaggcgcagctgctggagatgcgtttgaccctgacagaggagaggaacgcggtgatggtgccttccgcgggatccggcatccccggagccccagctgagtggactcccgtgccaggcatggagactcacataccagttatctttctagaccttaatgccgatgactttagctcgcaggacaacttggatgaccccgaggcaggcggatgggacgctacactgaccggcgaagaggaggaggaattttttgagctccagatcgtgaaacagcatgacggcgaggtaaaagcggaagctagctgggattcggccgtacacggatgcccacagctgagcagaggcacacctgtggacgagcggctgttcttaattgtcagagtgactgtccagctgagtcacccagctgacatgcaactcgtcctcagaaagcggatttgtgtgaacgtacacggacggcagggattcgcgcagtcccttcttaagaagatgtcccatcggagctctattcccggatgcggggtgactttcgagatcgtctccaacatacctgaagatgcccagggcgtcgaggagcgggaagccctggccagaatggcggctaacgtagagaatcctgcttcagcggacagtgaagcttatattgaaaagtacctcaggagtgtcttggccgttgagaatttgctgacgctggaccggctccgtcaggaagtggccgtaaaggagcagctgacaggcaaaggaaagctcagtaggagaagcatttcatctcccaatgtgaacaggctctcagggagtcgacaggacttaataccatcatacagcttagggtccaataaaggacggtgggaaagccagcaggatgtgtcccaaactaccgtgagccggggaattgcaccagctcctgcactgtcagtcagccctcagaacaaccactctcccgatcctggtttatctaatctggccgcatcttacctcaacccagtgaaatcattcgtcccgcaaatgcctaagctgctgaagtccctcttcccagtgcgggacgaaaagaggggcaagcgacctagtccgctggctcatcagcctgtgcccagaatcatggtgcagtcagcatcgcccgatatcagagtcacacgaatggaggaagcccagcctgaaatgggcccagatgttcttgttcagaccatgggtgcgccagcactgaaaatctgcgacaaacccgcaaaggtgccaagtccaccacccgtaatcgcagttacagcagttaccccggctccagaggcccaggacggaccgccatcacccctctctgaagcttcctcggggtatttcagccattctgtgagcaccgcaaccctgagcgacgctttgggaccaggcttggacgctgcagctccacccggatccatgccgaccgcgcctgaggccgagcctgaagccccaatttcacacccaccccctcccacagccgtgcccgcagaggagcctcctgggcctcagcagctagtgtcccccggaagggagcggccagacctggaggcacctgccccagggtcacccttcagggtgcgacgggtccgggcaagtgaactgcgctcattcagccgaatgctggcaggtgaccccggttgctcgcctggcgctgaggggaacgcacccgcacccggtgcaggcggtcaggccctggctagtgactcagaggaggccgacgaagtgcccgagtggctgcgggagggcgagttcgtgaccgtcggtgctcacaaaacaggagtggtacgatacgtggggcctgcggattttcaggaaggtacatgggttggtgtggagctggatctgccaagcggcaaaaatgatggttcaatagggggtaagcaatactttcgctgtaaccctggctacggattgcttgttagaccatctcgtgtacggagagccaccggtcctgtaaggcgacggtccacaggcctcagactgggcgctcccgaggctcgcaggtctgccactctatctggttcagcaactaacttagcatctttgaccgccgctttggctaaggcggacaggtcgcacaaaaacccagaaaatcgcaagtcttgggctagcta

SEQ ID NO: 227814 - DNA, 4946 bp, synthetic construct
  misc_feature 1..4946: note = Description of Artificial Sequence: Synthetic coding sequence
  source 1..4946: mol_type = other DNA
atgagcttgcactctacgcacaataggaacaatagtggcgacatcctggacattccctcatctcagaacagctcatcgctaaacgcactcacacacagctcccgcctcaagttacatttaaaatccgacatgtctgagtgcgagaatgatgacccgctgttgcgctctgctgggaaggtgcgggacataaacagaacatatgtgatcagcgccagccggaagacggccgatatgccccttactccaaaccctgttggacgcttggccctgcagcgtcgaactacacggaataaggagtcatccctattagtatcagagttagaagacaccacagagaagaccgcggagacgcgacttacgctgcagaggcgagcgaaaaccgattccgctgagaaatggaaaacggccgagatcgatagtgttaaaatgactctgaatgtcgggggtgaaacggagaataacggagtgagtaaagagagtcggaccaacgtgaggattgtgaataatgccaagaattcgttcgtggcctcctcagttcccttagacgaggaccctcaagttatagaaatgatggcagataagaagtacaaagaaacattttctgccccaagtagagcgaatgagaatgtggctctcaagtatagcagtaataggccaccgattgcaagcttaagccagacagaagtagtgaggagtgggcacctgaccaccaaaccaacgcagagcaagcttgacattaaagttcttgggacaggtaatttgtaccaccggagcatagggaaggaaattgcaaagacctcaaacaaatttggtagtctcgaaaagaggaccccaaccaaatgcactacagagcacaaactgactaccaaatgcagcttgcctcagctcaagtctcctgccccttccattctgaagaacaggatgagcaatctgcaggtaaaacaaagacccaagagcagcttcctcgccaacaaacaggaacggtcagctgaaaacactattcttcccgaagaggaaactgtcgtgcaaaacacatctgccggaaaagatcccttgaaggtggaaaactcacaggttacagtggctgtacgcgtgcgtcccttcacaaaacgcgagaagattgaaaaagcttctcaggtagtgttcatgtctggcaaagagatcacagtggagcacccagacaccaagcaggtatacaactttatctacgacgtgtccttttggagcttcgatgagtgccatccccattatgcttctcaaacgactgtatacgaaaagttagctgcacctctcctggagagagctttcgagggctttaatacttgtctctttgcatatggacaaacagggagtggcaagtcgtatacaatgatgggatttagtgaggagcccggaataatccccaggttctgcgaagatctgttctctcaggtcgcccgtaagcaaacgcaagaagtctcataccacatcgaaatgagcttcttcgaagtctacaatgaaaagatccatgatctcctggtgtgcaaggatgaaaacggacagaggaaacaacctctcagagtgcgagaacatcccgtctatggcccttatgtagaagccctctccatgaacattgtgagctcttacgctgacatccagtcatggttggaacttggaaataagcaacgagccacggccgcaaccgggatgaacgacaagagctccagaagccactccgtcttcaccctggtcatgacacaaacaaagacagagtttgtggagggggaagagcatgaccatagaattactagccgaataaatcttatagacttagccggatccgagagatgctccaccgcacataccaatggtgaccgtctaaaggagggtgttagtattaataaatcattattgacactaggaaaagtaatctccgcactgtctgagcaggccaatcagcgcagcgtattcattccttaccgggagtcggtccttacgtggctgttgaaagagtctcttggaggtaactcaaaaaccgctatgatcgcaaccatttcccctgccgcatctaatattgaggaaacattgtctaccctccggtatgccaaccaggcccgactgatcgttaatattgcgaaggttaacgaggatatgaatgccaaactgattagggaactcaaagccgagattgcaaagctcaaagccgctcaaaggaactcacgaaatatcgatccagaacgctataggctatgtagacaggagattacgagtctccggatgaagctccatcagcaagagagagacatggctgaaatgcagagagtgtggaaggagaaatttgaacaagcagagaagaggaaattacaggagaccaaggagctgcaaaaagctgggatcatgttccaaatggacaatcacctgccgaatctcgtgaatctgaacgaggatccacagttgagtgagatgctgctgtacatgattaaggaggggaccacgactgtaggcaagtacaagcctaactcatcgcacgacatccaactgagcggcgtgctgattgcagacgaccattgcactatcaagaacttcgggggtaccgtgtccataatcccagtgggggaggctaaaacttatgtcaatggtaagcatatcctggaaatcactgtgctgaggcatggggacagggtgatcttgggtggtgatcactacttcaggtttaatcaccccgtggaggtacaaaagggaaaacgtccctcaggaagggacacaccaatcagtgagggaccaaaagatttcgaattcgcgaaaaacgagctcttgatggcccagcggtctcaacttgaagctgagatcaaggaggcccagctcaaagcgaaggaggagatgatgcaggggattcagatagctaaggaaatggcccagcaggaactgtcatcacagaaagccgcatacgagagcaaaatcaaagctctcgaggccgaactgagagaggaaagccagcgcaagaaaatgcaggagatcaacaatcagaaagcgaaccacaagatcgaggagttagagaaggctaaacaacatctggagcaggaaatctacgtaaataaaaagagactggagatggaaacactcgctactaagcaggccctggaggatcactcaatcaggcacgccaggatcctggaggcattagagacagagaagcagaagattgcaaaagaagtccagattttacagcagaaccgtaacaatagagacaagacatttactgtgcagaccacttggagctccatgaaactcagtatgatgattcaggaggcaaacgctatctctagtaagttaaagacatactacgtttttgggagacatgatatttccgacaagtcgagtagcgacacttccattcgagtccgcaacctgaagctgggcatttcaacattttggtctctggaaaagttcgaaagcaagctggcagccatgaaagagttgtacgaatctaatggaagcaaccggggagaggatgcattttgcgatcccgaggatgaatgggagcctgacattaccgatgcccctgtgagctcactttccagaaggcgatctcgatccctcatgaagaatagaaggataagcggttgcctgcatgacattcaggttcaccctatcaagaatttgcatagtagtcactcctccgggctgatggacaagagcagcaccatatatagcaatagcgctgaaagctttctgcccggtatttgcaaagagctcattggaagctcccttgatttttttggacagtcgtacgatgaggaacgaaccattgctgattcactcatcaattctttcctgaagatttataacggcctctttgcaataagtaaggcccatgaagagcaggatgaagagtcgcaggataacctgttttccagcgatcgggcaatccaatccctcaccatccagacggcctgcgctttcgaacagctggtcgtcctgatgaagcactggctgtctgatcttctgccatgtaccaacattgcccgacttgaggacgagctgaggcaggaagtcaaaaaactcgggggatatttgcaactattccttcagggatgctgtctcgatattagttctatgatcaaggaggcacaaaaaaatgcaattcagatagtgcagcaggcagtgaaatacgtgggccagctcgcagtcctgaaaggatccaagcttcacttcctggaaaacgggaataacaaggccgcttcagttcaagaggagttcatggatgcagtctgtgacggggtcggcctagggatgaagatcctattggattccgggttggaaaaggccaaagaacttcagcacgaacttttccggcagtgcaccaaaaatgaggttactaaggagatgaaaaccaacgccatggggctaatccgctctctggaaaacatcttcgccgagagtaaaattaagtcatttcggcgacaagtccaggaagaaaattttgagtaccaggatttcaagagaatggttaacagagcacctgagttcctgaagcttaagcactgcttggaaaaggccattgagataataatttcagcactcaaggggtgccactctgacattaacctgctgcaaacgtgcgtggagagcatacgcaatctggcgagcgacttctacagcgacttctccgtgccaagcacttccgtgggcagttatgaatctcgggtgactcacattgttcatcaagagctggagagcctggccaagagtctgcttttctgctttgaatcagaagaaagccctgacctgcttaagccgtgggagacttacaaccaaaatactaaggaggaacatcagcagtccaagtcaagcggaatcgatggctctaaaaataaaggcgtacctaagagagtctacgagctgcacggaagtagtcctgccgtatcatccgaggagtgtaccccatctcggattcaatgggttta

SEQ ID NO: 227815 - DNA, 5072 bp, synthetic construct
  misc_feature 1..5072: note = Description of Artificial Sequence: Synthetic coding sequence
  source 1..5072: mol_type = other DNA
atggctggagctagcgtgaaagttgccgtgagggtgcggccatttaatagtcgtgaaatgtcgagggactccaaatgtattattcagatgagtgggagcaccaccaccatcgtcaacccaaaacagcccaaagagactcccaaaagtttctcttttgactactcttactggtctcatacctcccccgaggatattaattacgctagccagaagcaggtttatagagatatcggcgaggagatgctccagcacgcctttgaaggatataatgtctgcatcttcgcgtacggccagaccggtgccggaaagtcatacacaatgatgggcaaacaggagaaggaccagcaggggatcataccccagttgtgtgaggacttgttctcaaggatcaatgacactacgaatgataatatgagctatagcgtagaagtgtcgtatatggagatatactgtgaaagagtccgagatctcctcaatcccaagaataagggaaaccttcgggtgcgagaacaccctttgctgggaccctacgtggaggatttgtccaaactggctgttaccagctataatgatatccaggatttgatggactccggtaacaaggccaggacagtggccgcaacaaatatgaatgagactagtagccgctctcacgcagtttttaacatcattttcacgcagaagagacacgatgccgaaactaacatcactaccgaaaaggtgtccaagatctcccttgtcgacctggctggaagcgagagggcagattcaacaggagccaaaggtacaaggctgaaggagggcgctaacattaacaagagcctgacaaccttggggaaagtcatctcggcattggctgagatggattccggccctaacaagaataaaaagaaaaagaaaactgatttcatcccttatagagattccgtcctcacatggctgcttagagagaatctggggggtaacagtaggaccgccatggtggcggctcttagcccagctgacatcaattacgacgaaaccttgtccactctgcgctatgcagacagggccaaacaaataagatgtaacgccgtaataaacgaggaccccaacaacaaattgattcgagagttgaaagatgaggtaaccagattacgcgaccttctttatgctcaggggctgggtgatatcacagacatgaccaatgctcttgtcggaatgagcccctcatcatccttgtctgctctgagctctcgcgctgcgagcgtctcttccctgcacgagagaatattatttgccccaggctctgaggaagccatcgaacggctgaaggagacagaaaagattatagcagagttgaacgagacctgggaggaaaaactgagaaggacagaggccatcagaatggagcgcgaggcattgctggctgaaatgggtgtggcgatgcgagaggacggaggaactctgggagtgtttagccctaaaaaaactccccacctggttaacctgaatgaggatcccctgatgagtgagtgccttctttattacattaaagatggcataacccgtgtcggacgagaggatggagagcgacggcaggacatcgtgctttccggacattttattaaagaggagcactgcgtgtttagaagcgactcaagagggggaagtgaggccgtcgttacgctggagccctgcgagggagcagacacctatgtcaacggaaagaaggttaccgaaccatccatccttcgctcaggcaaccgcatcatcatggggaaatcacatgtttttcgattcaaccatcctgagcaggctagacaagaaagggagcgtaccccatgcgccgaaacacccgctgaacccgtggactgggcatttgctcaaagggaactgctagaaaaacagggtatcgacatgaaacaagaaatggagcagcgactccaggagctcgaagatcagtataggagggaacgcgaggaggccacctatctactggaacagcagagactggattacgagagtaaattagaggctctgcagaaacagatggacagccgttattatcctgaagttaacgaggaagaagaggagccggaggacgaggtccagtggaccgaaagagagtgtgagctggcactgtgggccttccggaagtggaagtggtaccaattcacgtctttgcgggatctcctctggggcaatgccatttttcttaaggaagccaacgccataagcgtggaattgaagaaaaaagtccaattccaattcgtactgctcacagacacactgtattctcccctccctcccgatctgcttccacctgaggccgctaaagaccgagagactcggccattcccccgaaccatagtcgcagttgaagtccaggaccaaaagaacggagccactcactattggacactcgagaaattacgacaacgcttagaccttatgcgtgagatgtacgatagagccgcagaggtgccgtctagcgtgatcgaggactgcgataatgtggtgaccgggggagaccccttttatgacaggttcccatggtttcggttagtcggccgtgccttcgtatacttgtccaatcttctgtaccctgtgcccctggtgcaccgagtggccattgtgtctgaaaagggggaagtaaaaggattcctacgggtagccgtgcaagctatatccgcagacgaggaggccccagattacggatccggtgtacgtcaaagtggaaccgctaaaatctctttcgacgaccaacactttgagaagttccagtcagagagctgccccgtggttggtatgtcccgctctggaacgtcccaagaggagctgaggatcgttgaggggcaaggtcaaggggcagacgtgggcccaagcgccgatgaggttaacaataatacctgtagcgcggtcccgcctgagggtctgctgctggattccagcgagaaagcagccctggatggcccactagacgctgcacttgatcatctgcggctggggaatacattcaccttcagggtaaccgtgttgcaggctagcagcatttctgccgagtatgcagatatcttctgtcagtttaatttcatccacagacacgatgaggccttttcaacggaacccctcaaaaacactggacgcggacctcccctaggcttctatcatgtccagaatattgcagtcgaagtgaccaaaagtttcattgagtatattaaaagtcagccaattgtctttgaagtgtttggacactaccagcaacatcctttcccaccgctgtgcaaagacgttctaagcccactcaggccttcacgaaggcatttccctcgggtgatgccactgagcaaaccagttcccgcaacgaaattatccacattgactcggccttgccccggaccatgtcattgcaagtacgacctgttggtctacttcgagatatgcgagctggaagctaacggcgattacatccccgcagtggtggaccatagaggaggtatgccatgtatggggacgtttctgttacaccaaggaatacagcgaaggataaccgtgaccttgctccatgaaacagggagtcatataaggtggaaggaagtgagagagctcgtggtcggccgaattcgcaacacccccgaaactgacgagagtcttatagaccccaacattctctccctgaatatcctgtcttctgggtacatacaccccgctcaggatgataggacgttctatcagttcgaggctgcatgggacagtagcatgcataacagcttattgctgaatcgcgtaacgccctatcgggaaaagatttacatgaccctctccgcctacattgagatggagaactgcacccaacctgccgtcgtaacgaaggatttttgtatggtgttctatagtagagatgccaagctacccgctagccgttcaatacgaaatctcttcggcagtgggtctcttcgggcatcagaaagtaatcgcgtgaccggagtgtacgagctcagcctgtgccacgtggccgacgccggatcccccggaatgcaacgtcggagacggcgagttttagatacatccgttgcttacgtcagaggagaagagaatttggcaggatggcgccctcgcagcgacagccttattctggatcaccagtgggagctggagaagttaagcctcctgcaggaggtggaaaaaacgaggcactatcttctccttcgggaaaagttggagactgcccaacgacccgtcccggaagctctttcaccagccttttccgaagacagtgagtcccacggtagttccagcgcctccagccccctgtcagccgaagggcgacccagcccactggaagcaccaaatgagcggcagagggaactggcagttaagtgtttgcggcttctcacacacacattcaatcgcgagtatacccactctcacgtctgtgtgtccgcttccgagagtaaattatccgaaatgagtgtcactctgctgcgggatccatccatgtccccacttggtgtggccaccctgactcctagttccacctgcccaagtctggtcgaagggaggtacggagcaaccgatctgcgcacaccccagccctgctcacgcccagctagccctgagcccgaattgctccccgaggccgactctaaaaagctgcccagcccagctcgagcaaccgaaaccgacaaagagcctcagcgactcttagtgcccgacatccaagaaattcgcgtgtcaccaatcgtgtccaagaaaggttacttacattttttggagccgcatacctctggctgggcccgacggttcgtagtcgtccgccgtccctacgcctatatgtacaatagcgataaagatactgttgagcgattcgtgcttaaccttgctaccgcacaggttgagtactccgaagatcaacaagctatgctcaaaacacccaataccttcgccgtttgcacagaacacaggggcatcctgttgcaggcggcaagcgacaaggacatgcacgattggttgtacgcctttaacccactgctcgccggtaccatccggtctaaactctcaaggcgacggtctgcccagatgcgcgtata

SEQ ID NO: 227816 - DNA, 5399 bp, synthetic construct
  misc_feature 1..5399: note = Description of Artificial Sequence: Synthetic coding sequence
  source 1..5399: mol_type = other DNA
atggccggagcatccgtcaaggtggccgtgcgagtaaggccatttaactccagagaaatgtccagagatagtaagtgcataatccagatgtcgggtagcactaccactatcgtaaaccctaaacagcccaaggagaccccaaaaagtttcagctttgattattcttactggagtcacacgagccctgaggatataaattatgcctctcagaaacaggtatacagagatattggtgaagagatgctgcagcatgctttcgaaggctacaacgtgtgtatttttgcgtacgggcagaccggggctggaaaaagctacaccatgatggggaaacaagagaaagatcagcaaggcataatcccacagctgtgcgaagatttattttcacgaattaatgatactactaacgacaatatgtcttatagtgtcgaggtaagctacatggaaatttactgtgagagagtgcgtgaccttctgaatcctaaaaacaaaggcaatttaagagtcagggaacacccgctcctcggtccctacgttgaggatcttagcaaattggccgtgacaagttacaacgatatccaagatttgatggatagtggtaacaaggcacgtactgtggctgcaactaacatgaatgagacgtcctcccgaagccacgccgtgtttaacattattttcactcagaagaggcacgatgccgagactaatataactactgaaaaggtgtctaagatttccctagtagatttagccggttccgagagggcagattcaaccggagcgaaaggcacaagactcaaagagggggcaaatatcaataaaagtctcaccaccctgggaaaagtaatctccgctctggcagaaatggtgagcggaccggctagaaacaaaaaaaaaaagaagacagatttcatcccttacagagatagcgtcctgacttggctgctgagagaaaacttaggcggaaactctcgcactgcaatggtagccgctctcagccctgcagacataaactacgatgagacattatcaacccttagatatgcggaccgggcaaaacagatccggtgcaatgccgtgattaacgaagatccaaacaataaactgatccgggagcttaaggacgaggtgacacgactgcgtgatctcctctacgcccaggggctcggggacattaccgacaccaatactgtccctgggggacccaagcttacgaacgctctggtcggaatgtctccatccagctctctctcagcactgtccagtcgagcggctagcgtctcttccctacacgaacgaatactgttcgctcctgggagtgaagaagccatagagcggctcaaggagacggagaagatcatagctgagctaaacgagacctgggaggagaagctgcgaaggacagaagccatcaggatggagagggaagcccttctcgctgaaatgggcgtagccatgagagaggacgggggaacattaggtgtgttcagccccaaaaagacaccccatctggtgaacttgaatgaagatcccctcatgagtgaatgcctcctctattatataaaggatggcattacgagggtcggcagagaggatggcgaacgccgtcaggatatagtgttatccggccacttcatcaaagaagagcattgcgtgttcagatccgactctagaggtggatcagaggccgttgtcacccttgagccctgcgaaggtgccgacacatacgtcaatggcaagaaagtaacagagccctccatactacgctctgggaataggattattatgggtaagtcccatgtatttcgcttcaaccacccagagcaggctaggcaagaacgcgaacgcacaccttgcgctgagaccccagccgagcctgtcgactgggcatttgcccagcgtgagttgctcgagaaacaggggatcgatatgaaacaggaaatggaacaacggctgcaagaactggaggatcagtatagaagagagcgcgaggaagccacttacctgctggaacagcaacgcctggattatgagagtaagctggaggcactgcagaagcagatggatagtcgctactaccctgaggtgaatgaggaagaggaagagcccgaggatgaagtgcagtggactgagagggaatgcgaattagccctgtgggctttcagaaagtggaaatggtatcagttcacgagcctgcgggacctgctctggggcaacgcaatcttcctaaaagaagctaacgctatctctgttgaattgaagaaaaaggtgcagtttcagtttgtactgttgaccgataccttgtattcccccctcccacccgatttgttaccccctgaggccgctaaggatcgcgagactcgcccttttcctcgcaccattgtagctgtggaagtccaagaccagaagaacggagcaacccattattggacactcgagaagctgcgccaaagactggacctaatgcgcgagatgtatgatagagctgcagaggtgccatcatccgtcattgaggattgcgataacgtcgtgaccgggggagaccctttttacgatcgattcccatggttccggctggttggttctagcgctataagtggttgcaactcttacccactattgaatacatgcatgagtgagcgcatggccgcactaacgccatctccgacattcagctcgcccgactccgatgcgaccgagcccgcagaagaacaatcggttggcgaagaagaggaggaggaagaagaagaagaggatgaagaggaagaagatttggaggacgacgtcttccccgaacacgcactttgtgacggacgggatccattctatgatagaccaccgctcttctcactcgttgggagagctttcgtctacttatcaaacctgctttatcccgtccctttggtacacagagttgcgatcgtgtctgaaaaaggtgaagtaaagggtttcctcagagtggccgtgcaggcaatctccgccgatgaggaagccccagactacggaagtggagtccgccaatcgggaaccgctaaaataagcttcgatgatcagcactttgaaaaattccagagtgaatcatgtccggtggtgggcatgagccgcagcggaacgtctcaggaggaactgcggattgtcgaggggcaggggcagggggctgacgtggggccatcagcagacgaggtgaataataacacgtgttctgccgtcccaccggagggattgttgcttgacagctcggagaaggctgctctggacggaccactggatgccgcactcgaccatctgaggttgggcaatacattcacttttcgagtaaccgtgctgcaggcaagctccatctccgcggagtatgccgacatcttttgccagttcaactttattcatcggcacgacgaagccttttcaactgagcctctgaaaaacacaggtcgcggtccgcctctcggcttttaccacgtccagaatattgccgtcgaagtcaccaagtcttttatcgaatacatcaagtcccagccaatagtatttgaggtcttcggccactatcagcagcacccctttccaccactgtgcaaagacgtgctcagcccactgaggccttcccggaggcatttcccacgtgtgatgcccctaagcaaaccagtgcccgcaactaagctctcgacacttacccgaccctgcccaggcccatgccactgtaaatacgacctcctggtgtacttcgagatctgcgagctggaggccaatggcgactatattccggctgtagttgaccatcggggaggcatgccttgtatggggacattcctcctccatcaaggaatccaacggcgaatcacagtgactctactgcatgagaccggctctcacatacgatggaaggaggtacgcgagctggtcgttggtagaattaggaacaccccagaaacagacgaatcccttatcgatccaaacattttgagcctgaacatcttgtcatccggatacatccaccccgctcaggacgacagggttagtctgggcaacgacactcgaactttctaccaattcgaggctgcttgggactcttctatgcacaattccttgctgctgaatagagtaaccccataccgggaaaagatttacatgaccctttcagcctatattgagatggaaaattgcactcagcccgctgtggtcaccaaagacttttgtatggttttttacagccgcgacgccaaactgcccgcttcgagaagcatacgcaacttgtttggcagtggcagcctccgggcatctgaatcgaacagggtaaccggagtgtacgaactcagcctctgccacgtggcagatgctggctctcctgggatgcagcggagaaggcggagggtactggacactagtgtcgcttacgttcgcggagaagaaaatctggcagggtggagacctcgctctgatagcctgatcctcgatcaccagtgggagctagaaaagttgagcctgctccaggaagttgagaagacaaggcattacctgctgttaagggaaaagctggagacagcacaaagacctgttcctgaggctttaagtcctgcgttctccgaggactctgagagccacgggtcttcgagtgcctcgagccccctgagtgctgaggggagaccatcaccactggaggcgcctaacgagagacaacgcgagctggcggttaagtgtcttcgcctattaactcatacctttaatcgggagtacacgcacagtcacgtctgcgtttctgcaagtgaatctaagctgagcgaaatgagcgtcacccttttgcgcgacccttctatgtccccactcggagtggcaaccttgacaccttccagcacatgcccttcactggttgagggcaggtacggcgcaactgatctgcggacccctcaaccctgttccagaccagcttctcctgaacccgaattgctgccagaggccgattccaaaaagctcccaagtccagcacgagccaccgagaccgacaaggaaccccagcgactactcgtgccagatatacaggagataagagtttctccaatagtctcaaagaaggggtacctacacttcctggagcctcataccagcgggtgggcccgtcgattcgtcgtcgttcgacgtccctatgcctatatgtataatagcgacaaagacaccgtggaacgttttgttttgaacctggccacagcccaggtggagtacagtgaggatcaacaggccatgttgaaaacccctaacacatttgctgtatgcaccgagcaccggggtattctcttacaggcagccagcgacaaagacatgcatgactggttatatgcctttaaccccttgctggccggaactattaggtctaagctgagcaggagacggtccgcgcagatgagagttta

SEQ ID NO: 227817 - DNA, 117 bp, synthetic construct
  misc_feature 1..117: note = Description of Artificial Sequence: Synthetic coding sequence
  source 1..117: mol_type = other DNA
atggctggggcatctgtgaaggttgccgtgcgggtgagaccattcaactccagggaaatgtccagggattcaaagtgcattattcagatgagcggatccacgaccactatcgtttag

SEQ ID NO: 227818 - DNA, 5375 bp, synthetic construct
  misc_feature 1..5375: note = Description of Artificial Sequence: Synthetic coding sequence
  source 1..5375: mol_type = other DNA
atggctggtgctagtgttaaggtcgcagttcgtgtacgtccatttaactcacgtgaaatgagccgggacagcaagtgcataatccagatgtcagggagtaccacaaccatcgtcaacccaaagcagcctaaggagacccctaaatctttctcatttgactacagctactggtctcatacgagccctgaggacataaattatgcctcccagaaacaagtctatcgggacattggcgaggaaatgcttcagcatgcctttgaaggctacaatgtgtgtatctttgcctatggtcaaaccggagctggcaagtcttataccatgatgggcaagcaggaaaaggaccagcaggggatcatcccacaattgtgcgaggatctgttcagcaggatcaacgacacgacaaatgacaacatgagctactccgtcgaggtgtcctacatggagatatactgcgagcgggttagggatctattaaacccaaagaacaaaggcaatttaagggtccgagaacaccccttgctgggcccatacgtggaggacctgtccaaattggcggtgacatcttacaatgatattcaagatctgatggattcaggtaacaaggctagaacagttgctgccaccaatatgaacgagactagtagcaggtcccacgccgtgtttaacatcatttttacccaaaagcgccatgacgcagagaccaatattaccactgaaaaggtgtccaagatcagtctggttgacctggcaggatctgagcgcgctgattcaaccggcgcaaagggcacacgcctgaaggagggggcaaacataaacaagtcactgaccaccctgggcaaagttatctccgcactggctgagatggattccggaccgaataagaataagaagaagaagaagactgacttcatcccctacagagactctgtcctcacctggctgctcagggagaacctgggaggcaacagtagaacagctatggttgccgctctgagccctgcagacatcaattacgacgagactctatccacattgcgctatgccgatagggctaagcaaattagatgcaacgccgtaatcaacgaggatccaaacaataagcttattcgtgaactgaaagacgaagtgacccgccttcgagacctcctttatgctcagggcctgggagacattaccgacaccaacaccgtgcccggaggcccaaagctgacgaacgccctggttggcatgagcccttctagctccctaagcgctctctcgagcagggcagcctcagtctcctctctgcacgagagaatcttatttgctcctggttcggaggaggctatcgaaagattaaaagagactgaaaagattatagccgagctcaatgaaacttgggaggagaaacttcgcagaaccgaagctattagaatggaacgtgaagctttacttgctgagatgggagttgccatgcgcgaggacggtggcaccctcggagtgtttagccctaagaagaccccccacctggtaaacctgaatgaagatccgctgatgtccgagtgcctgctgtactatatcaaggacgggattactcgagtcgggagagaggatggggagcgtaggcaggacattgttctatctgggcactttataaaagaggagcactgtgtctttcggagtgactctagaggaggcagcgaagccgtggtaacactggagccctgcgagggtgctgacacttatgtcaatggcaaaaaagttaccgagccatcaatcctacgttctgggaacagaatcattatgggcaagtcccacgtgttccgtttcaatcatcccgaacaggccaggcaggagcgggagagaactccatgtgctgagacaccggcagagcccgtggactgggcattcgcccaacgggaactcttggaaaagcagggaatcgacatgaaacaggaaatggagcaaaggctgcaggaactcgaggatcaatataggagagagcgcgaggaagctacgtatctgctggaacagcagagactcgactatgaaagcaaattggaagcacttcagaagcagatggactcccgctactatccagaggttaacgaagaagaagaggagcccgaagatgaggtgcagtggacagaacgggagtgtgaactggcgctgtgggcttttcgaaaatggaagtggtaccagtttacgagcctgagagaccttctgtggggcaatgccatcttcctcaaggaggctaacgccatctctgtagaactcaagaagaaagtgcagttccagttcgtgctgcttaccgacaccttgtactcaccgctcccgcctgacctgctgcctccagaggcagcaaaggaccgggagacccgaccctttccgaggacaatcgtcgcggtggaggttcaagatcagaagaacggcgcaacgcactattggaccttggagaagcttaggcaacggcttgacctgatgcgcgaaatgtatgacagagccgcagaagtccccagttcagtcatcgaagactgcgacaacgtcgtgaccgggggtgatcctttttacgatcggtttccatggttcaggttagtgggctcttccgcaataagcggctgcaatagttatccattgctcaatacctgtatgagtgagagaatggctgctctgacccctagcccaacattctcctcccccgattctgacgccactgagcctgccgaggaacagagcgtcggtgaagaagaggaggaggaagaggaggaggaggatgaggaggaagaagatttggaggacgatgtgttccctgaacacgccctgtgcgacggcagagaccctttctacgatcgtccccctctgttctccttggttggtagggctttcgtctacctcagtaacttactctaccctgtaccactcgtgcatagagtggccattgtatccgaaaagggcgaagtgaagggctttttgagagtcgcagtgcaggccattagtgcagacgaagaagctcccgactacggctccggcgtccggcaaagcgggactgctaagatatcctttgacgatcagcatttcgagaagtttcaatcagaatcctgtcccgttgtgggaatgagtagaagtggcacaagtcaggaggagctgcggattgttgagggacagggtcagggggcagacgtaggtcctagcgcagacgaggtcaacaataatacatgcagcgctgttccaccggagggtttgttacttgatagctccgaaaaggcagccctagacggaccattggacgccgcactggaccatttgcgtctggggaacacctttaccttccgggtcacggtgctgcaggccagttcaatctccgcggagtatgccgatatcttttgccaattcaatttcattcaccgccacgacgaagctttctccaccgagccactcaaaaatactgggagagggccacctttggggttctaccatgtccaaaatatcgcggtagaagtgaccaaaagctttatagagtatattaaaagccagcctatcgtgtttgaggtgttcggtcattatcaacagcacccatttcctcctctgtgcaaagacgtgctgagtccacttaggccatctcggaggcattttcccagggtgatgcccctttcaaagcccgtacctgcaaccaagctctccacactgactcggccatgccctggcccttgtcactgcaaatatgacctgctggtgtactttgaaatttgcgagttagaagccaacggtgactatattccggcagtcgtcgatcatcgaggtggtatgccttgcatgggtacttttctgctgcaccaaggcatccagaggcgtattacagtgacattactacatgagaccggaagccatattcggtggaaggaagtccgtgagctcgtggtggggagaattaggaacacgcccgaaacagatgagtctcttatcgatcccaacattctatcacttaatatactgagcagcgggtacatccaccctgctcaggatgataggaccttttatcagttcgaagcggcttgggactctagcatgcacaatagtctcctcttgaatagggtgaccccatacagagaaaaaatctatatgactttgtccgcatatatcgaaatggaaaactgcacacaaccagctgtagttacaaaggacttctgcatggtgttctactcaagagacgccaaattgcccgcaagccgcagcatcaggaacctctttgggtctggctccctacgggcttccgaatccaaccgggtgacaggagtctacgagctcagcctgtgccacgtagctgatgctggaagccctgggatgcaacggagacgcaggcgcgtgctagacacatcggtggcctacgtaaggggcgaggagaacctcgcgggatggcgacccaggagtgactcgctgatacttgatcaccagtgggagctagagaaactgagtctcctgcaagaggtcgaaaagactaggcactatttactgttaagagaaaaactggaaacagcccagcgacctgtgccagaagctctgagtcctgctttcagcgaagacagcgagtcacacggatctagctccgcatcatcccccctgtccgccgagggcagacccagccccctggaggccccaaatgagaggcaacgcgaactggccgtaaagtgcttgcgccttttaacccacacctttaacagagagtatactcatagccacgtatgtgtcagcgccagcgaatccaagttgagcgagatgtctgtgaccttgttgcgagatcctagcatgtctcctctgggcgtggccaccctgaccccatccagcacatgtccaagcctggtcgaaggcagatatggcgctacagacctgcggaccccccagccctgctcacgcccagcttctcccgagccagagctgttacccgaggcagacagtaagaaactgcctagccctgcacgggcaaccgagaccgacaaggagccacaacggcttctggtgcctgatattcaggaaattcgcgtgtccccaatcgtatcaaaaaaaggctatttgcattttctggagccccacacgagtggatgggcacgcagattcgtggtcgtgagacgcccttacgcatacatgtataactccgataaagataccgtggaaagattcgtgttaaatttggccaccgcgcaagttgagtattctgaagaccagcaggccatgctgaagacccctaacacttttgcagtgtgtaccgagcaccgcggaattctcttacaggccgcatctgacaaggacatgcacgattggctgtatgctttcaaccccttgctggcgggaaccattcggagcaagctttcccgcaggagatccgcgcagatgagagtcta

SEQ ID NO: 227819 - DNA, 5312 bp, synthetic construct
  misc_feature 1..5312: note = Description of Artificial Sequence: Synthetic coding sequence
  source 1..5312: mol_type = other DNA
atgtctggcgctagcgtcaaagtggctgtgagagtgagaccatttaattcaagagagacgagcaaagaaagcaaatgcatcatccagatgcaggggaattccacgtctataatcaatcctaaaaaccccaaggaagccccaaaaagtttctccttcgactactcgtactggtcccacactagccctgaagacccttgcttcgccagccagaaccgggtgtataatgatatcgggaaggagatgcttcttcacgcctttgagggttacaacgtgtgtattttcgcctacgggcaaaccggtgccggaaaaagctatacaatgatgggaaagcaggaggaatctcaggccggtatcataccgcagctctgtgaggaactcttcgaaaagatcaatgacaattgtaatgaggaaatgtcctacagcgtggaggtcagttatatggaaatttactgtgaacgcgtgcgggatctcttgaaccccaaaaacaaaggcaacctgcgcgtcagggagcatcctctgctgggaccctacgtcgaggacctaagcaagttggccgtgacatcttatacggacattgcagatttaatggatgccggaaataaggccagaactgtcgcagcaactaatatgaacgagacaagttccagaagccatgcggtgtttaccatcgtcttcactcagaagaagcacgacaatgagactaatctgtctaccgagaaagtgagtaagataagtctcgttgacctggccggatctgagagggccgattcaacaggtgccaaaggaaccaggttgaaagaaggcgctaatattaacaagtctctaaccacattaggaaaggtgatttcagcactcgccgaggtctccaagaagaaaaaaaagaccgatttcattccttaccgggactccgtgcttacgtggctgttgagggagaacctcggcggaaactctcgcacggcgatggtcgctgctctcagccctgccgacatcaactatgatgagaccctgtccactctgaggtacgccgatcgggctaaacagatcaaatgcaatgctgtgatcaacgaagaccctaacgccaagctagtgcgcgagctaaaagaggaggtaactcggctcaaagacctcctgagagcccaggggctgggagacataattgacacatcgatgggtagtctgacctcatctccatccagctgctccctgtcttcccaggtcgggctgactagcgtcaccagtatccaggagcgcatcatgagcacacccggaggcgaagaggctattgagaggctgaaagaaagcgagaagatcatcgcagagcttaacgagacctgggaagaaaagttgcggaaaactgaggccatccgaatggaacgggaggccctgctcgccgagatgggtgtggcgatcagagaggatggtggaactctgggcgtcttttctcccaagaagactccacatctggtgaacctgaatgaggatcctttaatgtctgaatgcctgctttactatatcaaggatggaattaccagagtcggtcaggcggacgccgaacgacgccaggacatagtgcttagcggcgctcatattaaggaggagcattgtatcttccgctcggaaaggagtaacagcggggaagtgatcgtaacccttgagccctgcgaaagatccgagacctacgtgaacggaaagagggtgtcgcaacctgttcagctgagaagcggcaataggattatcatgggaaaaaatcacgtgtttcggttcaatcaccctgagcaggcgcgtgccgaaagggaaaagaccccttctgctgagaccccatcggaacctgttgattggacgttcgctcagagagagctgctggaaaaacagggcattgatatgaaacaggagatggagaagagactccaggagatggagattctctacaagaaagagaaggaggaggccgatttgctcctcgagcaacaacgtctggattatgagagtaagcttcaggcgcttcaaaaacaagttgagacacgatcgttggccgctgagacaaccgaggaagaagaggaagaggaggaagtgccctggactcagcacgaattcgagctggcacagtgggcgtttcgcaaatggaagtcgcaccaattcacgagcctgagggacttgttgtggggaaatgcagtctatctgaaggaagctaatgcaatctcagtggaactgaaaaaaaaagttcaattccagtttgtcctgcttacggatacgctgtatagtcccttgccaccggagcttctacccacggagatggaaaagactcatgaggatagaccatttcctcgtactgttgtcgccgtggaggtgcaggacctaaagaatggcgctacccactactggtccttggagaagttgaaacaacggcttgatttaatgcgagagatgtatgatcgcgctggcgaaatggcaagtagcgcccaggatgagagtgaaaccactgtcacaggctcagatcctttttatgaccggttccactggtttaagctggtcgggagctcccccatctttcacggatgcgttaatgaaagactggcagacaggactcctagccctaccttctccactgcggattcggacattacggaattggccgacgaacaacaggacgaaatggaagatttcgatgacgaggcctttgtcgatgacgccggttctgatgctggcactgaggagggaagcgacctctttagcgacggtcacgatcctttctatgaccgatccccctggtttatcttggtcgggagggcattcgtctacctctctaatctgctctatcccgttcccctcattcaccgggtcgcgattgtatcagaaaagggcgaggtgagagggttccttagggtggccgtccaggcaatagccgcagacgaagaggcaccggattatggatctggcatccgacaaagcggtacggccaaaatctctttcgataatgaatacttcaaccagtctgatttctccagtgtggctatgacccggagtggccttagtctggaggagcttagaatcgttgaaggacaaggccagagcagcgaggtcattactccgcctgaggagatctcccggatcaacgacctggacttaaaatcttccacactgttagacgggaaaatggtcatggagggtttttcagaagaaattggcaaccatctcaaactggggagcgcgttcacatttagagtcacagtacttcaagcctctggaatcctcccagagtatgccgacatcttctgtcaatttaacttcctgcaccgccacgacgaggcttttagtactgagccactgaaaaacaacgggagggggtcccctctggcattttaccacgtgcagaacatagccgtagaaatcactgaaagctttgtggactacatcaagactaagccaattgtttttgaggtctttggccactaccaacagcatccgctgcatttgcagggccaggaactgaattctccaccccagccgtgtagaagattcttcccgccaccgatgcctctgtcaaaacctgtgccagctacaaagctcaatacgatgagtaaaaccagtttgggccaaagcatgagtaaatacgatctgttggtgtggttcgagatctctgaactagaacccacaggcgaatacatccctgcggtggtggaccatacagctggactcccatgccagggtaccttcctactccaccaagggatccaaaggaggatcaccgttaccattatacatgaaaagggatcagagctgcattggaaggatgtgagagagctggtagtggggagaatccggaacaaacccgaggtcgatgaggcggcagtggacgcaattttatctctgaacatcatctcggccaagtacctcaaaagctctcataatagcagtaggactttctacagatttgaggctgtgtgggattcctctctgcataactccctcctgctaaatcgggtgacgccctacggggagaaaatttacatgaccctcagtgcctacctcgagctggatcactgtatccagccggcagtgatcactaaggatgtgtgcatggtcttctatagccgtgatgcaaaaatcagtccgccaagatctctccgctctctgttcggctcaggttattccaagagccccgatagcaatagagtaaccggcatctatgagttgtctctctgcaaaatgagcgacaccgggtctccaggaatgcaaaggagacgcaggaaaattctggatacctcggtcgcctacgttagaggcgaggaaaacttggccggttggaggccgaggggggattcactgatccttgaacaccagtgggaactggagaagttggaactgctgcacgaggtggagaagacacgccattttctgctactgagagaaagattaggagatagcatccccaagagcctttccgattctctgagtccctccctgtcttctggaaccctgtccacttccacttctatttcatcccagatctccacgacaacatttgaatcagccatcacaccttccgaaagcagtggctacgatagtggcgacattgagtcactcgtggacagagaaaaggaactcgccaccaaatgtttgcagctccttacgcacacctttaatcgcgagttttctcaagttcacgggagcgtcagcgactgtaaattaagtgacatcagccctatcgggagggatccgtcagaatccagtttttccagcgcaacccttaccccaagctcaacctgcccaagcttggtggattcacgcagtaattctctggatcagaaaactcccgaggcaaatagcagggcatccagcccatgcccggagtttgagcagtttcagatcgtcccagccgtagaaacaccttacttagcccgagccggaaaaaatgaattccttaacctagttcccgacattgaggagattaggccatctagtgtagtgtctaagaaaggctacctccattttaaggaaccactgtattcaaactgggcaaaacacttcgtggttgtaaggcgaccctacgtgttcatctacaattccgataaggatcctgtggaacgaggtatcattaatctcagtactgcccaggttgagtattctgaggatcagcaggctatggtgaagacccccaatacttttgccgtctgtacaaagcacaggggggtgctgctgcaagcattaaatgacaaggacatgaatgattggctgtatgcattcaacccgctgctcgccggtaccattcggtccaaattatctaggaggtgcccatcccagtctaagtacta

SEQ ID NO: 227820 - DNA, 5471 bp, synthetic construct
  misc_feature 1..5471: note = Description of Artificial Sequence: Synthetic coding sequence
  source 1..5471: mol_type = other DNA
atgagcggggcatccgtaaaagtggcagtgagagtgcggcctttcaattcccgggaaaccagcaaagaatctaagtgcatcatccaaatgcaggggaattccacgtcaatcatcaaccctaaaaatcctaaagaagctcccaaaagcttcagctttgattactcatactggtcccacacgtccccagaagacccatgttttgccagccagaatcgtgtgtataatgacatcggaaaggagatgcttctgcatgcgttcgagggatacaatgtgtgcatatttgcttatggtcagactggcgcaggcaaatcttatactatgatgggcaaacaggaggaatcacaagccggaataataccccagctgtgtgaagagttgttcgagaagataaacgacaactgtaacgaggagatgagctattctgttgaagtaagctacatggaaatctattgcgaacgagtgagggacctgttgaatcctaagaataaggggaacttgagagtcagagagcatcccttgctaggaccctacgtcgaggatctgtcaaaactcgctgtgaccagctacacagacatcgcggatcttatggatgcgggaaataaggccaggactgtagccgctacaaatatgaatgaaaccagcagccgcagccacgctgtatttacaattgtgtttacccaaaagaagcatgacaatgaaacaaacctgtccaccgagaaggtgagcaagatctcactagtggacttggccggtagcgaaagggccgactcaacaggcgcaaagggcacccgtctcaaggaaggagcaaatatcaataagtccctcactacgctgggcaaggttatctccgcactggcagaagtagatacctcaaaaaaaaaatcgaagaaaaaaaagaagaccgacttcattccgtacagggattcagttttgacctggcttctgagggaaaatttgggagggaattcccgtaccgcgatggttgccgcactgtcgccagcagatattaactatgacgaaacgttatctaccttgagatacgccgatcgggctaaacagatcaagtgcaacgctgttatcaatgaggaccccaacgcaaaacttgtgcgggaactgaaggaggaagttactcgacttaaggatttactgcgtgcccaaggactgggagacattattgacatcgatccgttgatcgacgactattctgggtctggaagcaagtacttgaaggactttcagaacaacaagcaccgctacctgctggctagtgaaaatcagagacccggtcatttctccactgcaagcatgggctctctgacctctagcccatcgtcctgctcactttctagtcaggtagggctgacctctgtaaccagcattcaggagcggatcatgtccacacccggaggcgaggaggctattgagcgcttaaaggagtccgagaaaatcatagccgagctcaatgagacctgggaagagaaactacggaagacagaggccatccggatggagcgggaggcactgctggccgagatgggagtggccataagagaagacggtggcacactaggtgtgttctcaccaaaaaagacaccccatctggttaatctgaacgaagatccgttgatgagcgagtgtctgttgtattatataaaggatgggataacccgggtaggtcaggcagatgccgaacgccgacaggatatagtcctctccggcgctcatatcaaagaggagcattgtatttttagaagtgaacggagtaattcaggggaagtgattgttaccctcgaaccgtgcgagagatccgagacctacgttaacggcaaacgcgtgtcccagcctgtgcaactccggtccggtaaccgtattattatgggcaaaaatcacgtgttccgtttcaaccaccctgagcaggctagggccgagcgcgagaagacaccctccgccgaaacaccttccgaaccagtcgattggactttcgctcagcgggaactgctggaaaagcagggaattgatatgaagcaggagatggagaaaaggcttcaagagatggaaattctttacaaaaaggagaaagaggaggccgacctgctcctggagcagcagagattggattacgaaagcaaactacaggccctgcagaagcaggtcgaaacgcggagtctcgccgcagagaccaccgaagaagaggaggaggaagaggaggtcccctggacacagcacgagtttgaactggcccaatgggctttccgtaaatggaagtctcaccaatttacctcgttaagggacttgttatggggtaatgccgtctaccttaaggaagccaatgccatcagcgtcgagctgaaaaaaaaggtgcagttccaatttgtcctgctcacagataccctttatagcccgctgccccctgagcttctccccacagagatggagaagactcatgaggacaggccctttccacgaacggtagtggccgttgaggtgcaggatcttaaaaatggcgcaactcactactggagtttggaaaagctgaagcaacggcttgatctgatgcgggagatgtatgatcgagctggcgagatggcatcctcagcccaggacgagagcgagactactgtgactggatcagatcccttctacgaccggttccactggttcaagctagtcggtagttcccctatcttccacgggtgtgttaacgagcgcctggctgatcggaccccttccccgacctttagtaccgccgatagcgatatcactgagttggcggacgaacagcaggacgagatggaagacttcgacgatgaggcattcgtagatgacgctggcagcgatgcaggcacggaagagggatctgacctgttctcggatgggcacgacccattttatgacagatccccatggtttatcttggtgggcagagcctttgtttatctgagtaaccttctgtatcctgttcctctcatacacagagtggctatcgtgtccgagaaaggtgaggtgcgcggtttcttacgtgtggccgtacaagccatcgccgcagacgaagaggccccagattacggttctggcatccggcaatcaggaaccgcaaagatatcgtttgataatgaatacttcaatcagtccgatttttctagtgttgcaatgactcgcagcggactgagtctggaggagctgaggattgttgagggacaaggccagtctagcgaggtaataaccccacccgaggaaatatcaaggataaatgacctcgacctcaagtcatccacactgctggacgggaagatggtcatggaaggctttagcgaagagataggcaaccatctaaagctcggctctgcattcactttcagagtgaccgtgctgcaagcctccggcatattgccggaatacgcagatatattctgccaatttaacttcctgcaccgacacgatgaggcgttttctactgagccgttaaagaataacggacgcggttcacctctcgccttctaccacgtgcagaacatcgcagttgaaatcaccgaaagcttcgtggattatattaaaacgaagcccatagtgttcgaggtgtttgggcattaccagcaacatccattgcatctccagggacaagaactgaattcccccccacagccctgtcggaggttcttccctcctcccatgcctctcagcaagcccgtgcctgcaacgaagctcaacacaatgtcaaaaaccagcctgggccagagtatgtcgaaatatgacctcctggtgtggttcgagattagcgaactcgagcctaccggcgagtatattcccgctgttgtcgatcacaccgcgggtctgccgtgccaaggaaccttcctgctgcatcaagggatacagaggcgaattactgtcaccattatccatgaaaagggttccgaattacattggaaggatgtaagagaactagtggttggaagaattcggaataaacctgaggtggacgaggccgcagtcgatgctattttatcactaaacatcataagcgcaaaatatctcaagtcctctcacaacagttcaaggacattctaccgctttgaggcagtatgggatagtagtttacataattcccttcttttaaaccgcgtaaccccttatggggaaaaaatttacatgacgctgtcagcttacctggagcttgaccattgcatccagccggcagttattacaaaggacgtctgcatggtgttttacagtcgcgacgcaaaaatctcacctccccgatccctccgctcccttttcggaagtggatacagtaaatcacccgacagtaatagagtgactgggatctacgagctcagtctctgcaagatgtctgacactggaagcccagggatgcagagacggagacgtaagatattagataccagcgtggcctatgtgaggggcgaggaaaatcttgctggatggcgaccacggggagactcgctcattctggagcatcagtgggaactggagaagctggagctactccacgaggtcgaaaagacgcgtcactttcttctcctacgggagcggcttggcgactctattcctaagagcttgagcgactcactctctccaagcctgagttccgggacactgtccacctcaacctcaattagctctcaaatctccacaactacattcgaatcagccattacaccttcagagtcatctggatacgattccggcgacattgagtcgttagtggaccgagagaaggaactggccactaagtgtctacagctcttaacgcataccttcaacagagagttcagtcaggtccatggctccgtgtccgattgtaagctgagcgatatcagtcccatcggtcgcgacccctccgagagcagtttcagcagtgccacattgaccccttctagtacctgtcctagcctcgtggattctcgaagcaactccctggaccaaaaaacccccgaggccaactcccgagcttcttctccgtgccctgagtttgagcagtttcagattgtacctgcggttgagaccccatatctagccagagcgggaaagaacgagtttctgaatctggtgcccgatatcgaggagatacggccatccagcgttgtgtcaaagaagggctacctacactttaaggagcccctgtacagtaattgggcaaagcatttcgtggtcgtgagaagaccatacgttttcatttataattctgacaaggaccccgtggaacgagggatcatcaatttgagcactgctcaggtggagtacagtgaggatcagcaagcaatggttaagacgcctaacactttcgctgtctgcacaaagcacaggggggttttactgcaagccctgaacgacaaggatatgaacgactggctttatgcattcaacccgctcctcgcgggtactattaggcctggtcacctggcttctgagataatccgggaagacaaatcagtgagtttttcatgccaata

SEQ ID NO: 227821 - DNA, 5471 bp, synthetic construct
  misc_feature 1..5471: note = Description of Artificial Sequence: Synthetic coding sequence
  source 1..5471: mol_type = other DNA
atgagcggagctagcgtgaaagtggcagtgcgagtgcgaccgtttaattctagggagacaagcaaagagtccaaatgcatcattcagatgcaaggcaactcgacatccatcattaaccctaagaacccaaaggaagcacccaagtcttttagcttcgactattcttattggtcgcatactagtcccgaagatccctgtttcgcttcacaaaaccgggtatacaatgatatcggcaaggagatgcttctgcatgcgttcgaagggtacaacgtttgcatttttgcttacggccagacaggagctggcaagagttatacaatgatgggaaaacaggaggaaagccaggctggtatcataccacagctgtgtgaagaactatttgaaaagatcaatgataattgcaatgaggagatgtcctattcagtagaggtgtcttatatggagatctactgtgagagagtgcgggacctgcttaaccctaaaaacaaggggaacttgcgcgtgcgcgagcatccgctccttggtccttatgtcgaagatcttagtaaattggccgtgacttcttacacagacatcgcagacttaatggatgctggcaataaggctcgcactgtcgctgctacgaacatgaacgagactagctcccgcagtcacgcagtgttcaccatcgtgttcacgcagaaaaagcacgataacgagactaacctttcgaccgaaaaggtctccaagatctctctggttgatctggctggcagtgagcgtgcagatagcactggagccaaaggaacccggctcaaggaaggagcaaacattaacaagagcctgacaactctgggcaaggtgatttcagctcttgctgaagtggacaactgtacctcaaagagtaagaagaagaagaagaccgactttattccttatcgagattctgttctcacatggctgctgcgcgaaaatctgggaggcaattctcggactgcgatggtggccgctcttagccccgcagatattaattacgatgagactctatcaactcttcgctatgccgacagagctaagcagataaagtgtaacgctgtgatcaatgaggaccccaatgccaagttggtccgtgaattgaaagaggaagtgactcgtctaaaggacctgctccgcgcacaggggcttggggatatcatcgatatcgaccccctgatcgacgactactctgggagcgggtctaagtatttgaaagactttcagaacaacaagcatagatacctccttgcctctgagaaccagcgccctggccatttctcaacagcttccatgggtagccttacctctagtccttctagttgtagcctgagctcccaggttgggttgacctcggtgacgagcatacaagaacgtataatgtccacccccggtggggaagaggccatagagagattaaaggagagtgagaaaatcatcgcagagctgaacgaaacttgggaggaaaagttgcgaaaaacagaagctatccgcatggagagggaagcactccttgctgagatgggggtagcgattcgagaagatggcggtacccttggcgtttttagcccaaagaagacaccccatctagtgaatctcaacgaagatccactgatgagcgaatgcctgctttattacattaaggacggcataacacgggtgggccaggcggacgctgagcgacgacaggatattgtacttagcggcgctcacatcaaggaggagcattgcatatttagatctgaacgttcgaactctggagaggtgatagtgaccctcgagccctgtgagcgctctgaaacatatgtgaatggaaagagagtctcgcagcccgtccagctccggtccggaaaccggattatcatgggtaaaaaccatgtgttcagatttaaccaccccgagcaagctcgggctgagagagagaagacaccgtcagcagagacccccagtgagcccgtggactggacctttgctcagcgcgaattgctcgagaaacagggcattgatatgaaacaggagatggaaaaacgattgcaggagatggaaattctgtacaagaaagagaaggaggaggctgatctgctactggagcaacagagattggattacgaatctaagctccaggcgctccagaagcaggtcgagactagaagccttgccgctgagacaactgaagaagaggaggaagaagaggaagtgccatggacacagcatgaattcgaactggcccagtgggccttccggaaatggaaaagccaccagttcaccagcttgcgcgatctgctgtggggcaatgccgtttatctaaaggaagccaatgcaatatctgtggagctaaagaagaaggtccagttccaattcgtcctgttgacagacactctgtattcccccttgccccctgagctcttgccaactgagatggaaaagacacacgaagatcgcccattcccgaggaccgtggtcgcagtcgaggtacaggacctgaaaaacggcgctacacactactggtccctggagaaactaaaacagagactcgatctgatgcgggaaatgtacgaccgcgctggtgagatggcctcttccgcacaggacgaaagcgagacaacggtgacaggtagtgatcctttctacgatcgatttcactggttcaagctagtaggatcgtcccccatatttcacggctgtgtcaatgagcgattagccgacaggactccaagcccgaccttcagtacagctgactctgacattactgagctggcagacgaacagcaggatgaaatggaggactttgatgatgaggccttcgtcgacgacgccggttctgacgctggtaccgaagagggctctgacctattctccgacgggcacgacccattctacgacaggtccccatggttcattctggtgggacgtgcctttgtctacctgtccaacttgttgtatcctgtcccactaatacaccgcgtggcgatcgtctctgagaagggagaggtacggggttttcttagagtagctgtgcaggccatcgctgcggatgaagaggcccctgactacgggagcggtattcgccagagtggcaccgctaagatttcctttgataatgaatacttcaaccaatcagatttttctagcgtagctatgactcggtccggcctgtctctcgaggaactgcggatcgtggagggacagggccagagttctgaggtcatcacgccccctgaggagataagcagaatcaatgacctggacttgaaatctagcactctgcttgacggtaagatggtcatggaggggtttagtgaggagattggcaaccatttaaaacttgggtccgctttcaccttccgcgtcacggtgttacaggccagtgggattttgccggaatatgctgatattttctgtcagttcaatttcctccataggcatgatgaagccttttcaacggagcctttgaaaaataacggacgaggatcgccactcgccttctatcatgtgcagaacatcgccgttgaaatcaccgaatctttcgtcgactatatcaaaactaagcctattgtgtttgaagtgtttggccattaccagcagcaccctctccacctgcagggccaagagcttaattcccctccgcagccctgtcgcagattctttccgccaccaatgcctctgagcaagcctgtgccggcaaccaagttgaacactatgagcaagaccagtttgggccaatctatgtcgaagtatgatctgttggtgtggttcgaaatatctgagctggagccaactggtgaatatatcccggcagtggtggaccacaccgcagggttaccatgtcagggcacatttttgctacaccaaggtattcagagaagaataacagtcactataatccacgagaaaggatccgagctccactggaaagacgtccgggagctggtggtcggtcgcattcgtaataaacccgaggtggacgaagccgcagtggacgctattctgtcactcaacattattagcgctaaatacctgaagtccagtcataattcgtcaagaacattttacagatttgaggcagtatgggactcctcattacacaactccctgctactgaatagggttactccctatggagaaaagatctacatgaccctctccgcctatctggagctggatcattgcatacagcctgctgtgataacaaaggacgtctgcatggtattctattcacgagacgccaaaatttctcctcctcgctcgctgcgctctttgtttggaagcggatattccaagagtccagactcaaaccgggtgaccggtatctacgagcttagcctgtgtaagatgagcgacacgggttcgcccggaatgcagaggcgcaggaggaagattctagatacttctgtcgcgtacgttagaggcgaggagaatttggccggatggaggccacggggagatagcctcattcttgagcaccagtgggaattagagaagttagagcttttgcacgaggtcgaaaaaaccaggcatttcctattacttagggagcggctcggtgattcaattccaaaaagtctgtctgattctctgtcaccatctctgagctctggcactctctcaacctctactagtatttcctcccagatctctaccacaacgtttgagagcgctattacaccatctgagtcgagtggctatgacagtggagacatagagtcattagtcgacagagaaaaggagttggcaaccaagtgtttgcaactccttacgcacacctttaaccgggagttttctcaagttcacgggtctgtaagtgactgcaagctctcagacattagtccaatcggccgagatccaagcgaaagctccttttcctcagccacgcttacaccctcaagcacctgcccttcgcttgtcgattctagatcaaacagtctggaccagaagacccctgaagcaaattctagggcatccagcccttgccccgaattcgagcagttccaaattgtgcctgctgtggaaacaccctatctggctcgggctggaaaaaatgagtttctcaatctggtacccgatatcgaagaaatcagaccgtcctcagtggtcagcaagaagggctacctgcactttaaagagcctctgtactctaactgggcaaaacattttgtcgtggtgaggaggccctatgtgttcatctataattccgataaggaccccgtggagagaggcattatcaatctgagcacagcacaggtagagtactctgaggatcaacaggccatggtcaaaaccccgaataccttcgccgtttgtacaaaacatagaggcgtgctcctccaagcccttaacgataaggatatgaacgactggctctatgctttcaatcctctgcttgctggaacgattcgcccaggacacctagcctccgagatcatcagggaggacaaaagtgttagtttcagctgccagta

SEQ ID NO: 227822 - DNA, 3462 bp, synthetic construct
  misc_feature 1..3462: note = Description of Artificial Sequence: Synthetic coding sequence
  source 1..3462: mol_type = other DNA
atgagcggtgcgagcgtgaaagttgctgtgagagtgcgacctttcaattcccgagaaactagcaaggaatcgaagtgcatcattcagatgcaaggcaactcaacgagtatcattaaccccaaaaatcccaaggaagccccaaagagcttcagctttgactacagttactggtcacatacaagccctgaggatccctgtttcgcttcacagaatagggtatataacgacataggtaaggagatgctcctgcacgcgtttgagggctataatgtatgcatctttgcctatgggcagactggagccggtaagtcatatactatgatgggcaagcaggaagagtcgcaagcaggtataatcccccagttatgtgaggaactctttgagaagattaacgataactgcaatgaagagatgagctattctgtagaagtgtcttacatggagatctattgtgaacgggtgcgcgatttgctgaatcccaagaataaaggcaacttgagagtgagagagcatcccctgctgggtccttacgtcgaagacttgtccaaactagcagttacatcttacacagatatcgccgacctgatggatgcgggtaacaaggcacggacggtcgctgccactaacatgaacgaaacatcctctcgaagccacgccgtcttcaccattgtgttcacacagaagaagcacgacaatgaaacaaacctaagcaccgagaaagtaagcaaaatttccttggttgatctggctggaagcgaacgggctgattccacaggcgcaaaagggacaagactgaaagagggggcaaatatcaacaaatcgctcaccacattaggcaaggttatttcagcactggcagaggttagtaagaaaaagaagaaaacggattttatcccctacagagattccgtgctgacctggttactgcgggagaatcttgggggaaatagcaggaccgctatggtggctgccctttctcctgccgacatcaactatgatgaaaccctcagtaccctgcgatacgctgatcgcgctaagcaaatcaaatgtaacgcagttatcaatgaagacccaaatgccaaactggtcagagagctgaaagaggaggtaaccaggcttaaggatctgctgcgagcacaaggtttgggcgatataatagatacctcaatgggtagtctgacttcatccccctcatcatgctccctcagttcacaagtgggcctcacgagcgtcacctccatccaagagaggatcatgtccacgcccggtggggaggaagcaatcgaacgcctgaaggagagcgaaaagatcatcgccgagttgaacgaaacatgggaggagaagttacgcaaaactgaagccataaggatggagagggaggccctgcttgctgagatgggggtggctattagggaagacggagggacactgggggtgttctcaccaaaaaaaaccccacatttagttaatctgaatgaggatcccctgatgagcgagtgtttactgtattatattaaggatgggatcactagagtcggtcaggcagacgcagagaggcgccaggatattgtgctgagcggagcccatatcaaggaagagcactgtatatttagatcagagcggagcaattctggggaagtgattgtgacccttgagccttgtgagcggagtgagacatacgtgaacgggaagagagtgtctcaacctgtgcagctgagatccggcaacagaatcataatgggaaagaaccacgtcttccggttcaaccaccccgagcaggccagagctgagagggaaaaaacgcccagtgctgaaactcccagcgagcctgtggactggaccttcgctcagcgagaactgctggagaagcaaggcattgatatgaaacaggagatggaaaagcgccttcaagaaatggagatcctttataaaaaggagaaggaagaagccgacctgttgctggagcagcagcggcttgatgccgatagtgactccggtgatgacagcgacaagcgatcctgcgaggagtcttggaagttgatcacatcactcagggagaagctgcccccatcaaagctgcagacaatcgtaaagaaatgcgggctcccatcatcggggaaaaaacgtgagccaataaaaatgtaccaaatcccccagaggaggcgcctctcaaaggattcaaaatgggtgactatttcagatttgaaaatccaggcggtgaaggaaatctgctacgaagtggccctaaacgacttccgtcactctcgccaggagatagaagcactcgccatagtcaaaatgaaagagttgtgcgccatgtacgggaaaaaagacccaaatgagagagacagttggagggcagtcgctcgtgacgtgtgggacacagtcggagtgggggatgagaaaattgaagacgtcatggctaccggaaagggctctactgacgtcgacgatcttaaggtccacattgacaaactggaggacattctccaggaagtgaagaaacagaacaatatgaaggacgaagagattaaggtgctgaggaataagatgctgaaaatggagaaagttctgccgcttatcggcagccaggaacagaaatcacccggatctcataaggccaaagagcccgtgggagccggtgtgtcctccaccagcgagaacaacgtgtccaagggcgataacggggagctcgcaaaagaggaacgcgtgtcccaactcatgaacggtgaccccgcatttcgaaggggacggttgcggtggatgcggcaggagcaaatcaggtttaaaaacctccagcagcaggagattacaaagcagctgagaaggcagaacgtgccccaccggtttatcccaccagaaaatcggaagcctcgcttccccttcaagtcaaacccaaaacacagaaactcctggtcacccggaactcacataatcatcaccgaagacgaagtcatagagctgcgcatccccaaggatgatgaagccaggaaggggaacaaggaggagagccaggagaagggagggaaaggagcctttaaagacccacagttcccttggggatcacaaggcatgcggtcccaggatcacatccaagtctccaagcagcacatcaacaaccagcaacagccccctcagcttagatggcgttcaaacagccttaacaacgggcagcctaagtcgacaagatgccaggccagcgcatccgccgagtctctgaacagccactcagggcacccaacagccgacgtgcagaccttccaggccaagaggcatattcaccaacatagacagtcctactgcaattataatacaggtggacagctagagggcaatgctgccacgagttatcagaagcaaacagataagccttcacattgcagtcaattcgtcactccacctcggatgcggagacagtttagcgccccaaatctgaaggcaggtcgcgaaactacggtgtag

SEQ ID NO: 227823 - DNA, 5450 bp, synthetic construct
  misc_feature 1..5450: note = Description of Artificial Sequence: Synthetic coding sequence
  source 1..5450: mol_type = other DNA
atgtctggcgcatccgtaaaggtggcagtgagagtgagacccttcaatagtcgcgaaacttccaaggaaagtaagtgtatcatccagatgcagggtaatagcacgtcgatcatcaaccccaaaaatccaaaagaggccccaaagagttttagtttcgactattcatactggagccatacatctccagaggacccatgcttcgccagccagaatagagtctataatgatataggaaaagaaatgctgctccatgcctttgagggatacaatgtatgcatctttgcctacggacagaccggggctgggaaatcctacaccatgatgggaaagcaggaagagtcccaagccggaataatcccacagctgtgcgaggagctgttcgagaagatcaacgataattgcaacgaagaaatgagctactctgtggaggtgagttacatggaaatctactgcgagcgggtaagggacctgctgaatcctaaaaacaaaggtaacctgcgggtccgggaacatccactgctgggtccatacgtagaggacctcagcaaattggctgtcacttcttatacagacatagcagatctgatggatgcgggaaataaagctagaacggttgccgctaccaatatgaacgaaacctcatcaagatcccatgccgtctttaccatcgtctttactcaaaaaaagcacgataatgaaactaacctttctactgaaaaggtgtccaagatctctttggtggatcttgccggatctgaacgagccgacagtaccggcgctaaagggacccgccttaaggagggggcaaatattaacaagagtctgacaaccctgggcaaagtgatctccgctcttgccgaggtggacaactgcacctccaagagcaagaagaagaagaaaacagattttataccttaccgcgattccgtccttacgtggctgctacgtgaaaacctcggcggtaattccaggacggccatggtagcagctctgtctccagctgatatcaattacgatgagaccctgtcaactctgcgttacgccgacagggccaagcaaatcaagtgtaatgccgtcattaatgaggaccccaatgcaaaactcgtgagggagctgaaggaagaagttactcggctcaaagacctgctgagggcccagggactgggcgatatcattgatatagatccattaattgatgactactccggaagcggaagtaaatacttaaaggactttcaaaacaacaaacatagatacttgctggcatctgagaaccaacgcccaggacacttttcaaccgcatctatgggtagcttgacatcttcacccagttcatgtagtctcagctctcaagtggggctcacttcagtcacctccatccaagagcggataatgagcacacctggtggcgaggaagccattgagcgacttaaagagtcagaaaaaatcattgctgagctgaacgaaacttgggaagagaaactgagaaagaccgaggcgatacgcatggaacgtgaagccttgctggccgaaatgggcgtggctattagggaggatgggggtacacttggtgtgtttagtccgaagaagactccccacctcgttaacctcaatgaggacccactgatgagtgagtgtctgctgtactatattaaggacgggattacccgggtgggccaggcggatgcagagcgcagacaggacattgtcctgtcaggcgcacatattaaagaagagcattgtatattcagaagcgaacgaagcaattccggggaggtcattgtgaccctggaaccttgtgagagatccgaaacttacgtgaacggtaagagggttagccagcctgtgcagcttaggtctggcaataggattattatggggaagaaccacgtgtttagatttaaccatccggagcaagcccgtgctgagagagaaaagaccccctccgctgaaaccccgagcgaacccgtcgattggacatttgctcagcgggaactactggagaagcaaggaattgatatgaagcaggagatggagaagaggctgcaggaaatggaaatcctgtacaaaaaggagaaagaggaagccgacctgctcttggagcagcaacggctcgactacgaatccaagctgcaagctttgcagaagcaggtagagacccgatctctcgccgctgagactactgaggaagaagaagaggaagaagaggtgccctggactcagcatgaatttgagctggcgcagtgggcatttcggaagtggaagtcacatcagtttacttccctgcgagatctgctgtgggggaatgccgtgtaccttaaagaagccaatgccatctccgttgaactgaaaaaaaaagtacaattccagttcgtgctgctaacagacaccctgtatagcccgttgccccctgagctgctccctacggagatggagaaaacacatgaggatcggcctttcccaagaaccgtggtagccgtagaggtacaggatctcaaaaacggagcaactcactattggagcttagagaagctgaagcaacggctcgatttaatgcgtgaaatgtatgatagggcgggtgagatggcctcctcagcacaggacgagtccgagaccaccgtgaccggctccgaccctttttatgatcggttccattggtttaagctggtcggctccagcccgatcttccatgggtgcgttaacgagagactggcggatcgaacaccaagccccaccttctctaccgctgactccgatattaccgagttggcagatgaacaacaagacgaaatggaagattttgatgatgaagcatttgtggacgatgcaggatctgacgcaggcacagaagaagggtcagacctgttctctgacggacacgaccccttttacgaccgcagcccatggttcatcctggtcggacgggcattcgtctacctgagcaacctgctgtacccagtgccgctcatacaccgtgtggctattgtgtcagagaaaggtgaagtcagggggttcttacgagttgccgttcaggcaatagcggctgacgaggaggctcccgactacggctcaggaattagacagagcgggaccgcgaaaatttcttttgacaatgaatatttcaaccagagtgacttttcctctgttgctatgacaaggtctggactgagcctcgaagagctgagaatcgttgaggggcagggtcagtccagtgaagtaattactcctcctgaggagatttccagaattaacgatctggatctcaagtcatctacactcctggatgggaaaatggtgatggagggcttctccgaggagattggcaaccacctgaaactgggctctgccttcacgttccgggttactgtgctgcaggcctccggcattctgccagagtacgccgacattttttgtcagttcaactttctccatcgccatgatgaggcttttagcaccgagccactgaagaataatgggagagggtcccctctggctttctatcatgtacagaacatcgcagtagagataaccgaatcctttgtggattacataaagaccaagcctatcgtctttgaggtcttcggccattatcagcaacacccactgcacctgcaggggcaggaactgaacagccccccacagccatgtcgtcgattttttcccccacctatgcctttgagcaaacccgtgccggctaccaaactgaataccatgtcgaagaccagcctcggccagtccatgagcaagtacgacctactcgtgtggttcgaaatctctgagctggagcctaccggcgagtatatcccagccgtggtcgatcacacagctgggctcccgtgtcagggtacttttttgttacatcaaggaattcaacggcgaataacagtgactatcattcacgaaaaggggagcgaactgcattggaaagacgtgagggaactggtcgttggtcgcattcgcaataagcctgaagttgatgaagctgcagtcgatgctatattgtcactgaatataatctctgctaagtacctcaagagttcgcacaacagctcacgaacgttctatcgattcgaggccgtttgggattctagtctgcacaacagtctgctcctgaacagagttaccccttacggcgagaaaatttacatgacactttccgcttatctcgagttagatcactgcattcaaccagccgtcatcacgaaggacgtatgcatggttttctactctcgtgatgcaaaaatttcaccaccaaggtcattaaggagcctgtttggctcagggtactccaaatccccagactctaatcgggtcacggggatttacgaactgtcactctgcaaaatgagcgacacaggaagtccaggcatgcaaagacggagaagaaaaatcctagacacttctgttgcatacgtaaggggggaagaaaacttggcaggatggcggccacgaggtgactctctcatcctcgagcatcagtgggaactcgagaagttagaattactgcacgaggtggagaagacccgacatttccttctcttgcgggaacgcttgggagatagcatacctaagtcactcagtgattccctcagtccttctctttccagcgggacgctcagcacgtctacatctatatcctcccagatctccaccaccaccttcgagtccgcaattactccttccgagtcatcgggatatgactcgggggacatagagtcactggtggatagagagaaagagctcgcaactaagtgcctgcagctgttaacccatacatttaatcgcgagtttagtcaggtccatgggtctgtgtcagattgtaaattgtctgacatttcccccattggtcgagaccccagcgaaagcagtttctcctcagcgacactgacaccctcttctacatgcccatccttggtagactcccggtccaattcgcttgatcagaagacaccagaggctaacagtcgagccagctccccgtgtcccgagttcgagcagtttcagatagtcccagccgttgagaccccatacctggctagagctggtaaaaacgaattcctgaacttagtgccagacattgaggaaattcgccctagcagtgtagtttcaaaaaagggctacctgcatttcaaagaaccgctgtacagcaattgggctaagcactttgttgtggttcgtcggccatatgtgttcatttataactccgacaaagatcctgtggagcgtgggattatcaatctgtccactgcccaggtagagtacagcgaggatcagcaggcaatggtgaagacacccaataccttcgccgtgtgtacaaaacaccgaggcgttctgctgcaggcactgaatgacaaagatatgaacgattggctgtacgcttttaaccccctgctggccggtaccatccgctccaagttgtcaaggagatgcccgagccagagtaagtatta

SEQ ID NO: 227824 - DNA, 3462 bp, synthetic construct
  misc_feature 1..3462: note = Description of Artificial Sequence: Synthetic coding sequence
  source 1..3462: mol_type = other DNA
atgagtggagccagtgtcaaagtcgcggtccgcgtcagacccttcaacagtagagagacttctaaagaatcgaagtgcataattcagatgcaaggaaattctacctcaattatcaatcccaaaaatcccaaggaagcacccaagtctttcagcttcgattacagctactggtctcatacctccccggaggatccttgtttcgcttcccagaacagggtatacaacgacatcggaaaagagatgctactgcatgctttcgaggggtacaacgtgtgtatctttgcatacggtcagaccggcgcaggaaagagttacaccatgatgggcaaacaggaggagtctcaggccggaatcattccgcagttgtgcgaggagctgttcgagaaaatcaacgacaactgcaacgaagagatgtcatattctgtcgaggtctcatacatggagatctactgtgaaagagtgcgagacttgttaaaccctaaaaataaaggtaacctcagggtacgcgagcatccactgcttggtccttatgttgaagatttatcaaagctcgctgtgaccagctacaccgatatcgctgatttgatggatgcgggaaataaggcccgaacagtcgcagccaccaatatgaacgagacctcatctagatcccacgcagtgttcacaatagttttcacccaaaaaaaacacgacaacgagactaatctgagtaccgagaaggttagtaagataagtttggtggatcttgctggatccgagcgcgctgactcaaccggcgctaagggaacccgccttaaagaaggggctaacatcaataagtctctgaccacactcggtaaagtgattagcgcgctcgccgaggtgagcaagaaaaagaaaaagacggacttcatcccctaccgcgactcagtgcttacctggcttctgcgcgaaaacctcgggggaaatagtcgcacagctatggtggcagcactgagccccgcagacatcaactatgatgagacactgtcaaccttgagatatgcggatcgcgcaaagcagatcaaatgcaacgccgtgattaacgaggaccccaacgcaaaactggtaagggagttgaaggaggaagtgaccagattgaaagacctgctgcgggctcagggacttggagatattatagacacctccatggggagcctgacatcttctccttctagctgctcgctgtctagccaagtgggactgacaagcgtgacatccatacaggagaggattatgtccactcctggaggggaggaggctatcgagcgattgaaggaaagcgagaagattatcgcggagctgaacgaaacttgggaggagaaactccgcaaaaccgaggccattcgcatggagagagaagctttgctggccgagatgggagtcgctatccgggaagatggtggtaccttgggcgtgttcagtccaaaaaagacaccacacctggtgaatcttaacgaagatccactgatgtctgaatgcttgctgtactacattaaggatggcattaccagggttgggcaggccgacgccgaacgccgacaagacatcgtgctctctggagcccacattaaagaagaacactgcatattccggtccgagcggagcaactcgggagaggtgattgtcactctggaaccgtgcgaacgatcggagacctatgttaatggcaaaagagtcagccagcctgttcagctccggagtggcaaccggataataatgggcaagaatcatgtttttagattcaaccaccctgagcaggccagagccgaacgtgagaaaacgccatctgccgagacgcctagtgaacctgtcgactggacgtttgctcaacgggaacttcttgagaagcagggtattgacatgaagcaagagatggagaagaggctgcaagaaatggaaattctctacaaaaaggagaaggaggaggcagatctgctgttagagcaacagcgtttggacgctgactccgattcaggggatgactctgataagcgcagttgtgaagagtcttggaaactgatcacctcactgcgggagaagctgccccctagcaaactgcagaccatcgttaagaaatgcggcctccccagctcaggcaaaaagcgtgagcccataaagatgtatcaaattccccagcggcgacgcctgagtaaagactcaaagtgggtgactatcagtgacctgaaaattcaagcggtaaaagagatctgttatgaggtagctttaaatgatttccgtcatagccggcaggagatcgaggcgctggccattgtgaagatgaaggagctgtgcgcgatgtacggcaaaaaagaccccaatgaacgagattcttggcgcgctgtagctagagatgtgtgggatacggttggcgtcggagatgagaagatcgaggacgtgatggccacaggaaagggttctacagacgtcgacgaccttaaagttcacattgataagctggaggacatcctccaagaggtcaaaaagcagaacaatatgaaggacgaagaaattaaggtgctgcggaataagatgctcaagatggaaaaggttcttcctttaataggctcacaggagcagaagtccccgggaagccacaaggccaaggaaccggtaggagctggtgtctcttcaacctccgaaaataacgttagcaagggtgataacggtgaattggctaaagaagagagggtgagtcagctcatgaatggcgatcccgctttcagacgtgggaggcttaggtggatgagacaggagcagatcagatttaagaatctgcagcagcaggagatcacgaagcaactcagaaggcagaatgtgccccaccgctttatcccccctgaaaatcggaaacccaggtttcctttcaagtcaaatcccaagcaccgtaactcctggtccccgggaacgcatattataatcaccgaagacgaggtgatcgagcttagaatccccaaggatgacgaggcccgaaaaggaaacaaagaggagtcgcaggaaaaaggcggaaaaggggctttcaaagatccccagtttccatggggttcccaggggatgcggtctcaggaccatattcaggtaagcaagcagcacattaataaccagcagcagcctccccagctgagatggaggtccaactctctcaacaacgggcagcccaagtccactcggtgtcaggctagtgccagcgctgaaagcctcaactcccactctggccatccaaccgctgatgtccaaactttccaggccaaacgccacatccaccaacaccgtcagtcgtactgtaattacaacaccggtgggcagcttgagggtaacgccgcaacttcgtaccagaagcaaactgataagccgagccattgctcccagttcgttacgcccccacgcatgcggagacaattttccgccccaaatctaaaggccggacgggagacaacagtgtag

SEQ ID NO: 227825 - DNA, 2673 bp, synthetic construct
  misc_feature 1..2673: note = Description of Artificial Sequence: Synthetic coding sequence
  source 1..2673: mol_type = other DNA
atgagccaaggcatcctgagcccacccgctggcctgctgagtgacgatgatgtagtcgtctctcccatgtttgagtcaacggcagctgacctgggatcagtggtgcggaaaaatctgctttcggactgttccgtggtaagcaccagtctggaggacaagcagcaggtacctagcgaagacagtatggaaaaggtaaaggtgtatctccgggtgagacctctcctgcccagcgagctggagcgccaggaagaccaaggatgtgtgcggattgagaacgttgagacattagtcctgcaggctcccaaggacagcttcgcactgaagtcgaacgagagaggaataggccaagccacacatcgcttcacattcagtcagatcttcggcccagaagtgggccaggcttccttcttcaacctgacagtgaaagagatggttaaggacgttttgaaggggcagaattggctgatttacacctatggagtaacgaattcaggaaagacgcacactatacagggaacaattaaggatggaggaatccttcctcgttcgctcgccctgatctttaactcattacaaggccagctccatcctacccctgacctgaagcctctcttgtcaaacgaagttatctggttagattcaaaacaaattcgacaggaggagatgaaaaagctttcattgctaaatgggggattgcaggaagaggaactgtcaacctctctgaaacgtagcgtgtatattgagtctcggattggaacatcgaccagctttgatagtgggatcgcagggttgtcctccatctcccagtgcacatcaagttcgcagttagacgagaccagtcatcggtgggctcaacccgatacagctccccttccagtgcccgcaaacatccgattttccatctggatttcttttttcgagatatataatgagctcctgtacgaccttcttgagcccccaagccagcagaggaaaaggcagactctgcggctttgcgaagaccagaacggaaatccatatgtcaaggacctgaattggattcatgtgcaagacgccgaggaggcctggaaactgcttaaagttggaagaaagaaccaaagttttgcctcaacacacctaaatcagaattccagccgttctcacagcattttctcgattaggatcttgcacctccagggcgagggcgacattgtccccaagattagcgaactttcactgtgcgacctggcaggtagtgaacgctgcaaagaccaaaaatcgggagaaaggctaaaggaagctggaaacatcaatacatcactgcatacactggggaggtgcatcgccgcacttcgacagaatcagcagaatcggagcaagcagaatctagtgcccttcagggactctaaacttacacgcgtatttcagggattttttacaggaagagggaggtcctgtatgattgttaacgtgaacccctgcgcctccacttatgacgagacattgcacgtcgctaagtttagtgcaattgcatctcagctggtacatgcgccacctatgcagttaggtttcccgtccctgcattccttcattaaggaacactcacttcaggtgtccccaagccttgagaagggagcaaaagcggacacaggattagatgatgacatcgagaacgaggcggatatcagcatgtatggcaaagaggagttactccaggtggttgaggctatgaaaaccctcctgctgaaggaacgccaggagaagctgcagctcgaaatgcacctgcgtgacgagatttgtaacgaaatggtcgagcagatgcaacagcgggagcagtggtgctctgagcacctcgatacccagaaagagctcctcgaggagatgtacgaggaaaagcttaacatacttaaagagagcttaacttctttctaccaggaagagatccaggaacgggacgagaaaatagaggaattggaggcactcctccaggaagcccgacagcagagtgtggcacaccagcagtctggtagtgagctggccttgagaagatctcagcggctggcagcctccgcgagcactcagcagctacaagaagtgaaggcaaagctgcagcaatgtaaggcagaacttaattctaccactgaggaactccataaataccaaaagatgctcgagcccccaccctcagccaaaccattcacgatcgatgtcgataaaaagctggaggagggacaaaaaaacatccggttgctgcgaactgaattgcagaagctgggcgagtcgcttcagtccgcggagcgggcatgttgtcatagtacgggggctggtaaacttcgacaggctctgaccacctgtgacgacatcctgatcaaacaagaccagacactcgccgaactccaaaataatatggtgcttgtaaagcttgacttgcggaagaaagcagcctgcattgccgagcagtaccataccgtgcttaagctgcaaggccaagtgtccgccaaaaaaagactcgggactaatcaggagaatcagcagcccaatcagcagccgccaggcaagaagcccttcctcaggaatctcctaccgaggacaccgacttgccagagttctactgattgttccccttatgcaagaatcctccgttcccgcaggagtcctctcctcaaatccggaccttttggcaagaagtactag

SEQ ID NO: 227826 - DNA, 678 bp, synthetic construct
  misc_feature 1..678: note = Description of Artificial Sequence: Synthetic coding sequence
  source 1..678: mol_type = other DNA
atgtctcaaggcatactgagtcctcctgcgggactgctcagcgatgacgacgtcgtcgtcagtcccatgtttgaatccactgccgcagacctaggaagcgtcgttcgcaagaatctgttgtctgattgctccgtggtgagtaccagcctagaggataagcaacaggtcccttccgaagattccatggagaaggtgaaggtctacctccgcgtgcgccctctcctgcctagtgagttggaacgacaggaagatcaaggttgcgtgcgtatcgaaaatgttgagacccttgtccttcaggccccaaaggacagcttcgcattgaagtcaaacgaaagagggattggccaggccacccacaggttcaccttttcacagatttttggtccagaggttggtcaagcttcgttcttcaaccttaccgttaaggaaatggtcaaggacgtcctgaaaggacagaactggctgatctacacctatggcgtgacaaacagcggcaaaacccacaccatccaggggactattaaggacggtgggatcctgccacgaagcttagccctgattttcaattctctgcagggtcagctccacccaacccccgatctaaagccactgctcagcaatgaggtcatctggttggactcaaagcagattagacaagaagagatgaagaagttatag

SEQ ID NO: 227827 - DNA, 2619 bp, synthetic construct
  misc_feature 1..2619: note = Description of Artificial Sequence: Synthetic coding sequence
  source 1..2619: mol_type = other DNA
atgagccaaggtatcttatccccccctgcaggcctgttgtctgacgacgacgttgtggtgtcacctatgtttgagagtactgctgcagacctcgggtcggtggtcaggaagaatctcttaagcgactgctccgttgttagtaccagcctggaagataagcagcaagttccatctgaggactctatggaaaaagaagaccaaggttgcgtacgaatagaaaatgtggagacacttgttttgcaggcacccaaggattcttttgccttgaagtccaatgaacgaggtattgggcaagctacacaccgttttacattttcacagattttcggtccagaggtcggccaggcctcattcttcaacctgactgtgaaggagatggtcaaagacgtactaaaaggccagaattggttaatatacacgtacggggtgacgaattctgggaaaacccatacaatccagggaaccatcaaggatggcggtatcttaccaagatcgctggccctcatcttcaactctctgcagggccagctgcacccaaccccagacctgaagccactgctgtccaacgaggtgatttggctagattctaagcagatccgtcaagaagaaatgaaaaaactcagtctgttgaatgggggactccaggaggaggagctgtctacaagcttgaaacggtccgtgtacatcgagagccggatcggcacgagcacgagcttcgacagcggcatcgccggtctttcctccatttcacagtgcacctcaagctcccagttggacgagacttctcaccgctgggcacagcctgatactgctcccctcccagtgcccgctaacatccgtttttctatttggattagcttttttgaaatctataatgaactcttatacgacctgctagaacccccttcccagcagcgaaaaaggcaaacactgcgactatgcgaagatcagaatggcaatccgtacgtaaaggacctgaactggatccacgtgcaggacgcggaagaggcgtggaagctgttaaaggtggggagaaagaatcagagctttgcatctacccatctgaatcagaacagtagccgatcccactccattttttcaatccgcatacttcatctgcagggggaaggcgacattgttcctaagatttctgagctgtccttgtgcgatttggcgggatccgagcggtgcaaggatcagaagagtggagagaggttgaaagaggcaggcaacattaataccagtttacacaccctggggcgttgtattgcagctcttagacagaaccagcagaatcggtccaaacaaaacctggtaccatttcgcgactctaagctaacccgtgtcttccagggcttctttaccgggagaggacggagctgcatgatcgttaacgtgaacccatgtgcctcaacctatgatgagacattacatgtcgcaaagttctcggctatcgcctctcagctggtgcatgctccccctatgcagttaggatttccatccctacattcttttataaaggagcactccctgcaagtgagtcccagcttggagaagggggctaaggctgataccggacttgacgatgacatcgaaaatgaagcggatatttccatgtacgggaaggaggagcttcttcaagtcgtcgaggctatgaaaactctgcttctgaaagaacgccaggaaaagctccagctcgagatgcacttgcgagatgaaatttgtaacgagatggttgagcagatgcagcagcgggaacagtggtgcagcgagcacttggacacacaaaaggagctactcgaggagatgtacgaagaaaaactcaatattctgaaagaatcacttacatccttttaccaggaagaaatacaggagcgagacgagaagatcgaggagttagaagcactgctgcaggaagcacgccagcagagcgtggcgcatcagcagagtggttcagagctcgccctgcggaggtcacagcgcctggctgcatcggctagtactcagcaactccaggaagttaaggcaaaattgcagcagtgcaaagccgagctgaactcaactacggaggagcttcataagtatcagaaaatgttggagcccccaccgagcgcgaagcctttcacgatcgacgttgataagaagctggaagaaggacaaaagaatatccgcttactgcgtaccgagcttcagaaacttggcgagagtctgcaaagtgccgaaagagcctgttgtcacagtaccggagcagggaaactcaggcaagctcttacaacgtgtgacgacattcttataaagcaggatcagaccttggccgaattacaaaataatatggtgctcgtcaagctggatctgcggaagaaggcggcttgtatcgccgagcagtaccataccgtgctcaaactccagggccaggtgagtgccaaaaagcgtctaggaacaaatcaggagaatcaacagccgaatcagcagcctcccggtaaaaaaccgtttttacgtaacctccttccgagaacacctacatgccagagcagcaccgattgctccccatacgcgcgaatactgaggagtcgcaggtctccactactgaagagtggtccctttggcaaaaagtattag

SEQ ID NO: 227828 - DNA, 480 bp, synthetic construct
  misc_feature 1..480: note = Description of Artificial Sequence: Synthetic coding sequence
  source 1..480: mol_type = other DNA
atgtcacaaggcatcctgtcaccgcctgccggtctactgtcagatgacgacgtagtagtgagtcctatgtttgagtccaccgctgccgacctgggtagcgtcgtgagaaaaaacctcttgagcgattgctcagtagtgagcacttctcttgaggataagcagcaggtgcctagcgaggacagtatggagaaggtaaaggtgtaccttcgggtgagacctttactgcctagcgagctcgagcggcaggaagaccagggttgtgtgcggatcgagaacgtggagaccctggtgctccaggcacctaaggactccttcgcgttgaaatccaacgagagagggatcggacaggcgacacatagatttacatttagtcagatctttggacctgaagtcggacaggcaagcttctttaatctgactgttaaggagatggttaaggacgtgctgaaagggcagaattggctaatatacacttattag

SEQ ID NO: 227829 - DNA, 4884 bp, synthetic construct
  misc_feature 1..4884: note = Description of Artificial Sequence: Synthetic coding sequence
  source 1..4884: mol_type = other DNA
atgctcggtgcccctgacgagtcctcagtccgcgtggctgtcaggattagacctcaattggcaaaagaaaagattgaaggctgtcatatctgcacgtcagtgacccccggagagccccaggttttcctgggcaaagacaaggccttcacatttgattatgtgtttgacattgatagtcagcaagagcagatctatatccagtgcatcgagaaactgatagaggggtgcttcgagggatataatgccactgtgtttgcctatggtcaaactggcgctgggaaaacctataccatgggaacagggtttgacgtgaatatcgtggaggaagagctaggcatcatttcacgagctgtcaagcaccttttcaaatccattgaagaaaaaaaacacatcgccatcaagaatggactccccgctcctgacttcaaggtgaatgctcagttcctcgagctgtacaatgaggaggtcttggacttgtttgacaccaccagagatattgatgctaagtctaaaaagtccaacattcggatccatgaggactccaccggaggaatctacactgtgggcgtcacgacccgtaccgttaatacggaatcggagatgatgcagtgcctgaaactgggcgcactgtctaggacgacagcctcaacccagatgaacgtgcaatccagcagatcccacgcgattttcactattcacgtgtgtcagacgcgtgtgtgccctcaaatagatgccgataatgcgacggataacaaaatcatttcagagagcgctcaaatgaacgagttcgagaccctcaccgcaaagtttcattttgtggacctcgctggcagcgaacgccttaagcgcactggggcaacaggggagagggccaaggagggcatcagcatcaactgcgggctgctcgcccttggtaacgttatcagcgcgctaggcgataagagcaagagggccacccacgtaccttatcgagacagcaagcttaccaggctactgcaagattccctgggtggaaactcccaaactataatgattgcatgcgtcagtccgtcagaccgagactttatggagactttgaacacgcttaaatacgccaacagagccaggaatattaaaaacaaagtgatggtgaatcaggatagagccagccagcaaattaatgccctgcggtcagagataaccagattacagatggaactcatggaatacaagactgggaagcgcataattgatgaggagggggtagaatcaatcaatgatatgttccacgagaatgctatgcttcagaccgaaaacaacaacctgcgggtgcggatcaaggccatgcaagaaaccgttgatgcactgcggtccaggataacacagcttgtttccgatcaagccaatcatgtccttgccagggcaggcgaaggaaacgaggaaatttccaatatgatccactcctatatcaaggaaatagaagatctcagggccaagttgctggagtcggaagccgtaaatgaaaatctgagaaagaacctgaccagagctaccgcgagagccccttactttagcggctccagcacgttctcgccaaccattttatcctcagacaaggaaaccatcgagattatagatctggccaagaaggatctggagaagctcaagcgaaaggagaaacggaagaagaagcgcttgcaaaaactagaggaatctaacagggaagagagatccgtcgcaggtaaagaggacaacacagatacagaccaggagaagaaagaggaaaagggagtaagcgaaagggagaataacgagctcgaggtggaagagagtcaggaggtatccgaccatgaagatgaagaagaagaggaagaggaagaggaggacgacattgatggtggcgaatcaagcgatgagtcagattccgaaagcgacgagaaggcgaattatcaagccgaccttgctaacattacctgtgagatcgcgattaaacaaaaactgatagatgagcttgagaatagccagaagaggctgcaaaccctgaagaagcagtatgaagagaagctcatgatgctgcagcataaaattcgagacactcagttagagagggatcaagtgctccagaatctgggatccgtggagtcgtattccgaagaaaaggccaaaaaggttagaagcgaatatgagaaaaagctccaggctatgaacaaagaattacagaggttgcaggccgctcaaaaagagcatgccagactactaaaaaaccagtcccagtacgagaaacagttgaagaagctccagcaggatgtgatggagatgaaaaagactaaggttcgtcttatgaagcaaatgaaggaggaacaagagaaggcacgactgaccgagagccgcaggaatcgagaaattgctcaactgaaaaaagatcagcggaaacgcgatcaccagctgagactgctggaggctcagaaacgcaatcaggaggtggtgctccgaagaaaaacagaggaggtgacggccctgaggaggcaggtccgtcctatgtctgataaagttgccggaaaggtgactcggaaactcagttcaagcgacgcccctgcccaggacacaggctcatccgccgcagcagtggagacggacgcctctcgaacaggcgctcaacaaaaaatgcgaattcccgttgcaagagtgcaagccttgcccacaccagcaactaatgggaaccgtaagaaataccagagaaagggtttaacgggaagagtgttcatatcaaagacagctcggatgaagtggcagctgctggagaggagagttactgacattataatgcagaagatgactattagtaatatggaagccgatatgaatagactgctcaagcagcgagaggagctgactaaaaggagggagaagttgtccaaacggcgtgagaaaattgtgaaagagaacggagagggcgacaaaaacgtggccaacataaatgaggagatggaaagcttgaccgcaaacattgactatataaacgactctatctctgattgccaggccaacataatgcaaatggaagaggctaaagaggaaggggaaacgctggatgtaacagccgtgattaacgcatgcaccctgactgaggcacgctatctgctcgatcattttctgtccatgggaattaataaaggtctccaggccgctcagaaagaggcacagatcaaggttctcgaaggcaggctgaaacaaactgagattacatcggcaacacaaaaccaattactgttccacatgctgaaagaaaaggccgagctgaacccggagctcgacgccttgcttgggcatgcactccaggattttaaacactttttcgtggagaatgtagaagatagcactgatgaggatgcaccccttaacagtcccggtagcgagggttcgacccttagttccgacctcatgaagctttgcggtgaggtgaaacctaaaaacaaggcacggagacggactacaactcagatggagctgttatatgcggactccagtgagcttgcatctgacactagcaccggtgacgcatctctgcccggacctctgactcccgtggctgaggggcaggaaatcggtatgaacactgaaactagcggaacatcggcacgtgagaaggaattgagccctccgccaggcctgccctctaagatcgggtcaatctctcgccagagttccctaagtgaaaaaaagatccccgagccctcccccgtcaccaggcgcaaggcatatgagaaagccgaaaaaagcaaagcaaaggagcagaaacaatctgatgagagcgactcttccctgtcggaggtgcaccgcggaatcattaaccccttccccgcttccaaggggatccgcgcatttcctctacagtgcatccacatcgccgaggggcatactaaggcagtgctgtgcgtggattcaacagatgatctcttgttcacggggtctaaagatagaacttgcaaagtttggaatttggttactggccaggagatcatgtccttgggcggacatccgaataacgtggtctcagttaaatactgtaactacacttccttagtctttaccgtttcaacctcctatatcaaggtatgggacatccgcgatagcgcaaaatgcataagaaccctcacaagctcgggtcaggtaacattaggagacgcttgttccgcttccacctccaggaccgtggccatcccgtccggagaaaatcagatcaaccagattgccttaaaccccacaggcacgttcctatatgccgctagcggaaatgcagtgaggatgtgggatctaaaaaggtttcagagcacaggcaaactaaccggacatctcggccctgtcatgtgcttaaccgtagaccagatttcctctggacaggacctgataatcacaggcagcaaagaccactacatcaaaatgttcgatgtgaccgagggggctctcggaaccgtgagccctactcacaacttcgaaccaccccactacgatggaattgaagccttgaccatccaaggagacaatctcttcagtggtagtcgcgacaatgggattaagaaatgggacttaactcagaaggacctcctgcagcaagtcccaaatgcccacaaggactgggtgtgcgctctgggcgtcgtccccgaccatcctgtgctgctgagcggatgtcgcggaggaattttgaaggtgtggaacatggacacatttatgccggtgggagaaatgaaagggcacgattcacctatcaacgctatttgtgttaactctacccacatattcacagcagcggacgatcggaccgtcagaatctggaaagcccgtaatctacaggacggacagatttctgacacaggagatcttggagaggatatcgcctctaattag

SEQ ID NO: 227830 - DNA, 5025 bp, synthetic construct
  misc_feature 1..5025: note = Description of Artificial Sequence: Synthetic coding sequence
  source 1..5025: mol_type = other DNA
atgttgggagctccagacgaatcctcggttagagtcgcggtcaggattcggccacagctggctaaggagaagatcgaaggctgtcatatctgcacctctgtgacgcccggagaaccccaggttttcctggggaaagataaagcatttacattcgactacgtgtttgatatagattcacagcaggaacagatctatatacaatgcatcgaaaagcttattgagggctgcttcgagggctacaacgcaactgtcttcgcttatggacagaccggagcgggtaaaacttacaccatggggacaggctttgacgtcaacatcgtggaggaggaattgggtattatttctagggctgtgaagcatctgttcaagagcatcgaagagaagaagcatatcgcgattaaaaatggactccccgctcctgatttcaaggtgaacgcccaatttttagagctttataacgaagaggttctggatctcttcgacaccacccgggacatcgatgcaaagtccaaaaaaagcaatatccggatccatgaggattccaccggcggaatttacacggttggcgtgacaacacgaacggttaatactgaatcagagatgatgcagtgtctgaagcttggagctctgagcaggacaaccgcgagtacgcaaatgaacgttcagtcatcacggagccatgcaatctttactattcacgtctgtcagactagggtctgtcctcagattgatgcagacaacgccacggataacaagatcattagtgagagtgcacaaatgaacgagtttgagaccctgacagcaaaatttcacttcgtagacctcgcagggagcgaacgcctgaagcgcaccggcgctacaggcgagagggctaaagaaggaatcagtattaactgcggcctgctggctctgggaaacgtaattagcgctttaggcgataagtctaaaagggcaacccacgtaccatatcgtgacagcaagttaactagattactgcaggattccctgggtggaaactcccagactatcatgattgcgtgtgtcagtccttcagaccgtgattttatggagaccctcaatactttgaagtatgccaatagggcgagaaacattaaaaataaagtcatggtgaatcaggatagagcttcgcagcagatcaacgccctgcgcagcgagattacgaggctgcagatggagctcatggaatataaaaccgggaagcgaattattgacgaagaaggtgtcgaatcaatcaacgacatgtttcatgaaaacgcgatgctgcagaccgagaataataacctccgcgtcaggatcaaggctatgcaggagacagtagatgcgttacgatcaagaattacacaactggtgagtgatcaggcgaatcacgtactggctcgcgcaggcgagggcaatgaagaaatcagtaacatgatccactcatatattaaggagatagaggacctgcgtgcaaagctgttggaatccgaggccgtgaacgagaatctgagaaagaacctgacccgtgcaacagcacgagccccttacttttcaggaagtagcactttctcaccaactattctttctagtgacaaagagacgattgagattatagatctggccaaaaaagacttagagaagctgaagcgcaaagaaaaacggaaaaaaaagcgactgcagaaactggaggagagtaatcgcgaggagcgaagcgtcgccggtaaagaagacaacaccgatactgatcaggagaagaaggaggaaaagggagttagcgaaagggagaataacgaactcgaggttgaggaatcccaggaggtgagcgatcacgaggacgaagaggaggaggaagaagaggaggaagacgatatagatggtggagaaagcagcgatgaaagcgacagtgagagtgatgaaaaggccaactaccaggctgacctggctaatattacctgtgaaatcgctattaaacagaagttaatcgacgaactcgaaaattcacaaaagaggctccagaccctcaagaagcagtacgaggagaagctgatgatgttgcaacataaaatcagagacactcagctggagcgcgaccaggtgctgcagaacctaggatctgttgaaagctactctgaagaaaaggccaaaaaggttcgttccgaatacgagaagaaacttcaggctatgaacaaagaactgcaaaggctgcaggccgcacaaaaagagcatgctcggttgctgaagaatcagagccagtacgagaagcagctgaaaaagttacaacaagatgttatggagatgaaaaaaacaaaggttagactgatgaaacagatgaaggaggaacaggagaaagctcggcttaccgagtcgcgcagaaatagggagatagctcagcttaagaaggatcagaggaagagggaccaccagctcagactcctcgaagcacagaaaagaaaccaggaggtcgttttacgtcgtaaaacggaagaagtcacggccctgagaaggcaggtgcggcctatgtcggataaggtagcaggaaaagtaactcggaagctttcctcatccgacgctcctgcccaggacacaggtagcagcgccgcagcagttgagaccgatgcttcccgtactggagcacaacaaaaaatgcgcatccccgtggccagagtgcaggccctgccgacccctgcgacaaatggaaaccgtaagaagtatcagagaaagggtctgacaggccgagtatttatctccaaaacagctcgaatgaagtggcagctgctggaacgcagggtgaccgacataataatgcagaaaatgacgatcagcaatatggaggctgatatgaatcggctactaaagcaacgcgaagagctgaccaaaagacgagagaagctgtccaagcgtcgtgagaaaatagtgaaggagaacggtgagggcgacaaaaacgttgccaacatcaacgaggagatggaatccttgacagctaacatcgattatatcaatgacagcatttcagactgtcaggctaacatcatgcagatggaggaggccaaagaggagggcgagacacttgatgtgactgccgtaataaatgcctgtactctgaccgaggcacggtatctcctggaccactttttgtcaatgggtataaataagggcctccaggccgctcaaaaggaggctcagattaaggtccttgagggccgacttaagcaaactgagatcacgagcgccactcagaaccagctgcttttccacatgttaaaggaaaaggcagagctgaatccggaactggatgcgctgctgggccatgccctgcaggatctggactcagttccactggaaaacgtggaggattctacggacgaggatgctcctcttaattctcccggatctgaaggatcaacacttagttccgacttaatgaagctctgtggagaggtaaagcctaagaacaaggcgaggcggagaacaacgactcagatggaactcttgtacgcggattcttccgaattagcctctgatacatccactggagatgctagtctgcccggaccactgacacccgtcgcagaggggcaggagattggaatgaacactgaaacctccggtacaagtgcgcgagaaaaggagttgtctcctccaccagggttgcccagtaaaattggtagtatttcccgccagtcctccctctccgaaaagaagattcctgaaccctccccagtcacccgcaggaaggcctacgagaaagccgaaaagtccaaagctaaggaacagaagcactctgattcaggaacctctgaggcatctctgagccccccaagttctcctcccagtaggccacggaacgaacttaacgtttttaaccgattgaccgtcagtcagggaaatacttcggtccagcaggacaagtccgatgagagcgattcctctctgtctgaggtgcataggtcctccaggaggggtattatcaatccctttccggctagtaaagggataagggcttttcctttacagtgcatccacatcgctgaaggccacaccaaggcagtgctgtgcgtcgactcaactgacgatctgctgtttactggatccaaggataggacgtgcaaggtgtggaacctggtgacaggccaggaaataatgtctctaggtggtcacccaaataacgtggtatccgtcaaatactgcaattacacatcattagtgttcaccgtgagcacctcctatattaaggtgtgggacattcgagacagtgcgaaatgcatccggacactcacgtcaagtggtcaggtgactttgggcgacgcttgcagcgcatctaccagcaggaccgtcgctattcctagcggagagaaccagatcaaccaaattgctctcaatcctacaggcacctttctgtacgcagcctctggaaacgccgttcgaatgtgggacctcaaacggttccagagtactggcaaactgactggtcaccttgggcctgtgatgtgcctgactgttgatcagatcagcagcggtcaggacttgataattactggaagcaaggatcactatattaagatgtttgacgtgaccgagggagcacttggtactgttagccctacacataactttgaaccaccccattatgatgggattgaggctctcactatccagggtgataacctgttctctggaagccgcgataacggaataaagaaatgggatctgacccagaaggaccttttacaacaagttccaaacgctcataaagactgggtgtgcgctctgggcgtcgtgcccgatcaccccgtgttgttatcagggtgcagaggcggtatccttaaggtctggaatatggacacatttatgccagtgggggaaatgaaggggcatgactcccccataaatgccatttgtgtaaatagtactcacatatttactgccgcagatgatcggacagtccggatttggaaagccagaaatctccaggatggccagatttccgatactggggatctgggggaggacatcgccagcaactag

SEQ ID NO: 227831 - DNA, 4985 bp, synthetic construct
  misc_feature 1..4985: note = Description of Artificial Sequence: Synthetic coding sequence
  source 1..4985: mol_type = other DNA
atgctgggagccccagatgagagctctgttagggtcgcagtccgcattcggcctcagctggccaaagaaaagatcgaagggtgccatatttgcaccagcgtcaccccgggtgaaccccaagtgtttttgggaaaggataaggcctttactttcgactacgtgtttgacatcgattcacagcaggagcagatatacattcagtgtatcgaaaaacttatagaggggtgcttcgaaggttacaacgctaccgtcttcgcctacggacagacaggcgctggaaagacctatacaatgggtaccgggtttgacgtgaatattgtggaagaagaattggggatcatctcacgcgcagtgaagcacctctttaagtccattgaggagaaaaaacatattgccatcaagaatggccttcctgcgccagactttaaagtaaacgcgcagttcctagagctgtacaacgaggaggtcttggacctgtttgataccactagggacatcgatgcaaaaagcaagaagtcgaatatcagaattcacgaggactccactggaggaatttacaccgtcggagtcacgactaggacagtgaacacagagtctgaaatgatgcaatgcctcaagctgggggcactctctcgaaccactgcatcgacacagatgaacgtgcagagttctcgctctcacgctatctttactattcacgtgtgtcagacacgggtttgccctcagattgacgctgataacgcaaccgataataagattatttctgaaagcgcacagatgaatgaattcgaaacattgactgctaagtttcatttcgtcgatctagccggaagcgaacgactgaagagaactggagccactggcgagcgggctaaagaggggattagcatcaactgcggcttgctggccctgggaaacgtcatatccgccctcggagacaaatctaaacgtgccacccacgtgccttatcgagatagcaaactgacacggttgttgcaggacagtctcggtggcaacagccagacaatcatgattgcctgcgtctccccttccgacagggacttcatggagacactcaatacgctgaagtatgctaaccgcgcacgcaacattaagaataaggttatggtgaaccaggaccgggcttcccagcagataaatgctctccggtctgaaattactcgcctccaaatggaactgatggagtataagactggcaagcgaatcatcgacgaagagggcgttgaatcaattaacgatatgtttcatgagaacgccatgctgcaaacagaaaacaataacctgcgagtgaggattaaggcaatgcaggagaccgtggacgcccttcggagtagaatcacacaattagtaagtgaccaagcaaaccacgtgctggcacgcgcaggcgagggaaatgaagagatctcaaacatgattcatagttacatcaaagagatcgaagacctcagagccaaattattagagtcagaagccgtcaacgagaacttgcgcaagaacctgacaagggcaacagccagggcaccctatttctcaggaagtagcacattctctccaactattctcagtagcgataaggagacaatagaaatcatcgatcttgccaaaaaggatctggagaaactgaagcggaaggagaagcgtaagaagaagtctgtggctggtaaggaggataacacagataccgatcaggagaaaaaggaggaaaagggtgtttcagagcgcgaaaataatgagctggaggtggaagaaagtcaggaggtgtctgaccacgaggacgaggaggaagaggaggaagaggaggaagacgacatagacggaggtgaatcttctgatgagagcgacagtgaatccgacgaaaaggctaactatcaggcagatctcgctaatatcacatgtgaaatcgctattaagcaaaagctgatagatgaactggagaactctcagaaacgcctgcagacactcaagaagcagtacgaggagaagctgatgatgttgcaacataaaatccgggatacgcagctcgaacgcgaccaagtgttgcaaaaccttggaagcgtggagtcatactcagaggagaaggccaaaaaagtgaggagcgagtacgaaaagaagcttcaagccatgaataaagaattacagaggttgcaggccgctcagaaggagcatgccaggctgctgaagaaccagtcccagtacgagaagcagcttaagaagctccagcaggatgtgatggaaatgaaaaagacaaaggtgagattgatgaaacaaatgaaagaggagcaggagaaggccaggctcacagaatcacggaggaaccgcgaaatagctcagctcaagaaagatcaacgtaaacgtgatcatcaactgcgtctgctggaagcccagaagcgaaatcaggaagtcgtgctcagacggaaaactgaagaagtgactgcattacgaaggcaggtacggcctatgtccgataaagtcgccggtaaagtgacgcggaagctgtcgagtagtgacgcgccagcccaagacacgggcagcagtgctgcggctgtcgagaccgatgcgtccagaacaggcgctcagcaaaagatgcgtatcccagtggcacgggtgcaagccctacccactccagccaccaacgggaacaggaagaagtatcagagaaaaggactgaccggtagagtgttcatctctaaaacagctcggatgaaatggcagcttctggagcggagagtgaccgacattataatgcaaaaaatgacgataagtaacatggaagccgatatgaaccggctcctgaagcagcgcgaagagttaaccaagcgtagggagaaactgtcaaagcgcagggaaaaaatagtgaaggagaacggtgagggcgacaaaaatgttgctaacatcaacgaggaaatggagtcactgactgcgaacatcgattacataaacgactccatcagcgattgtcaggctaacatcatgcagatggaggaagccaaagaagagggcgagacactggatgtgacagctgtgataaatgcgtgtactctgactgaggccagatatctgctggaccacttcctctctatgggaattaacaagggcctccaggctgcccagaaagaggcccagatcaaggtgctcgagggacggctgaaacagactgaaattacgtctgctacccaaaatcaactcttgttccacatgctgaaagagaaagccgaactaaatccagagctcgatgctctgctggggcacgctttacaagacctggatagcgtgccactggaaaacgtggaagattcaaccgatgaagatgccccattaaactcccctggatccgaagggtcgaccttaagctcggacctcatgaaactgtgcggcgaggttaagcctaagaataaggcccgacggaggactacgacgcagatggaattgctttacgccgacagtagtgagctggcgtctgacacgagcacaggagacgcatctcttccgggtccattgactccagttgcagagggccaggagataggaatgaatacagagacaagtgggacgtctgctcgggaaaaggaattgagccctcccccaggtcttcccagtaaaatcggatcaatcagtaggcagagctccctgtccgaaaaaaagatcccggaaccttcccccgtgacccggagaaaggcctatgagaaagctgaaaaaagtaaagctaaagaacagaaacactctgactctgggaccagcgaggccagcctgtcacccccatccagccctcccagccgccctaggaatgaattaaatgttttcaacaggttaacagtgtctcaaggcaacactagtgtgcagcaagacaagtcagacgagagtgactcgtccctcagcgaggttcatcgttccagtcgcaggggcataatcaatccgtttcccgctagcaaaggcattagagcctttccgctgcagtgtatccacattgctgaaggccacaccaaagcagtcctgtgtgtggactcaaccgacgatctactctttaccggcagtaaagatagaacttgtaaggtctggaacctggttacaggccaggagataatgtcgctgggaggccaccctaacaatgtggtgtctgttaagtactgtaattacacaagccttgtgttcactgtttccacctcctacattaaggtttgggatattcgggactccgctaagtgcattcgtactctgacttcttccggacaggtcacattgggggacgcctgttctgccagcacatccagaactgttgccattccctccggagagaaccaaatcaaccaaattgccttaaaccctaccggcactttcctgtatgccgcaagcggtaacgctgtgagaatgtgggatctgaagcgcttccagagcactggcaagttaacaggccatcttggcccagttatgtgcctaaccgtcgaccagatcagctcagggcaggacctgatcatcacaggctccaaagatcattatattaaaatgttcgacgtgactgagggagcacttggaacagtgagtcccacccataactttgagccaccacactatgatgggatcgaagcgctcactatccagggtgataatctcttctctggctcaagagataatggaatcaagaaatgggatctcacacaaaaagacctcctgcaacaggtccccaacgcgcacaaagattgggtttgcgctttgggagtcgtgccggaccacccagtactgctgagcggatgtcgtggagggatcttgaaggtgtggaatatggatacgtttatgccggtaggtgaaatgaaaggccacgattcccccattaatgccatctgtgtcaactccacacatatcttcactgccgctgacgatcgaacagtcagaatttggaaggcgcgaaaccttcaggacggccaaatctcagacacaggggatttaggagaggacattgccagtaacta

SEQ ID NO: 227832 - DNA, 5027 bp, synthetic construct
  misc_feature 1..5027: note = Description of Artificial Sequence: Synthetic coding sequence
  source 1..5027: mol_type = other DNA
atgctgggcgcaccagatgagtcttctgtgcgggtagcggtgagaattcgcccacagcttgccaaggagaagattgagggctgtcatatatgtacctcggtgacccctggggagccacaggtgtttcttggtaaagataaagcatttacgttcgactatgtgttcgacatcgactctcagcaggagcagatctacatccagtgtattgagaaactcattgagggatgctttgagggatacaacgccacagtttttgcctacgggcagaccggtgccggtaagacctacaccatgggaaccgggttcgatgtgaatattgtggaagaagagctgggtatcatctcccgtgccgtgaagcacctctttaagagcatcgaggagaaaaaacatatcgccatcaagaatgggctgcccgctcccgactttaaagtcaacgcccagtttttggagttgtacaatgaggaggttctggatctgtttgatacaacaagggacatagacgcgaaaagtaaaaagtcaaatatacggatccacgaggattctactgggggtatctataccgtgggcgttacgacgcgaactgttaatacagaaagcgagatgatgcagtgcttgaagttaggggctctttctagaaccactgcttccacgcaaatgaatgttcaatccagtcgatcccatgccattttcacgatacacgtgtgccaaactcgggtttgtcctcagatcgacgcagacaatgcaaccgacaataaaataatatccgaaagcgcacagatgaacgagtttgaaacactcaccgctaagttccatttcgtggatctagctggcagcgaacggctgaaaaggacaggtgctaccggcgagagagctaaagaaggaatctcgatcaactgcgggttgctggccctgggtaatgtgataagcgcactaggggataagagtaaaagggccacacatgtcccatacagggactccaaacttacgcgtctcctccaagactctcttgggggtaattcccaaaccatcatgatcgcttgcgtcagcccctccgatagagactttatggaaactttgaatactctgaagtatgcgaaccgtgccaggaatattaagaataaggtgatggtgaatcaggacagagcatcccagcaaataaatgccttgcggtctgagataacaagactgcaaatggaactcatggaatataagaccgggaagcgcattatcgatgaggaaggtgtggagtccataaatgacatgttccacgaaaacgctatgctacagacagaaaacaacaatctgcgggtgagaataaaagcaatgcaggagactgtcgatgctctgagatcaaggatcactcaactggtgtcggatcaagctaaccatgtgttggccagggcgggtgagggtaacgaggagatctccaacatgatacatagttacatcaaggagattgaagatttgagggccaagttgcttgagagtgaggccgtcaatgagaacctgcggaagaacctgactagggccactgctcgtgcaccttatttctctggtagtagtacattctcaccgaccatactatcatcagataaggagaccattgagatcattgacttggcgaaaaaggacctcgagaagctgaaacgaaaagagaagaggaagaagaaacggctgcagaaactggaggaaagcaatagggaggagcggagcgtggcagggaaggaggataatacagacaccgatcaagagaaaaaagaagaaaaaggcgtttctgaacgtgagaataacgaacttgaggtcgaagagtcccaagaggtgtcggaccacgaagacgaggaagaggaggaggaagaagaggaggatgatatcgatggcggagaaagttcggatgagtctgattcggaatccgacgagaaggctaactatcaggcagatctcgccaacatcacctgcgagatcgccatcaagcaaaagctcatagacgagctggagaatagtcagaaacgcctccagacgctcaaaaagcagtacgaggaaaaactgatgatgctgcaacacaaaatacgggatacccagttggaaagagatcaggttctacagaacctgggctcggtcgagtcatattctgaagagaaagccaaaaaagtgcgctccgagtacgaaaagaagctccaggccatgaataaagagttgcagagactgcaagcagcacagaaggaacacgcgaggctgctgaagaatcagtctcaatacgaaaaacagttgaagaagttgcagcaggatgtgatggaaatgaaaaaaaccaaagtccgtttgatgaaacagatgaaagaggaacaggaaaaagccaggcttacagagtccagacggaatcgagagattgcacagctcaagaaggaccagcgtaaacgcgatcatcagctcaggctgctagaggctcaaaagcgcaaccaagaagtagtcttgcggagaaagacggaggaggtgaccgcactgagacggcaggtgaggccgatgtccgataaagtcgccggaaaagtcacgaggaagctgagttcttccgacgcccctgctcaggacactggcagctccgctgctgcagtggaaaccgatgctagccggacaggcgctcagcaaaagatgaggatcccggtggccagagtgcaggccctgccaacaccagccaccaatggcaacaggaagaagtatcagagaaaaggcctcaccggcagggtgtttatcagtaagaccgccaggatgaaatggcagctcctagagcgtcgcgtaaccgatattataatgcagaagatgaccatcagcaacatggaagctgacatgaaccgcctcttgaaacagcgcgaagagttgactaaaagacgcgagaaactgagtaaacggagggagaagatagttaaggagaacggcgagggggataaaaacgtggccaatataaacgaggagatggagtcattgacagcgaatattgattacatcaatgattcaatctccgactgtcaggccaacatcatgcagatggaggaggccaaagaagaaggcgaaacactggatgttacagccgtgatcaatgcttgcaccctcacagaagccaggtatctactcgaccacttcctgagtatggggattaataaaggcctgcaagcagcgcagaaagaagcccagattaaggtgctcgagggacggttaaagcagactgagatcactagcgcgactcagaatcagctactctttcatatgctgaaagagaaggcggaacttaacccagagcttgacgcactgctcggccacgctttgcaggatttcaagcatttttttgtggagaacgttgaagactcgactgacgaagatgcacctctgaacagtcccggatctgaggggagcaccctctcatcggatttaatgaagctatgtggtgaagtgaagcctaagaataaggccagacgccgaactaccactcagatggaactcctgtatgcagattcttcagagttggcgtctgatacaagtactggggacgcgtcacttcctggccctctcaccccagttgcggaaggacaagaaattggcatgaacacagaaacgtcaggaaccagtgccagagagaaggaactgtctcccccacccggacttccatcaaagattggctctatctcaaggcaaagttccttgtccgagaagaaaatcccagagccgtcccccgttacaagacgtaaggcctacgagaaggcggagaagagcaaggcgaaggagcagaaacattcagactcggggactagcgaagcaagcttatcccctccttcctctcccccaagcagacccagaaatgagttaaatgtgttcaatagactgacagtgagccagggcaacacttcagtgcagcaggataaaagcgatgaatcagactcatccctcagcgaagtacaccgcaactcaaatctaaggggtatcattaatcccttcccggcatcaaaggggatccgggctttccctctccagtgcattcacatagcggaaggtcacacaaaggccgtgctgtgtgtggactcaaccgacgatctgcttttcacggggtccaaagataggacatgcaaagtttggaatctggtcactggccaggagattatgagcctcggcggacaccctaacaacgtggtgagtgtaaagtattgtaactacacaagtttggtgtttacggtgagtacatcctacatcaaggtgtgggacattagagacagcgctaaatgtatccgtaccctcacttcatccggacaggtcacgctgggtgatgcctgttccgcttctacctcgcggaccgtagcgatcccttctggggagaatcaaattaaccagatcgccttaaacccgaccggtacattcctctatgccgctagtggaaacgctgtccgcatgtgggatttaaagaggttccagtccacaggaaaactaacaggacaccttggcccagtcatgtgtctgaccgtggatcagatcagctctggacaggatttgattatcaccggcagcaaagaccactacatcaagatgttcgacgtgactgaaggagccttggggacagtttctcccactcacaatttcgagcccccacattacgatgggatcgaagcattaacgatacagggggataacctcttttccggctcccgagacaacggcattaagaagtgggatttgacccagaaggaccttctccaacaggttccgaatgcccacaaggattgggtgtgcgcccttggggtggtccctgaccatccagtcctcctatccggatgccgtggcggtatactgaaagtgtggaatatggacacattcatgcctgtcggggagatgaaaggacacgacagcccaatcaatgccatttgcgtcaactccacccacattttcactgccgctgatgacaggaccgtcaggatctggaaggcaaggaatttgcaagatgggcagatcagcgacaccggcgacttaggtgaagatatcgcaagcaatta

SEQ ID NO: 227833 - DNA, 4866 bp, synthetic construct
  misc_feature 1..4866: note = Description of Artificial Sequence: Synthetic coding sequence
  source 1..4866: mol_type = other DNA
atgctcggcgctcccgacgagagctctgttagagtggccgtgcgtatccgaccccagctggccaaagagaaaatcgaggggtgccacatctgtaccagcgttacacctggggaaccccaagtatttctagggaaagataaggcattcacatttgactatgtgtttgacatagatagtcagcaggagcaaatttatatacaatgcattgagaagctgatcgaaggatgctttgaaggctacaacgctactgtgttcgcgtacgggcagaccggggctggcaagacctacaccatgggaaccggattcgacgttaatatcgtcgaagaggagctgggaattattagtagagcggtgaaacacctttttaaaagtatcgaagagaaaaagcacattgcaatcaagaatgggctccctgcccctgattttaaggtgaacgctcaatttctggagttgtacaatgaggaagtccttgatttattcgacacaacccgagatattgatgcaaagagtaagaagagcaacattaggatccacgaggattcaactggcggaatctacaccgtaggggtgacgacaagaactgtgaacaccgagagcgagatgatgcagtgtctgaaactaggcgcactctcccgcaccactgcgtctacccagatgaacgtccagagttccagaagtcacgctatctttacaatccacgtttgtcaaactagggtttgtcctcagatagacgccgacaatgccaccgataataagattattagcgaatcagcccagatgaacgagttcgaaaccctgacagccaagttccacttcgtggacctagctggaagcgagaggttgaagcggacaggcgctacgggcgaaagggcgaaagaaggaatttccatcaattgtgggctgctagcgctgggcaatgtcatatctgctttgggggacaaatctaagagagcaacccacgtgccctacagagacagcaagctgacaagattgctgcaggactcattgggtggcaattctcagaccataatgatcgcttgtgtaagtccctcagatagggattttatggagaccctgaacacattgaagtatgctaatcgtgcacggaatatcaaaaataaggtgatggtgaaccaggatcgagcatctcagcagattaatgccctgaggagtgagatcacccgcttgcaaatggagctcatggagtacaagaccggaaagaggatcattgacgaagaaggagttgagagtataaacgacatgttccacgagaatgcgatgctacagaccgagaataataacctgcgcgtccggataaaagctatgcaggagacggtggacgccttacggtccagaatcacccagctcgtgagcgaccaagctaatcacgtgttagctcgcgctggtgagggaaatgaagagatcagcaacatgatccactcctacatcaaagaaattgaggatcttagagctaaactgctggaatccgaggcggtaaacgagaaccttagaaaaaacctcactcgtgcgaccgcgagggcaccctatttcagtggctccagtacattttctcctacgatactctccagcgacaaagaaactatagaaattattgacctggcgaagaaagatttggaaaagctaaagcgaaaggagaagagaaagaagaaatcagttgccggtaaggaagataatactgataccgatcaggagaaaaaagaggaaaaaggggtgtctgaacgggagaataatgaattggaggtcgaagagagccaggaagtttcggatcacgaggatgaagaggaggaggaggaagaggaagaagatgatatcgatggcggtgagtcttccgatgagagtgactcagaaagtgacgaaaaggcgaactatcaagctgacctagccaacataacctgtgagattgctattaaacagaagctgattgacgagctcgagaactcgcagaagcggcttcagactcttaagaagcagtatgaggagaaattaatgatgctgcaacataagatcagagacacccaactcgagcgggaccaggtactccagaaccttgggagcgtggagtcctattctgaagaaaaagctaagaaagtgcgatcagagtacgaaaagaaactccaggctatgaacaaagaactccaacgcctgcaagccgcacagaaggagcatgcacgcctgcttaaaaaccagagtcagtatgagaagcaactgaaaaagctgcagcaggatgttatggaaatgaagaagacaaaggtccgtctgatgaaacagatgaaggaagagcaggaaaaggctcgtcttaccgagtcccgccgtaacagggagattgcgcaacttaagaaagatcagcgcaagcgggatgtgaccgctcttcgcaggcaggtgagacccatgtcagacaaggttgctgggaaagtgacacgaaagctatcctcttcggatgcacctgcccaggacacagggagcagcgcggcagcagtggagactgatgccagtaggacaggcgctcagcagaagatgcggatccctgtggctcgggtccaggccttgccgacccctgcaacaaacggcaaccgtaaaaaataccaaaggaaggggcttacgggtcgagtctttatttccaaaaccgcgcgtatgaaatggcagctgctcgagaggagagttactgatataataatgcaaaaaatgacaatcagcaacatggaggcagacatgaatcgactgctgaaacaacgtgaggaactcacaaaaaggagagagaagctctcaaagcgacgcgagaagatcgtgaaagagaatggagagggcgataagaacgtggccaatataaatgaggaaatggaatcacttacagctaatattgattacatcaacgattcaatcagcgactgccaggcaaatattatgcagatggaggaagctaaagaagagggtgagaccctagacgtaactgccgtgatcaacgcctgtacactaaccgaggctaggtatctgctcgaccatttcctgtctatgggaatcaataagggcctgcaggcggctcagaaggaagcccaaattaaggtcctggaaggtcggctaaaacagaccgaaatcacatcagcaacgcagaatcagctccttttccacatgctaaaagaaaaggcggagctgaaccctgaacttgacgctctgcttggtcacgctctgcaggatctggattccgttcccctcgagaacgtggaggacagcactgatgaagacgcaccactcaactcacctggtagcgaagggagcaccctctcctctgacttaatgaaactgtgcggggaagtgaaacctaaaaataaagccagacgtagaaccaccacacagatggagttgctgtatgcggattcatctgaactagcttccgatacctcgaccggcgatgccagcctcccaggtccgctaacaccagtcgcagaaggtcaggaaataggaatgaacacggaaaccagcggaacttcagccagggaaaaggagctctcccctccacctgggcttccatccaaaatcggaagtatctcccgccaatccagcctgtcagagaaaaaaatcccagagccaagcccagtgacacgcaggaaggcctatgagaaagccgagaagagcaaagcaaaagagcaaaaacattcagacagcggaacctcagaggccagcctcagcccgccatcatcaccgccttcccggccaagaaatgagctaaatgtcttcaaccgcctaacggtgtctcaggggaatacctctgtgcagcaggacaaaggaatcatcaacccatttcctgcctcaaaagggatcagagccttccctttgcaatgtatccatatcgcggagggacacactaaggctgtcctgtgcgtagattcaactgatgatctgctgtttactgggagtaaggataggacatgtaaagtctggaatctcgttactggacaggagatcatgagtctcggcggtcacccgaataatgtggtgtccgtaaagtattgtaactacacttccctggtgttcactgtttcaacttcctacatcaaggtctgggatatcagggacagcgccaagtgtattcggactctgaccagcagcgggcaagtcactctaggagacgcatgctctgcatctacgagtcgcacagtggctatacccagcggggagaatcaaatcaaccaaattgccttgaacccaaccggaacctttctgtatgccgctagtggcaatgcggtgagaatgtgggatctcaaaaggtttcagagcacgggtaaacttaccggtcatttgggtccagtgatgtgtctgactgttgatcagatctccagtgggcaggatcttataataacaggtagtaaggaccactatatcaaaatgtttgatgtgactgagggggctctgggtacagtttctccaacacacaatttcgagcctcctcactacgatggaatagaagcattaactatccaaggggacaatctgttttctggctcgcgagacaatgggattaagaaatgggacttgacgcagaaagacctactgcagcaagtccccaatgcgcacaaagactgggtgtgtgctttgggggtggtgccggaccaccctgtgttgctgtcaggctgccgcggaggcatactgaaagtgtggaatatggacacatttatgcctgtgggagaaatgaagggacatgattctcccatcaatgctatttgcgtgaattctacccacatcttcacagcggctgacgacagaacagtacgtatttggaaggccagaaatttgcaggacgggcagatttcagacaccggcgatctgggtgaggatatcgctagcaactag

SEQ ID NO: 227834 - DNA, 4914 bp, synthetic construct
  misc_feature 1..4914: note = Description of Artificial Sequence: Synthetic coding sequence
  source 1..4914: mol_type = other DNA
atgttgggcgcaccggatgagtctagcgttcgtgtggcagttagaatccgacctcagcttgccaaagaaaaaatcgagggatgccatatttgtacctccgtaacacccggtgagccacaggttttcctgggcaaagacaaggccttcacttttgattatgtgttcgatatcgacagccagcaggagcaaatctatatacagtgcattgagaaacttatcgagggctgctttgagggttataacgcaaccgtcttcgcctacggccaaactggcgcaggcaagacgtacaccatgggaactggtttcgatgtcaacatcgttgaggaggaactcgggatcatttctcgggctgttaaacacttgttcaagtccatagaggagaagaagcacattgctattaagaacggcctgcccgcaccagacttcaaagtaaacgcccagtttctggagttgtacaacgaagaggtgctcgacctgtttgacactactcgggatatcgatgcgaaatccaagaaatctaacattcgaatacacgaggacagcactggcggtatctacactgtaggagtgaccacccgtactgtcaataccgagtctgagatgatgcaatgccttaaacttggtgccctgagccgcacaaccgccagtactcagatgaatgttcagagcagccggtcccacgccatctttaccatccacgtttgtcagacccgggtctgcccccagatcgacgccgacaacgctactgacaataaaataatcagcgaaagcgctcagatgaacgagtttgagacattaacagctaaattccatttcgtagacctggctgggtccgaacggctgaagagaaccggcgctactggcgagcgcgctaaggaaggaatctctataaactgcggactcttggccctggggaatgtcatctctgctctcggcgacaagagcaagcgcgcaacgcacgtgccctatcgcgattctaaactcacaaggctgctccaggacagtctaggcggtaactcacaaacgatcatgatcgcctgcgtttcacccagcgatcgggacttcatggaaacattaaatactctgaagtacgccaatcgagccagaaacattaagaataaggttatggtcaaccaggatcgcgcaagccagcagataaacgccctgagatcagagataaccagactgcagatggagttgatggaatataagacaggaaagagaatcatcgatgaggagggagtggaatccataaacgacatgttccatgaaaatgcaatgttgcagaccgagaataataatttgagggttcgaattaaggcaatgcaagaaaccgtcgatgcactgaggtcaaggatcactcagcttgtgagcgaccaggctaaccacgttctggctagagccggtgaaggaaatgaggagatttccaacatgatacactcctacattaaagagattgaggatctgagagctaagcttttggaatcagaggccgtcaatgagaatctgagaaagaacctgacccgcgctactgccagagccccatacttttcggggtccagtacatttagtccaacgatcctgtccagcgataaggagacaatcgagattatcgatctcgcaaaaaaagatctggagaagctcaagcggaaggagaagcgaaagaaaaagtccgtggccggaaaggaagacaatactgacactgatcaggagaaaaaggaagagaagggggtctctgagcgagagaacaatgaacttgaggtggaagaaagtcaggaggtgtccgaccacgaggacgaagaggaagaagaagaggaggaggaggacgatattgacggcggagagtcatctgatgaaagtgacagtgagtctgatgaaaaagccaactaccaagctgacctggcaaatatcacatgtgaaattgctatcaaacagaagctcatcgatgagctggagaacagccagaaacgccttcagaccttgaagaagcagtacgaagagaaactgatgatgttgcagcacaagataagagacacacaattagaaagggaccaggtgctgcagaatcttgggagcgtggagagctacagcgaagagaaagcgaaaaaagtccgcagtgagtacgagaagaaactccaggcaatgaacaaagagttgcaacgactccaggccgctcagaaagagcatgctagactgcttaaaaatcagtcacaatacgagaaacaactgaaaaaactccagcaggacgtgatggagatgaagaaaacaaaggtgcggctgatgaagcagatgaaagaagaacaagagaaggcaaggctcaccgagtccaggagaaaccgggaaatagcacaattgaaaaaggatcagagaaaacgtgatcaccagctaagactccttgaggcacagaagagaaaccaggaggtggttctgaggagaaagacagaggaagttactgctctccggagacaggttcgtcctatgtccgataaagtggcaggcaaagttacccggaagctgtccagctccgatgcccctgcccaagatacaggttcgtcagcagcagccgtagaaacagacgcctctagaactggagcccaacaaaaaatgcggatccctgtggcgagagtgcaggcccttcctacaccagctactaacggtaaccgaaagaagtaccaacgaaagggcctaactggccgtgtgtttatatctaaaacagccagaatgaaatggcagctgctggaaagacgggttaccgatattataatgcagaaaatgacaatctctaacatggaggccgatatgaataggcttcttaagcagcgagaagagcttaccaagaggagagagaaactatcgaagcgcagggagaaaattgtaaaagaaaacggggaaggcgataagaacgtggccaacattaacgaagaaatggaaagcctcacagccaatattgactacattaatgacagtatttccgattgtcaggccaacattatgcagatggaggaagccaaggaggaaggagagaccctagacgtaactgcagtaatcaatgcatgtacactgaccgaggctcggtatctgctggaccacttcctgtccatgggtattaacaaaggtctacaggctgctcagaaggaggcccagatcaaggtgctggaggggaggctcaaacaaaccgagatcacatctgcaactcagaatcagttgctttttcacatgctgaaggagaaggccgaactcaaccccgagctggacgccttacttggccacgctctccaggaaaatgtggaggactctactgatgaagatgcccctttgaacagtcccggatcagaagggtccactctgtcgtcagacctgatgaagctgtgcggggaggtgaagcctaagaataaggccaggcgacggacgactacacagatggaattgctgtatgccgattcaagcgagttagccagcgatacctctacaggggatgcctctctcccaggtcctctcacgccagttgctgagggtcaggagattgggatgaacaccgagacaagcggcaccagcgccagggagaaagagctttctccgcctccaggcctgccaagcaaaattgggtctatctcccgccagtcaagcctgtcggagaagaaaattcctgagcccagtccggtcacacgcagaaaggcctacgagaaggctgaaaagagtaaggccaaagaacaaaaacacagtgacagcgggacatcagaggcctccctctctcccccatccagtccacctagcaggccgcgaaacgagctgaatgtgttcaacaggctcaccgtgagtcagggaaatacgagtgtgcagcaagacaaaggaataattaacccttttcccgctagcaagggaatccgagcctttcccctgcagtgtattcatatagccgaaggacacactaaggcggtcctctgtgtggacagtactgacgacctattattcacaggctcaaaggacaggacgtgcaaggtgtggaacctggtcactggacaggagatcatgagcctgggcggacaccccaacaacgtggtgagcgtgaaatactgtaactatacctcactcgtgttcactgtctctacaagctatataaaagtgtgggacattcgggactcagccaagtgtatccggaccctgacttcatcaggccaggtgacacttggcgacgcctgctccgcatcaacctctcgcactgtggcaatcccctctggggagaaccaaataaaccaaatagccttgaaccctacgggcacttttctgtacgcggcaagcgggaacgccgtgcgaatgtgggacttgaaaaggtttcagtctacaggtaagcttacgggtcacttaggtcctgtgatgtgcctgactgttgatcagatatctagcggccaggacttgatcattactggtagcaaagatcactatatcaaaatgttcgacgtcacagagggtgcactaggcacagtctccccaacacacaacttcgaaccccctcactacgatggtatcgaagcactgacgattcagggggataacctgttttcaggctcacgagacaacggtatcaagaaatgggatctcacacagaaagacctcctgcagcaggtccctaacgcccacaaagactgggtgtgtgccctgggcgtggtgccggaccatccggttttgctcagcggatgccgtgggggtattctaaaggtttggaatatggataccttcatgcccgttggagaaatgaagggccacgatagccccattaatgccatatgtgtgaattcaacgcacatcttcacagcggctgatgatagaacggttcgcatctggaaagctcgcaatctacaggatggccagatcagcgacacaggcgatctgggagaggatattgcctcgaactag

SEQ ID NO: 227835 - DNA, 1986 bp, synthetic construct
  misc_feature 1..1986: note = Description of Artificial Sequence: Synthetic coding sequence
  source 1..1986: mol_type = other DNA
atgaatcgcctgttgaaacagagagaggagctgacaaagcggagagaaaaactgtccaagcggagggaaaagatagtgaaagaaaacggcgagggggacaaaaacgttgcgaacataaacgaggaaatggagagtctaacagctaatatcgattatatcaacgattctatttccgattgccaggccaacataatgcagatggaggaggcaaaggaagagggtgagacactagatgtgacggcagtcataaacgcctgtactcttacagaggcacgctacctcctcgaccatttcctttccatgggaattaataaaggactgcaggcagcccagaaggaggcgcagataaaggtattggaaggtcgattaaaacaaacagaaatcacctccgcaacccaaaaccagttgctgttccatatgcttaaggaaaaagccgagttgaaccccgagctggacgccttactgggtcacgccctccaggaaaatgtggaggactctactgacgaggatgctccccttaacagccccggttccgaggggagcactttgtcttcagatttgatgaagttgtgtggagaagtgaaaccgaagaacaaagcacgtcgccgaacaacaacacagatggaattgttgtatgcagactcatccgagttagcaagtgacacctccactggcgatgcctccctgcctgggcctctgacacccgtggctgaagggcaggagattggcatgaacaccgaaacctcagggacctctgcaagagagaaggaactgagcccacccccagggcttccctcaaagattggatcgatttcaaggcaatcatctctgtcagaaaagaaaattccagaacccagccctgtcactcggcgaaaagcctacgagaaggctgaaaaatctaaggccaaggaacagaagcaagggattattaatccattccccgcttctaaaggtattagggcttttcccttgcagtgtattcacatagccgaagggcatactaaagctgtgctgtgcgtggattcaactgacgacttgctgtttaccggctccaaagatcgaacatgcaaggtgtggaatttggttactggacaagagatcatgtcccttggcggacatcctaacaacgtcgtgtcggtgaagtactgtaactacacctccctcgtgttcacagtgtctacgtcctacattaaggtatgggacatccgagactccgcaaaatgtatacgtaccctgacttcttctgggcaggtgactcttggcgacgcctgtagtgcgagtacttctagaacagtcgcaattccgtctggtgaaaatcaaatcaatcagattgcgctcaacccaaccggcacctttctctatgccgctagtggcaacgcggtgagaatgtgggatcttaagcgatttcagtcaaccggaaagctgacaggccacctgggcccagttatgtgtctgactgtggaccagatcagcagtggtcaggacctgatcattaccgggtcgaaggaccattatattaaaatgttcgacgtgactgagggtgctttaggcacagtgtcccctacccacaatttcgagcctccccactatgacggtatagaagctcttacaattcaaggcgacaacttattttcgggctcaagagataacggcatcaagaaatgggatctcacccagaaggacctgcttcagcaggtgccaaacgcccacaaagactgggtgtgcgctctcggggtggtgccagatcaccctgtgctgctgtcggggtgtcgcggtgggatcctgaaggtgtggaatatggatactttcatgcccgtgggcgagatgaaggggcacgactcgcccatcaatgcaatctgtgtcaactccacacacattttcaccgctgcagacgaccggaccgtgcggatctggaaagcccgaaacctgcaggacggacagatttctgacacaggagacctcggcgaggacattgcaagcaattag

SEQ ID NO: 227836 - DNA, 4874 bp, synthetic construct
  misc_feature 1..4874: note = Description of Artificial Sequence: Synthetic coding sequence
  source 1..4874: mol_type = other DNA
atggctggccagggtgactgctgtgtcaaagtggcggtgcggatcagacctcagctgtccaaggagaagatcgagggctgccacatttgcacctctgtcacccctggcgaaccccaggtgttgttgggtaaggacaaagcctttacatatgactttgtgttcgatcttgacacatggcaggaacagatttacagcacgtgcgtttccaagctcattgaaggatgcttcgagggctacaacgccaccgtcctcgcgtacggtcaaaccggcgcaggaaaaacgtacacaatgggaaccggattcgatatggccacttcagaggaggaacagggaatcattccgagagccatagcccatctcttcggcggaatcgcagaacgcaagcgcagagcgcaggaacagggcgttgctggcccagagttcaaggtgagtgcccagttcctggagctgtataatgaggagattctggacctgtttgacagtacaagagacccggacacaaggcaccgcagaagtaacattaagatccacgaggacgcaaatggtggcatctacactactggtgtaactagtcgcttgatccattctcaggaggaattgattcagtgtttaaagcaaggcgctctctcccgaaccacagctagcactcagatgaatgtgcagagctctaggtctcatgcgatcttcacgatccacctttgccagatgaggatgtgcacccaacccgacctggtcaacgaagccgtgaccggccttcctgatggcacgcctcctagtagtgagtacgagaccttgaccgccaagttccatttcgtggatctggccggatcagaaagactcaaaaggactggtgctacaggggaaagggctaaagagggaattagcatcaattgtgggctgcttgccctgggtaacgtgatctccgcactgggagatcagagcaaaaaagtcgtccatgtgccgtaccgcgattctaaactgacgagattacttcaagattccctgggaggcaacagccagactatcatgatagcgtgcgtgtctccaagtgaccgggatttcatggagactttaaacaccctgaagtatgctaatcgagcaaggaacataaaaaataaggtcgtcgttaatcaggacaagacctcccagcagatcagcgcccttcgcgcagaaatcgctagactccagatggaactcatggagtataaggccggaaagcgtgtaattggcgaagatggagcggaggggtattcggacctctttagggaaaacgccatgctgcaaaaggagaacggagcgctgagactgagggttaaagcaatgcaggaggccatcgacgccataaacaatcgggtgacacagctcatgtcacaggaagcaaacctgttactggccaaagcaggggacggaaacgaagcaataggtgccttgattcaaaactatattagagagatcgaggaactgcgcaccaagttgcttgagtcagaggcaatgaacgagtctctcaggcgctctctttcccgggcaagtgcaagatcaccatacagtttgggcgctagtccagctgccccagcctttgggggatctcctgcatcaagcatggaagatgcgtccgaagtgattaggagggcgaaacaggatctagagaggttgaagaagaaagaagttcgccagcgaagaaagtccccagaaaaggaggccttcaagaagcgagccaaacttcagcaggagaactctgaagaaactgatgagaacgaagcagaagaagaggaggaagaaagagatgaaagcgggtgcgaagaggaggagggaagggaggatgaggacgaggactccgggagcgaggaaagtttggtcgacagtgattccgacccagaagagaaagaggtcaactttcaggcagacctcgctgatctgacgtgtgaaatcgagattaagcagaagttgatcgacgaactggaaaattctcaaaggcgactccagacgttgaaacaccaatatgaggagaagcttattctgctccagaacaaaattcgggatactcaattagaacgggaccgcgtgctacagaacctgagcaccatggaatgttatacggaagaaaaagccaacaaaatcaaggcagattatgagaaacgactgagggagatgaatagggacttgcagaaactgcaagctgctcaaaaggagcacgctaggctgctgaagaaccaatcccgatacgagcgtgagttgaaaaaactgcaggcagaggtggccgagatgaaaaaggctaaagtggccctgatgaagcagatgcgggaggaacaacagcgaaggagattggtggagacaaagaggaacagagagattgcgcagttgaagaaagaacagaggaggcaagaatttcagatcagggcgctggagagccagaagcgccagcaagaaatggtgctgcgcagaaagacccaagaggtcagcgcccttaggaggctcgctaaaccgatgagcgaacgcgtggcagggagggccggactgaagccacctatgcttgactccggtgccgaagtcagtgcttccactacttcatcggaagccgagagcggcgcacgctctgtgagctctattgtaagacagtggaaccgaaaaatcaatcatttcctcggcgatcatccagcccctacagtaaacggcaccaggccagctcgaaagaagttccagaagaagggtgcctcccagtcttttagtaaagcagcacgcctcaagtggcagtctctggagagacggatcattgacatagtaatgcagcgcatgacaatcgttaacctggaggcagacatggagagacttatcaagaaacgggaggaactgtttcttctccaggaagctctcaggagaaaaagagagaggctgcaagccgaaagtcctgaagaagagaagggcctgcaggaactggccgaggaaatcgaggttctcgctgctaacatagattatattaacgacggaatcaccgattgccaggccaccattgtgcagctggaggagacaaaggaggagctggattccacagataccagcgtggtgatctcatcatgctctttggctgaggcgagactgctgctggacaacttccttaaagcatcaattgacaaaggtttacaggtagcacaaaaagaagctcagattcgcctgcttgagggacgcctacgacagaccgatatggcaggcagcagccagaaccacttactcttggacgccctacgcgagaaggcagaggcgcatccagaactacaggccttgatttacaacgttcaacaggaaaacggatatgcctctacggatgaagagatcagcgagttctccgagggctccttctcccaatcatttactatgaaaggaagcacctcacacgatgactttaaatttaagagcgagcctaagttgtctgcgcagatgaaggcagtcagcgctgaatgcctggggccacccttggacatctctacaaagaacataacaaaatccctagcaagtttagtggagatcaaagaggacggcgtaggattttccgtgagggacccatactacagagacagagtgtctaggacggtgtctctgcctaccagaggaagcacttttcccagacagtctcgtgcaactgaaacgtccccgctgacccgcaggaagagctacgaccgtggccaaccaatccgctctacagacgtgggcttcacaccgccttcttcacctcccactagaccaaggaacgacaggaatgtgttcagccgccttaccagtaatcagtctcaaggctctgcattggacaaaggcattatctcgcccgtagggggtgccaagggggctagaaccgcaccactccagtgtgtgtctatggctgaaggacatacgaaacccatactgtgtcttgacgcaactgatgagctattgttcaccggcagtaaagataggagttgtaaaatgtggaacttagtcacgggccaggaaatagccgctttgaaaggtcaccctaacaatgtggtgtcaataaagtactgtagtcactccggactggtcttctctgtgagcaccagctacattaaggtatgggatatccgcgatagcgcgaagtgtatcaggaccctaacatctagcggccaggtgatatcaggtgacgcatgcgcagccacatccaccagagctataaccagcgctcagggggaacaccagattaatcaaatagccctgtctcctagcggcaccatgctctatgcggcttcaggaaacgcagtgcgaatatgggaactatccaggttccagccggtgggtaagcttacaggccacattggaccagtgatgtgcctcaccgtgacacagactgcctcgcagcacgacctggtggtcacaggttccaaagaccactacgtgaaaatgttcgagctgggcgaatgcgtgacaggtaccataggtcctactcataattttgaaccaccacactatgatgggatagaatgcctggctattcaaggggacattctgttttcggggtcacgtgacaacggaataaaaaagtgggatcttgatcagcaggagttgatacagcagattccaaacgcccacaaagactgggtatgtgccctcgcatttattcccggtcgtccgatgttactgtccgcctgccgagctggggtgatcaaagtgtggaatgtggataatttcacccccattggcgagataaagggacatgacagcccaatcaacgccatctgtaccaacgctaaacatatttttaccgcgtcaagcgactgccgggtcaaactgtggaattacgtgcccggattgactccttgtttgcctcgacgtgtgctggcaatcaaaggacgcgcaactaccctacccta

SEQ ID NO: 227837 - DNA, 4833 bp, synthetic construct
  misc_feature 1..4833: note = Description of Artificial Sequence: Synthetic coding sequence
  source 1..4833: mol_type = other DNA
atggccggtcaaggagactgctgtgttaaggtggccgttcgaatccgccctcaacttagcaaggaaaaaatcgaaggatgccacatttgcacttctgtgacccccggtgaaccgcaggtgctcctgggcaaggacaaagctttcacctacgatttcgtcttcgacttggatacttggcaggagcagatctatagcacttgtgtgtctaagctgatcgagggctgctttgaaggttacaatgcaactgtgctcgcttatggtcagacaggagccggtaagacctatacgatgggcacaggatttgacatggcaactagcgaggaggaacagggcatcattcctagagcaatcgcgcacttgtttggtggcatcgcagagaggaagcggcgtgctcaggagcagggcgttgctggacccgagttcaaggtgtcggcccagtttctcgagctgtacaatgaagagatattggatttatttgactccactcgcgaccctgacacgcggcatcgcagatcaaacataaagattcatgaggatgctaacggaggcatctacactactggcgttacctctcggcttatccacagccaggaggaactcattcaatgcctaaagcagggcgctttaagcagaactacagcatctactcagatgaacgtccagagctctcggtctcacgcaattttcactatacacttgtgccagatgcgcatgtgcacccagccagatctcgtgaacgaggccgtcactggcctgccagacgggacgccaccgtcctcagagtatgagaccctgacagccaaattccattttgttgatctagcaggttccgagcggctcaaaaggacgggcgcaacaggcgagagagccaaagagggaatttccattaattgtggcttgctggcactcgggaacgtgatctcagcattgggagatcagtccaaaaaagtggtccacgtgccatatcgagattctaaactgacgcgcctgctccaagactcacttggtggaaactcccaaacaattatgatagcctgtgtgagcccctcagatcgggattttatggagactctgaacactctaaagtacgcaaatcgagcgaggaacattaaaaacaaagtggtagtgaatcaggataagacctcgcaacagattagcgcgctgcgggctgagatagccagactccagatggaactgatggagtataaggccggtaagcgcgtaataggcgaggacggggcagaggggtactcggacctcttcagagagaatgcgatgttgcaaaaggagaacggcgctctgcggttgcgggtgaaggctatgcaggaagcaattgacgccatcaacaatagggtcacccaactcatgagtcaggaagctaacttgctactggccaaggcgggtgacggcaacgaggcaattggcgcactgattcagaactatattcgcgaaattgaagaactgagaactaaactgttagagtctgaggccatgaacgagtctctcaggcggtccctctcccgtgcttccgctcgcagcccctatagtctcggagcttctccagccgcacccgcttttggtggatctcccgcttcctccatggaggacgccagcgaagtgattcgccgagctaagcaagaccttgaaagactaaagaaaaaggaggtcaggcagaggcgcaagagtccagagaaggaagctttcaaaaagagagccaagcttcagcaagagaactcagaggaaacagacgagaacgaggctgaggaggaggaagaggaacgcgatgaatctggctgcgaggaagaagaagggagggaggatgaagacgaagactcggggtctgaagagtcactcgtagactcagactctgacccggaggaaaaggaagttaactttcaggctgacctggccgacttaacatgtgagatcgagatcaaacagaaactgatcgatgagctggagaacagtcagagaaggctgcagaccctgaagcaccagtatgaggaaaagctgatcctattgcagaacaaaatccgcgacacccagctggaaagagatagggtgctgcagaatttatcaactatggagtgttataccgaagagaaagccaacaagatcaaagctgactatgagaagcggcttagggagatgaaccgggatttacagaaactccaggctgcccagaaggagcacgcacgactcttgaaaaaccagtccagatatgagcgggagctcaagaagctgcaagctgaagtggcagagatgaagaaggccaaagtcgccctaatgaagcagatgagagaagagcaacagcggagacgcctggtggagaccaagaggaatagagaaatcgctcagctgaagaaagagcaaagaaggcaggagtttcaaatccgagcattagaatcccagaagagacagcaagagatggtgctacgccgaaaaacccaagaagtttcagcactccggagactcgcaaagcctatgtcagaaagagtggccggaagggcaggcttaaagcccccaatgctcgattccggcgctgaagtgagtgcttcaacaacgtcttctgaagctgagtccggggcacgcagcgtgtctagcatcgtacgccagtggaaccgcaaaatcaatcatttccttggcgatcacccagccccaaccgtcaacggaacaagacccgctcgaaagaagttccagaaaaagggcgcaagtcagtcctttagtaaggctgctcgactgaaatggcaatcactcgaacggaggatcatcgatatcgtcatgcagagaatgactatcgtgaaccttgaggccgacatggagcgcctgatcaagaagagggaggaactgtttctcctccaagaagcactccgacgaaaacgggagagacttcaggcagagagcccagaggaggaaaaaggcctccaggagctggccgaagagattgaagtgctggctgccaatattgactacatcaacgatggcatcaccgactgtcaggcaacaatcgtgcagctcgaagaaaccaaggaggaactggatagtacagacacaagcgtcgtgattagtagctgcagcttggccgaagcccgtcttctcctcgataattttctgaaagcttccattgataagggcctgcaggttgcacaaaaggaggctcaaatccgcctgctggaaggccgactgagacaaacggacatggccggatccagtcagaaccatctactcctagatgccctaagagaaaaggcagaagcacaccccgagctccaggctctcatctataatgtgcaacaggaaaacgggtatgcttcaactgacgaagaaatttcagaattcagcgaaggatccttctctcaatcgtttacgatgaaaggaagcacttcacacgatgattttaagttcaagagcgagccaaagttgtcggcacaaatgaaggcagtctcagccgagtgtctcggaccaccgctggacataagcacgaagaatatcaccaagtccttggccagcttggttgagataaaggaggacggcgtgggcttctctgtgcgcgatccctattacagggaccgtgtgagccggactgtgagcctccccacccgtgggtcaaccttccctcggcagagccgggctacagagacttccccactgacccgtcggaagagctatgatcgcggtcagcccatccgaagcactgatgtcggctttacacctccgagcagtcctccaactcgccctcggaatgatagaaacgtcttttcccggttgacttcaaaccagagccagggctctgcccttgacaagggcatcattagccccgtggggggagccaagggtgccagaactgcccctctgcagtgcgtatcaatggcagagggtcacaccaagccaatcttgtgtcttgacgctaccgatgaactcttatttactggttctaaggaccggagctgtaaaatgtggaatttggtgacgggccaggagattgccgcattaaaaggccacccaaataatgtggtttccatcaagtactgctcccattccggacttgtgttttcagtttccaccagttatatcaaagtgtgggatattcgcgattctgctaagtgcatacgcaccctgacgagttcaggccaagtgatatccggggacgcgtgcgcagcaaccagtaccagagcaatcacctcagcacagggtgaacatcagatcaaccagatcgcccttagcccctcgggcactatgctgtatgctgcatcaggcaacgcagtgcggatctgggagcttagtcgctttcagcccgtgggcaagctcactggccacatcggtccagtgatgtgcctaacagtgactcagactgctagtcagcatgatctagtcgttactggttccaaggaccattatgtcaagatgttcgaactgggagaatgcgtcaccgggaccataggccctactcataactttgaacccccacattacgatggaatcgagtgtctggctatacagggcgacatcttgttctcggggtccagggacaatggaattaagaaatgggatctcgaccaacaggagctgattcagcaaattcccaacgcccataaggattgggtctgcgccctcgctttcattcctgggagacctatgttactctccgcatgcagggcaggtgtcatcaaagtgtggaacgtcgataacttcacccctattggggagatcaaaggccacgactcccctatcaatgcgatctgcaccaacgcaaagcacatcttcaccgcatcctccgatctaaccgtgaagttctggtctgttcggcgactgccacactctggcccaccatag

SEQ ID NO: 227838 - DNA, 4914 bp, synthetic construct
  misc_feature 1..4914: note = Description of Artificial Sequence: Synthetic coding sequence
  source 1..4914: mol_type = other DNA
atggccggtcagggggactgctgcgtaaaagtcgcggtacgcatcaggcctcaactgtctaaagagaagattgaaggctgtcatatctgcacgtctgtcacccccggagaaccccaggtcctgctcggtaaagacaaagcctttacctacgatttcgtgtttgacctggacacctggcaggagcagatctactctacctgtgttagcaagctaatagagggatgttttgaaggttataatgcgaccgtccttgcatatggtcaaactggggctggcaagacctacaccatggggacaggttttgacatggcaacgagcgaggaggaacagggcattatcccccgagcaatagcacacctgttcggaggtatcgccgagagaaagcgccgagcgcaggagcagggcgttgccggtcccgaattcaaggtgagcgctcagtttttagagctctacaacgaggaaattctagatcttttcgatagcacacgagacccagacacgcgccacagaaggtccaacatcaaaatccacgaggacgctaatggcggaatttatacaacaggagttacctctaggctcatccactcacaggaagagctgatccagtgccttaaacaaggcgcattatcacggaccaccgcctcaacacagatgaatgtacagagcagccggtcacatgctatctttaccatccacttgtgtcagatgcgcatgtgcacccagcccgacctcgtcaacgaagccgtgacgggcttgcctgacggaacaccaccaagttctgagtatgagaccctgacggctaaattccatttcgtggatctcgcaggttccgaaagacttaagcgaacaggagctaccggagagcgggctaaagagggaatttccattaactgcgggcttttagcccttgggaacgttatttccgctttgggtgaccagagcaaaaaggttgtgcatgtcccgtatcgcgattcaaaattgactcggctgttacaggatagtctgggtgggaattcccagactattatgatcgcttgcgtgtcaccgtccgacagggatttcatggaaacactgaacaccctcaagtatgcaaatagggcacgtaatataaagaataaagtggttgtcaatcaggataagacttcacaacagatctcagcccttcgtgccgagatcgccaggttgcagatggagctgatggaatataaggcagggaagcgcgtaatcggggaggacggcgcagagggatattcggatctgttccgcgagaacgctatgctgcagaaagagaatggagctttacgcctaagggttaaagccatgcaagaagctattgatgcaatcaataacagagtcacgcaactgatgagccaagaggccaacctgctactggccaaagccggtgatggcaatgaagctatcggcgctctaatacagaactacattagagagatcgaggagctcagaaccaagttactggaatcagaggccatgaacgagagcctcagacgctcactttcaagagcctccgccaggagcccttattccctgggtgcttcgcctgctgcacccgctttcggaggatccccggctagctccatggaggatgcctcagaagtgatccgcagagccaaacaggatctggagcgccttaaaaagaaggaagttcgacagcgacggaagagccccgaaaaagaagcttttaaaaagagggcaaaactccagcaggaaaactccgaggaaacagacgaaaatgaggctgaggaagaggaggaagagagggatgagagtggttgtgaagaggaggagggacgagaagacgaagatgaagattcaggctctgaggaatccctggtggattccgatagcgatccagaggagaaggaggtgaacttccaagccgatctcgctgatctgacctgcgagatcgagatcaaacagaaactgatcgacgaacttgagaatagccaacggcgacttcagaccctcaaacaccagtatgaagagaaactgattcttctgcagaacaaaatccgggatactcagctggagagagatcgcgtgcttcagaacctcagtacaatggaatgctatactgaagaaaaggccaacaaaattaaggctgactatgaaaagcgtctgcgagagatgaaccgcgatctacagaagttgcaagccgctcaaaaggagcatgctcggctgctcaagaatcaatcacggtacgagcgggagctcaagaagctgcaggccgaagtggcagagatgaaaaaagccaaagtggcgctgatgaaacaaatgcgcgaagagcagcagaggcgccgactggtggaaacgaaacggaacagggaaatagcccagttaaagaaggaacagagaagacaggagtttcagattcgcgctcttgaaagccaaaagcggcagcaagaaatggtactgcggaggaaaacccaggaagtgagcgcattaagaagactggccaagcccatgtccgaaagggtcgctggcagggccggtttgaagccaccgatgctggattccggggctgaagtgtcggctagtacaaccagctccgaggccgagtctggcgcacggtccgtgagttcaattgtgagacagtggaacagaaaaattaatcattttttgggcgatcatccagccccaactgttaatggaactcggccagctaggaagaagtttcagaagaagggagcaagccagagtttctctaaggccgctagacttaagtggcagtccctcgaaagaagaatcattgacatcgttatgcaacggatgaccatcgtgaatctggaagctgacatggaacggctgattaagaaacgagaagaactgttcctgcttcaggaggctttacggcgaaagagagaacggctgcaagccgaatcaccagaggaagagaaaggcttacaagagttggctgaggagattgaagtccttgccgctaatatagattatatcaacgatgggattaccgactgccaagcgactattgtgcagctggaagagacgaaggaggagttagattccactgacacaagtgttgtgatttcgtcatgctcgctagccgaggcacgcctgcttctggacaactttctgaaggctagtatcgacaaaggtctgcaagtcgcccagaaggaggcccagattcgcctgctggaaggaagactgcgccaaactgacatggctgggtcatctcagaatcaccttcttctcgacgccctacgcgagaaagcagaggcccaccccgagctacaggctctgatctacaacgttcagcaagagaacggatatgcttccacagatgaagagatctctgagttctctgagggatcctttagccagagctttactatgaaggggtcaacatcccacgacgatttcaagttcaagtctgagccaaagttatcggcccagatgaaggccgtctccgctgagtgtctgggacctcctctcgatatcagcacaaagaacataaccaaaagcctagcaagcttagtggagatcaaagaggacggcgtcgggttttctgtcagggatccttactatcgagatagggtttctaggacagtttcactaccaactagaggatctacgtttcctcgccaaagccgcgcaactgagacgtccccccttacaaggaggaaatcatatgaccgcggtcagcctatcaggagcaccgacgttggattcacacctcctagctctcccccaacacgacccagaaatgatcggaatgttttcagtagactgacctctaaccagtcccaggggagtgcgctagataaaagtgacgactcagactcatcactctcggaggtgctgcggggtattatttccccagtcggaggagctaagggggctcgcactgctcctcttcaatgcgtctccatggctgaaggacacacaaagcctatcctgtgcttggacgcaacagacgagcttttgtttaccggttctaaggaccggagctgtaagatgtggaacctggttactggccaggagattgccgcactcaagggtcacccaaacaacgtcgtgagtattaagtactgcagtcacagcggccttgtattcagcgtcagcacttcatacatcaaagtgtgggacatccgcgactcagccaagtgtattaggaccctgacgtcaagcgggcaggtaatatctggagatgcctgcgctgctacttccacccgggctataactagcgctcagggagagcaccaaatcaaccagatagcactgagcccgtccggaacaatgctgtacgctgcaagcggtaatgctgtgagaatatgggaactgagcaggtttcagcccgtcggaaaactgacaggacatattggacccgtaatgtgcctgaccgtgacccaaactgccagccagcacgatctggtcgttactggttcaaaggatcattatgtgaagatgttcgaactgggcgagtgtgttacgggaacaatcggccctactcacaattttgagccaccccattacgatgggatcgaatgcttggctatccagggggacatcctctttagcggctctcgtgataacggtatcaaaaagtgggatctcgatcagcaggagctgattcagcagattcctaacgctcacaaagattgggtatgcgctctggctttcattccgggaaggccgatgttactgagcgcgtgtagagctggggtgatcaaagtttggaatgtagataatttcactcctattggcgaaatcaaggggcacgactccccaatcaacgcgatctgcacaaacgctaagcacatattcacagcatcaagcgactgccgtgtcaaactatggaattatgtaccagggcttaccccgtgcctacctagacgagtgctggccatcaaaggaagagcgaccactctcccatag

SEQ ID NO: 227839 - DNA, 4872 bp, synthetic construct
  misc_feature 1..4872: note = Description of Artificial Sequence: Synthetic coding sequence
  source 1..4872: mol_type = other DNA
atggcagggcaaggggactgttgcgtcaaagtggctgtgcggattcgccctcaactgtcaaaggagaagattgaaggatgtcatatctgtacatccgtgacacccggagagccacaagtgctgttaggcaaggacaaggcctttacttacgatttcgtgtttgatttggacacctggcaggaacagatatattcaacctgtgtttctaagcttattgagggctgcttcgagggctacaatgctactgtgctcgcgtacggtcaaaccggcgcaggcaaaacctatactatgggcacagggttcgacatggctaccagcgaggaggaacaaggcatcatcccacgagctatcgctcatttgtttggcggaatcgcagagcggaagcgcagagcgcaggagcaaggtgttgcaggacctgaattcaaagtgtctgcacaattcctcgagctatataacgaggagatcctggacctcttcgactcaacacgagaccccgacacacgacaccgcaggtccaacattaaaattcacgaggacgccaatgggggaatctataccaccggtgtcactagtagactcattcacagtcaagaggagctcattcaatgcctcaagcagggcgctttgtcacgtaccacagccagcactcaaatgaatgttcagagttcacggtcacatgcaatttttactattcatctgtgccagatgcgcatgtgcacccagcctgatctggtgaacgaagcagttaccgggctgccggacggtacccctccatcttccgagtacgaaactctgacggctaaattccacttcgtggacttagccggaagcgagcgcctgaagcgcaccggtgctacgggcgagagggcaaaagaaggaatctccatcaactgtggattgctggccttagggaacgtcattagcgctctgggggaccagtccaaaaaagtggtccatgtgccataccgggactcaaaactcacccggctgctccaagattcgcttggcggtaactcccagaccatcatgatcgcttgtgtgagtccctccgacagagactttatggagaccttaaatactcttaaatacgcgaaccgcgcacgtaacataaagaataaggtagtcgtgaatcaggacaagaccagtcagcagattagtgccctgcgagccgagatcgccaggttgcagatggaattgatggagtacaaggcaggaaagagggttataggcgaggatggagccgaaggatattccgacctatttagagagaatgccatgcttcagaaggagaacggagcactgaggctgcgagtcaaagctatgcaggaggccatcgacgccataaacaatagggttacccagctcatgtcccaggaggccaatctgctgctggcgaaagcgggagacgggaatgaggccatcggagcactgatacagaactatatccgagagattgaagagcttcggaccaaactgctggagagtgaagctatgaacgagtcacttcggcgtagcctgtcaagagcgagcgcacgcagtccgtactccctgggcgcttcccctgcagcgccagcattcgggggaagtccagcctcctcaatggaagacgcttcggaggtcattagaagggccaaacaggacttagaaaggctgaagaagaaggaagtacgccagcggaggaagtcgccggagaaagaagcttttaaaaagcgggctaagctgcaacaggaaaattctgaggaaactgacgaaaacgaggctgaagaagaggaggaggagcgggacgaatctggatgtgaggaagaagagggcagagaggatgaagatgaggattcaggatctgaggagagcttggtggacagcgactcggatccagaggagaaggaagtcaatttccaggctgatctggccgacctgacatgcgagattgagatcaagcagaagctcatagatgaattagagaactctcagaggcggctccagacgctgaaacatcagtacgaggagaagctaatcttactccagaacaaaattcgcgacacccagttagaaagggatcgggtactgcagaatctgagcacaatggagtgttatactgaagaaaaagctaacaaaattaaagctgactatgaaaagaggttgagggagatgaatagggacttgcaaaaactccaggccgctcagaaagaacacgcaaggctgctaaagaaccagtcgcgctacgagagggaattgaagaaattgcaggcagaagtggcggagatgaaaaaagctaaggtcgctctgatgaaacaaatgagggaggagcagcagagaaggcgtctagtggaaaccaaacggaatagggagatcgcccaacttaagaaagagcagcgaaggcaagagttccagatccgtgccttggaatcccagaaacgccagcaggaaatggttttacgacggaagactcaggaagtctccgctttgcgtagacttgccaaaccgatgtctgaacgggtggcaggcagagccggactgaaacctccaatgttggacagtggcgctgaggttagcgcaagtaccacaagctcagaggccgagtccggtgccagatctgtgtccagtatcgttcgccaatggaatagaaagatcaaccactttctgggggatcacccagctcccacagtcaacgggactcgacccgctcggaagaagttccagaaaaagggagcgagtcagtctttctctaaagcagctaggctgaaatggcaatctctggagcggcgtataatcgacatcgtgatgcaacgcatgacaatcgtgaatctcgaggcagacatggaacgcttaatcaagaagagagaagaactcttcttgctccaagaagctcttagacggaaaagggaaaggcttcaggctgagtctcccgaggaggaaaaggggctccaggagctcgccgaagagattgaagtgttggccgcaaacattgactacatcaacgacgggattaccgattgccaagccaccatcgttcagttggaagagaccaaggaggagttggatagtacagataccagtgtcgtcatttcttcttgtagccttgcagaagccagactgctgttagacaacttcctaaaagcaagcatagataaaggcttacaggttgcccagaaggaggctcagattcggttgctcgaagggaggctgagacagaccgacatggcgggtagcagccaaaaccatctgctactggatgcacttcgtgagaaagcagaggctcatcccgagctccaggctctcatatataatgtgcaacaggagaatggctacgctagcaccgatgaggaaatctccgaattcagcgagggtagcttcagtcagagtttcaccatgaaaggcagtactagtcacgacgatttcaagttcaaatcagaaccgaagctgtcggcacagatgaaggcagtatccgctgagtgcctcgggccacccctggacattagcaccaagaacatcaccaagtcccttgcgtcactggtggaaataaaagaggatggcgtgggcttttctgtgagagatccctactaccgtgaccgcgtttctcggacagtgagcctccccaccagagggtcaaccttccccagacagagtagggcaactgagaccagcccgctcacccgtcgcaaaagttatgatagaggacagccgattcgcagtaccgacgtcggtttcactcccccttccagtccgccaacccggccacggaacgaccggaacgtgttttccaggctgacatctaatcagagccaaggctccgccctcgataaaagtgacgactccgactcctcactgagtgaagtgcttcggggtattatcagtccggtgggcggtgctaagggcgctcgcactgcacctctgcagtgcgtgtccatggctgagggacatacaaaaccgatactgtgtctagacgccacggacgaactgctttttacaggcagcaaagacagatcatgtaaaatgtggaatctagttactggccaggagatagccgctctgaaggggcatcctaataacgtagtatctatcaagtactgtagtcattcaggcctggttttcagcgtcagtacctcctacattaaggtgtgggacatcagagattctgccaagtgcatacgaacccttacaagcagtggtcaggtgatctccggcgacgcttgcgcagcaacttctactcgggctatcacatctgctcaaggcgagcaccagatcaaccaaatcgcactttccccatcaggcacaatgctatatgctgcaagtggtaacgccgtgcgtatttgggagctgagccgcttccagccagtgggaaaacttaccggtcatatcggacccgtaatgtgtctgactgtgacacagaccgcctcccagcacgacctggtggtgaccgggtccaaggatcattatgtcaagatgttcgaactcggtgagtgtgtgacgggaacgatcggacccacacataacttcgaacctccccactatgacggtatcgagtgcctggccatccagggcgacattttgttctccggatctcgcgacaatggtattaaaaaatgggacctcgatcagcaggaactgatccagcagattccaaatgcccacaaagattgggtttgcgctttggccttcatcccaggaagaccaatgcttctttcagcctgccgtgctggagttatcaaggtctggaacgtagacaacttcaccccaatcggcgagataaaaggtcacgacagcccaatcaacgcaatttgtactaatgctaagcatattttcactgcgtcctctgacctgacggtgaagttttggagcgttagacgactgccacattccggtccaccctag

SEQ ID NO: 227840 - DNA, 5007 bp, synthetic construct
  misc_feature 1..5007: note = Description of Artificial Sequence: Synthetic coding sequence
  source 1..5007: mol_type = other DNA
atggctgggcaaggagactgctgtgttaaagtcgctgtaaggatcaggcctcagctcagtaaggagaagatagaagggtgtcatatctgtacatcagtgacacccggagagccccaggtgctgcttgggaaggacaaggcgttcacatatgattttgtgttcgaccttgacacctggcaggagcagatatacagtacatgtgtgtctaagctgatcgagggctgttttgaggggtacaacgctacggtgcttgcatacggtcagactggtgccggaaaaacatacaccatgggcaccggcttcgacatggctaccagtgaagaggaacagggcatcattccacgtgcaatagcacacttgtttgggggtatcgccgaaaggaaacggagggcccaagagcagggcgtagccggacctgaatttaaggtgagcgcacagttcctcgagctttataacgaggagattttagatctcttcgattctactcgagaccctgatacccggcatcggaggtccaacatcaagatccatgaggatgctaatggtggcatctatactacaggagtgacttcccgtctgatccatagccaggaggagctcatccaatgtttgaaacagggcgcattatcacgaactacagccagtacccaaatgaatgtgcagagctcccgcagtcacgccatcttcacgattcatctgtgtcagatgcgcatgtgcacccagcccgacctcgtcaatgaggcagtgactggcctgccagatggtacccctccttcctccgaatacgaaacgttgacagctaaatttcattttgtagacctcgcagggtccgagcggctcaagaggaccggggctaccggcgagagagctaaagaaggcatctctatcaattgtgggctattggctctggggaacgtgatttctgcactgggggatcagagcaagaaagtggtgcatgtaccatatcgggactcaaagttgacccggctgctgcaggatagccttgggggaaactctcagactatcatgatcgcttgcgtaagccctagtgaccgggacttcatggaaaccctcaacaccctgaagtacgccaatagagccagaaatatcaagaataaggtggtggtgaaccaggataagacctcccaacagatctccgcattgcgggctgagatcgcccgactccagatggaactgatggagtataaggccggtaaaagagttatcggtgaggatggcgctgaggggtactcggatctgttccgggaaaatgcgatgttgcagaaagaaaacggggctctgagacttcgcgtcaaggccatgcaggaagctatcgacgccatcaataatcgggttacgcagctgatgagccaggaggctaacctcctcctcgctaaggctggagatggtaatgaggccatcggcgcactaatccagaactacatccgagagattgaggaactgcggaccaaactgctcgaatctgaagcaatgaatgaatcactccgtagaagcctgtctcgggcttcagctcgtagtccttactccctgggcgcttcccctgccgctcctgcattcggcggttctcccgcatccagcatggaggatgcatcagaggtcatcagaagagctaaacaggatcttgaacggcttaagaagaaggaggtcagacagagaagaaaaagccctgaaaaggaagcattcaagaaaagggccaagctgcaacaggagaactctgaagagaccgatgagaacgaagctgaggaagaggaggaggaaagggatgaatccggctgcgaggaggaagaaggccgtgaagatgaggacgaagactctggctccgaggagtctcttgttgacagtgatagtgatccagaagaaaaagaagttaactttcaggccgatttggcagatctcacctgcgagatagagatcaagcaaaaattgatcgacgaactggaaaactcacaaaggagactgcagacattaaagcaccagtatgaggagaagctgatcctactccagaacaagatccgcgatacacagttggagcgagatcgtgttctacaaaacttgagtactatggaatgttataccgaagagaaggccaacaagattaaagcggattatgagaagagattacgcgagatgaaccgagatctccaaaaacttcaagccgctcaaaaggagcacgcacggctcttaaagaatcagtcccggtatgagcgcgaactaaagaagctgcaggcagaagtggctgaaatgaaaaaggccaaagtcgccctgatgaaacagatgagagaagagcagcagcgcagaagactcgtggagaccaagcgcaaccgtgaaatcgctcagctgaagaaggaacagcggagacaggaattccaaatcagggccctggagtcccagaagaggcaacaggagatggtgctgagaagaaaaacccaggaggtctccgccctgcgtcgtttggctaaacccatgagcgagcgcgtggctggacgtgcgggactgaagccacccatgctagactccggcgctgaggtgtccgccagcaccaccagctctgaggctgaatctggcgctcgaagtgtctcaagtatagtccgacagtggaacagaaagattaaccatttcctcggggatcatcctgctccgacagtgaacgggacaaggcccgctaggaagaagttccagaagaaaggggcatctcagtctttctcaaaggcggctcgcctgaagtggcagtcactggaacggcgaatcatagacatcgtgatgcagagaatgacgatcgttaatctggaagcagatatggagcggttaatcaagaagcgtgaagagcttttcctgctgcaggaagcccttcgcaggaaaagagaaagactacaagcagaaagtcctgaagaagaaaagggcttgcaagagcttgccgaagagatcgaagtacttgccgctaacatcgactatattaacgatggaataaccgactgtcaggctactatcgtgcagctagaagagacaaaggaagaactggactctaccgacacatcggtggtaataagctcttgcagcctagccgaagcccgactcctcctggataacttcctcaaggcgagcattgacaagggattgcaagtcgcgcagaaagaggcccagatcaggctgctggagggcagactgcggcaaactgacatggccggaagctcacagaaccatctgctgctggacgcactccgggaaaaggcggaagcacaccccgaactccaagcactgatctacaatgttcagcaggagaacgggtatgcatccaccgatgaggagatctccgagttcagcgagggtagtttcagccagagttttacgatgaagggctcgacctcacacgatgattttaaattcaagagcgaacccaaactgagtgctcaaatgaaagccgtgagcgccgaatgtctggggccacctctcgatatcagtacgaaaaacattacgaaatcactggctagtcttgtggagatcaaggaagatggtgtgggattctccgttcgggatccctattatcgcgatagggtcagccggactgtgtccctgcctactcgtgggagcacatttccgaggcagagtagagcgacagagacctccccccttacccgcagaaaatcctatgataggggccagcctatccggtccactgacgtgggatttactcctcccagtagtccgcctactcgtccacgcaacgaccggaacgttttttcaagactgactagtaaccaaagtcaaggatcagcgctggataagtctgacgatagtgattcatccttgtccgaggtgttacgcggtatcattagcccagtgggaggcgctaaaggcgctcgaacagccccacttcagtgcgtgtcaatggctgaaggccacacaaagcctatcctgtgtctggacgcaacagatgaactgctatttaccggctccaaggacagatcctgtaaaatgtggaatttggtcacgggccaggagatcgccgctttgaaggggcaccccaataacgtggtctctatcaagtactgtagtcactccggtctggtgtttagcgtatccaccagttatattaaagtctgggatattcgtgattctgctaagtgtatccggactttaactagcagcggacaggtgattagcggcgacgcatgtgctgcaacaagtacccgcgcaattacttcagcgcagggagagcatcaaatcaaccagatcgcactgtcacctagcgggacaatgctgtacgccgcttctggaaatgctgtccggatctgggaactcagccgtttccaacccgttgggaaactcacgggacatattggcccagtgatgtgcttgacggtcacacaaaccgcatcacagcacgatctcgtggtcacaggctcaaaagaccactatgtcaaaatgttcgaactgggagagtgtgtgacaggcactatcggacctacacataatttcgaacctccacactatgatggaatcgaatgcctcgcgattcaaggggacattctgttttctggcagcagggataatgggatcaaaaaatgggaccttgatcagcaggaactgatccaacagatcccaaatgcgcataaagactgggtgtgtgctcttgcctttatcccagggcgaccaatgctgctgtccgcctgtcgggcaggcgtcatcaaggtctggaacgtggataatttcacccctattggcgaaattaagggacatgacagccccattaatgccatttgcacaaacgcaaagcatatatttactgcgagctccgattgccgagtcaaactttggaactacgtacccggattaactccctgcttacccagaagagttttggctatcaagggcagggccactacatgtcccgatccgccacagctgagcttatcaccattgagcttctttccctccttcctttttcctctgttcccccactttgatctctcctgttttctgacttag

SEQ ID NO: 227841 - DNA, 1998 bp, synthetic construct
  misc_feature 1..1998: note = Description of Artificial Sequence: Synthetic coding sequence
  source 1..1998: mol_type = other DNA
atggcggcaggcggaagcacccagcagcgacgtcgggagatggctgccgcttccgctgctgccatctcgggggcagggaggtgccgcctatctaaaattggcgcaacccggaggccacctcccgcaagagttcgggtagcggtgaggttgcggccattcgtagatggaaccgccggtgcctctgaccctccatgcgttcgcggtatggatagttgctccctggagatcgcaaactggaggaaccatcaggagaccttaaaatatcaattcgacgctttttacggggagaggagtactcaacaagacatttatgccggttctgtacagccaattctccgccacttactcgaaggccagaatgcctccgtcctggcttacggaccaacgggcgcaggcaagactcataccatgctgggaagccctgagcagcctggcgtgatacccagggcactgatggatctgttgcagctgactcgggaggagggcgctgaggggagaccctgggctctatctgtgacaatgtcttatttagagatataccaggaaaaagtgctggatctcttagaccctgcttcgggcgatttagtgatcagagaagattgcagaggcaacatcctaataccaggactgagtcagaagcctatctcatcctttgcagacttcgagcgccacttcttaccggcatcccgtaatcggactgttggcgctacacgtctgaatcagcggtcttctcgaagccatgccgtgctgttggtgaaggtggatcagcgtgaaaggctcgctccatttcggcagagagagggtaaactctacctgatcgatctcgccggatcagaggacaatcgtagaactggcaacaaaggcctacgattgaaggaaagtggcgcaatcaatacttcactgttcgtccttggaaaagtcgtggacgccctgaaccagggacttccacgcgtgccctaccgggattccaagcttacccgccttctgcaggactctcttggcggatccgctcactcaatcctgatcgcgaacatcgcccctgaacggaggttctacctggatacggtctccgctctgaactttgccgcaagatctaaagaagtgattaatcgaccctttacaaacgaaagcctgcagccacatgctctgggccctgtaaagctgagccaaaaggaactgctcggtccaccagaagcgaaacgcgcacggggtccagaggaagaggagatcgggtcgcccgagcccatggccgctccggcatccgcttctcagaaattatcccctcttcagaagctcagctctatggaccccgcaatgctcgagaggttactgtccctggatcggctgctcgcctctcagggctcacagggcgctcctctcctctccacgccaaagagggaaagaatggtactcatgaagacagtggaagagaaggacctcgaaattgaacgcttgaagaccaaacaaaaggagctggaggcaaaaatgctggcccagaaagccgaagaaaaggaaaatcattgtccgacaatgcttcgtcccctttcccaccgaaccgtcacgggggctaagcctctcaaaaaagctgtggtgatgcctctgcagttgatccaggaacaggccgcttctccgaatgcggagattcacatccttaagaacaaggggcgaaaacgcaagctcgagtcattggatgccctggagccagaggagaaagccgaggattgttgggagcttcagatctcccctgaattgcttgcccatggacgacagaaaattttagacctcctgaacgaaggctccgcccgagacttgagaagcttgcagcgcattggacccaaaaaggcccagctgatcgtcggatggagagagcttcatgggccattctcccaggttgaggatctcgagagggttgagggcatcaccggtaaacagatggaatccttcctaaaagcaaacatacttggcctggccgcagggcagcgatgtggggcttcttag

SEQ ID NO: 227842 - DNA, 219 bp, synthetic construct
  misc_feature 1..219: note = Description of Artificial Sequence: Synthetic coding sequence
  source 1..219: mol_type = other DNA
atgctggcccaaaaggctgaggagaaggaaaaccattgccctactatgcttagaccactaagtcacaggaccgtgaccggtgcgaagcctctcaagaaggctgtcgtgatgccccttcagttgatacaggaacaggccgcaagccccaacgcagaaattcacatcctcaagaataaagggaggaaaagaaagggcgcaaacataacaactggctattag

SEQ ID NO: 227843 - DNA, 1794 bp, synthetic construct
  misc_feature 1..1794: note = Description of Artificial Sequence: Synthetic coding sequence
  source 1..1794: mol_type = other DNA
atggacagctgcagcttggagatagccaactggagaaaccaccaggagactctgaagtatcagttcgatgccttctacggggagaggtctactcagcaggatatttatgcgggaagtgtgcagccaatcctgcgacaccttctggaggggcaaaacgcaagcgtgttggcctacggcccaaccggggctggcaagacccacactatgcttggcagccctgagcagcccggagtcattcctcgcgcactcatggacctactccagctgaccagagaggaaggagccgagggcagaccctgggcactgtccgtgaccatgtcctatttggagatttaccaagagaaggtgctcgatctacttgaccctgcctctggcgatttggtcatacgcgaggattgcaggggcaacatcctgatccccggactgtcccagaagccgattagttcattcgctgattttgaacgtcacttcctcccagcaagtagaaaccggacggtgggagctacccgtctgaatcagcgaagctccaggagtcatgccgttctcttggttaaggtcgatcaacgcgaaaggttagcaccatttcgccagagagagggaaagctttatctgatcgatctagctgggagcgaggacaacaggagaacaggcaataaaggtctgcgactaaaggagtctggcgcaattaatacatctctgtttgtgttggggaaagtcgtcgatgccctgaatcaggggctcccaagagtgccctaccgcgattccaagctgactcggctgctgcaggatagcttaggagggtccgcccattcaatcctgatcgccaatatcgcaccggaaaggcggttctatttggatactgttagtgccctgaacttcgccgctcgatcaaaagaagttatcaatcgcccatttacgaacgaatcgttacagccacacgcactcggccctgtaaaacttagtcagaaggaattgctcggcccaccagaggccaaaagggcaagggggcctgaggaggaggaaatcggtagtcccgaacccatggcagccccagcttcagcctctcagaaactaagtccattgcagaagctgtcttctatggacccggctatgctggaaagactgttgagcttggatcgcctgcttgctagccagggttctcaaggtgctccactgctttctacccccaagagggagagaatggtattaatgaagactgttgaagagaaggacttagaaattgagaggttaaagaccaagcaaaaggagctggaggcaaagatgctggcgcagaaggccgaggagaaagagaaccactgccctactatgttacgccctttgtctcaccgcacggttacgggtgccaagcctctgaaaaaggctgttgtcatgccactgcaactgattcaggagcaagccgcaagccctaacgccgaaatccacatattgaagaataaagggcgtaagagaaagctcgagtcactggacgccctagaaccagaggaaaaggctgaagactgctgggagctgcagatttcccccgaactgttggcgcatggcagacagaaaatccttgatttgttgaacgagggcagcgccagggacctcaggagcctgcaacgtatcggacccaaaaaggcccagctcatcgtgggatggcgtgagttgcatggaccgtttagtcaggtagaggacctggagcgggttgaggggataacaggcaagcaaatggagtccttcctgaaggctaacatcctggggttggcggcagggcagcgatgcggcgcatcctag

SEQ ID NO: 227844 - DNA, 1794 bp, synthetic construct
  misc_feature 1..1794: note = Description of Artificial Sequence: Synthetic coding sequence
  source 1..1794: mol_type = other DNA
atggacagctgcagccttgaaatcgccaattggaggaaccatcaagagacactgaagtaccagttcgatgccttctacggcgaacgctccacacagcaagatatttatgccggatccgtgcagccaatactgcgacatctgctggagggccagaatgcttcagtcctcgcatacggcccaactggagcaggcaagactcataccatgctgggatctccggaacagcccggagtgattcctcgggcactcatggacctactgcagctcactcgcgaagagggcgctgaaggacggccatgggctctgtccgttacaatgagctacctagagatctaccaggaaaaagtactcgatcttctcgacccagctagcggcgacctggtgatccgcgaggactgccgaggtaacatacttattccgggtttaagccagaaacccatttctagcttcgcagacttcgaacgccactttctgccagccagccggaatcgcaccgtgggagctacccgtctgaaccagcgctcctcccgcagccacgcagtactcttagtcaaggtggaccagagggaacgcttggccccattccggcagagggaaggtaaactctatcttatagacctggctggcagtgaggacaacaggcgtactggaaacaaagggctgcgactcaaagagtcaggcgcaatcaatacttcacttttcgtgctcgggaaagttgtggacgctcttaaccaagggcttcccagggtgccttatcgggatagcaaactgactaggctgctgcaggactcactgggcggaagcgcacactctatactgatcgccaatatcgctcctgagaggaggttctaccttgatactgtttccgccctaaacttcgcagctagatcaaaagaggttataaatcggccttttactaatgagtcgttacaaccccatgcgttaggtccagttaagctgtctcaaaaggagctgctgggaccgccagaagccaaaagggctaggggccctgaagaggaagaaattgggtccccagagcccatggcggctcctgcgtctgcctcccagaagcttagcccgcttcaaaagttgtctagcatggaccccgctatgctggagcggttactttccctcgatagactgctggccagccaaggaagtcagggagctccactactgagcacgcccaagcgggaaagaatggtattgatgaaaaccgtcgaggagaaggacttggagatcgagagactgaagacaaaacagaaagaactggaggcaaaaatgctggcccagaaggcggaagagaaagagaaccactgccccacaatgttgaggccccttagtcaccggaccgttaccggggcaaagcccctgaaaaaggccgtcgtcatgccgcttcagctcattcaggaacaggctgcatctcctaatgctgagattcacattctgaaaaacaagggacggaagcggaaactggagtcgctggacgccctcgaaccagaggagaaggctgaggattgctgggagttacaaatttcacctgaactgctcgcacatggcaggcagaagattcttgacttacttaacgaagggtctgcaagagacctcaggtcactgcagcgaatcggacctaagaaggctcagctgatcgtggggtggagggagcttcatggcccatttagccaggttgaagatctagagcgcgttgagggaatcacaggtaagcagatggagagctttctgaaggccaacatcctgggcctggctgccggtcagcgctgcggagcatcctag

SEQ ID NO: 227845 - DNA, 2883 bp, synthetic construct
  misc_feature 1..2883: note = Description of Artificial Sequence: Synthetic coding sequence
  source 1..2883: mol_type = other DNA
atgaagtcagctagagccaagactcctcgaaaacctacggtgaaaaaaggatctcagacgaacttaaaggacccggttggtgtatattgccgcgtgcggccacttgggttccctgatcaagaatgctgtatcgaggttattaataataccacagtccagctccacacacccgagggctatagactgaatcggaacggagactacaaagaaacgcagtacagttttaaacaggtgtttggaacccacacgacccaaaaggagctttttgacgtggtcgccaacccactcgtgaatgatctgattcatggcaaaaatggtctgttgttcacctatggagtcaccggaagcggaaaaacccatacaatgacaggttctcccggtgaaggcggactcctgccacgttgtttggatatgattttcaacagcatcggaagttttcaagcgaagaggtatgtgttcaagtccaacgaccggaactccatggacatccaatgcgaggtcgatgccctgttggagcgccaaaaacgagaagcgatgccaaaccccaagacatcatctagcaaacggcaggtcgacccagaattcgctgacatgatcaccgtacaggagttttgcaaagcagaggaggtggatgaagactcagtgtatggggtctttgtgtcctatatagaaatttataacaactacatctacgatttgctagaagaagtgccattcgacccaataaagcccaaacccccacagagcaagctgctaagggaggacaagaaccataacatgtatgtggccggatgcacagaagtggaagtcaaaagcacagaagaggcttttgaggtgttctggagaggacagaaaaagcggagaattgcaaatactcatttgaacagggaatcatcgcggtcgcatagtgtctttaacatcaagctcgtgcaggctcctctggacgccgacggagataacgtgctccaggaaaaggaacagataaccatctcccagttaagcctagtcgacctggcgggatcagagcgaactaataggacgcgagcggagggcaatagactgcgagaggcaggcaacattaaccagagtctgatgaccctgaggacctgcatggatgtcctccgtgagaatcagatgtacggcacaaataagatggtcccgtatcgcgacagcaaactgacccacctcttcaagaattattttgatggggaagggaaggtgcgcatgatcgtctgcgttaatcccaaggctgaagactatgaggagaatctgcaggtgatgagatttgccgaggttactcaggaggtggaagtggccaggcctgtggataaggcaatctgcgggctgacccccggacgacgataccgtaaccagccaagggggcctgtgggaaacgaaccacttgtcactgatgttgtgctgcaaagcttcccacctcttccctcctgcgaaattctggacatcaacgatgaacagactcttcccagattgatcgaagccctggagaaacgccacaatctgcgccaaatgatgatcgacgagtttaacaaacaaagcaatgctttcaaggcactgctacaagagtttgacaatgccgtgctatccaaggagaatcatatgcagggcaaactgaatgagaaagaaaagatgatttcaggccagaagctcgagatcgagcggctagaaaaaaagaataaaactttggagtataaaatcgaaatcttagagaagacaaccacaatttatgaggaagataaacgaaacctgcaacaggaactcgaaacgcagaatcagaaactgcagagacagttttccgacaagcggagactggaagctagactgcaaggtatggtcaccgaaaccaccatgaaatgggagaaggaatgcgagcgacgggtagccgcaaaacaactcgaaatgcagaataagctttgggtcaaggacgagaagctcaagcagttgaaagcaattgtgacagaacccaaaactgaaaaacctgagcgcccttcgagggaaagagatcgcgagaaggtgactcagcgctctgtgagccccagtccagtacctctcagcagtaactatatcgctcagatttctaacggacagcagctgatgtctcaacctcagctccaccgcagatctaactcatgtagctctatctctgtggccagctgcatctccgagtgggaacagaaaatccccacatacaatacacctcttaaggtaacctctattgcaagaagacgacagcaggagcctgggcagagcaagacttgcattgtaagtgatcggagacggggtatgtactggaccgagggtagggaggtggtgccgaccttcagaaatgagattgagattgaggaggatcactgcggaaggctcctgttccagcctgaccaaaatgcgcctcccatcagactacggcatcgcagatcaaggagcgcaggagatagatgggtggaccataagcctgcatctaatatgcagaccgaaaccgttatgcagccgcatgttccacacgccataacagtgtccgtggctaacgaaaaagctctggccaagtgtgagaagtacatgctgactcatcaggaattggcgtccgatggcgaaatcgagacgaagctcatcaaaggggacatctacaagacacgtggaggaggacagagcgtgcaatttactgatatcgaaaccctgaagcaggaatcaccaaatggttctcgtaagcggcgaagttccacagtggctcctgctcagcccgacggagccgaaagcgaatggaccgacgttgaaacccggtgttccgtcgctgtggagatgcgagcaggatcccagttgggaccaggctaccagcatcatgcccaaccaaagagaaagaagccatag

SEQ ID NO: 227846 - DNA, 2022 bp, synthetic construct
  misc_feature 1..2022: note = Description of Artificial Sequence: Synthetic coding sequence
  source 1..2022: mol_type = other DNA
atgatcacggtccaggagttttgcaaggctgaggaggttgatgaagatagcgtgtatggcgtttttgtctcctatattgagatttacaataactacatttacgacctcttggaagaagtcccattcgatccaattaaacccaagtggaacagctgctcaacacccatgagaaacaccgatttcgtgccccctcagtcaaagctcttacgagaggataaaaaccataatatgtacgtggccggatgtacagaggttgaagtgaagagcactgaggaggcgttcgaagtgttctggaggggccagaagaagcgcaggatagcaaacactcacctgaaccgagagagctccagatcacatagtgtgttcaacatcaaactcgtgcaagctccactcgacgctgatggtgacaacgttcttcaggaaaaggagcagattaccatttcgcaactgagcctggtggacctggccggaagcgaacgaactaatcgcacccgtgccgaaggcaataggctgcgggaggcaggcaacataaaccagagtttgatgacgctgcggacatgtatggacgtcctacgtgaaaatcagatgtacggcaccaataaaatggtaccatacagagatagcaaacttactcatctctttaagaactacttcgacggtgagggtaaggtgcgcatgattgtatgcgttaaccccaaggccgaagactatgaagagaacctgcaggttatgcgcttcgccgaggtgacacaagaagtggaggtggccaggcccgtggataaagcaatctgtggcttaactcctggacgtcggtaccggaatcagccccgtgggcctgtgggcaatgagccactggtaactgacgttgtcctgcaatcgttcccgcctctgcccagctgcgagattctcgacattaatgatgagcagacactccccaggcttatcgaggcacttgagaaacgccacaacttaagacagatgatgatcgatgaattcaataagcagtccaatgcatttaaagccctgctgcaggagtttgacaacgccgtgcttagcaaagaaaaccacatgcagggcaagttgaacgagaaggagaaaatgatcagcggccagaagctagagatcgaacgtctcgagaagaagaacaagacactggagtacaagatagagatccttgaaaagaccacaactatctacgaagaggacaaaaggaatctgcaacaggaactcgagactcagaatcaaaagctgcagcgccaattttccgacaagcgtaggttggaggcacggcttcagggcatggttaccgagacaaccatgaagtgggaaaaggagtgcgaaaggagggtggctgctaagcagctggagatgcagaacaagctgtgggtgaaggatgaaaagctgaagcagttaaaggcaatcgttaccgagcccaaaactgaaaagcctgaaaggccttcacgcgaaagagatagggaaaaggtcacacaacggagtgtgtccccatcacctgtccctctgttatttcaaccagatcagaatgcacccccaattagactgagacaccggagatccagatccgccggtgatcggtgggtcgatcataagccagcaagcaacatgcagacagaaacggtgatgcaaccccacgttccgcatgccattacagtgtctgttgctaacgagaaggcactcgccaaatgtgagaaatacatgctcacacaccaagaattggcgagcgatggggaaatcgaaacaaaattaatcaagggcgatatctacaaaacgcgcggtggcggacaaagtgttcagttcaccgatattgagactctgaagcaggaatctccgaacggcagtaggaagcgaaggtcctccacggtggcacccgctcagcctgatggagccgagtcagagtggactgacgtagagacccgatgttcggtggctgtggagatgagagccggatcacagctgggtccaggttaccagcatcatgcacagcccaagcgcaagaagccttag

SEQ ID NO: 227847 - DNA, 2022 bp, synthetic construct
  misc_feature 1..2022: note = Description of Artificial Sequence: Synthetic coding sequence
  source 1..2022: mol_type = other DNA
atgatcacagtgcaggaattctgtaaagccgaggaggttgacgaggacagcgtgtatggggtctttgtgagctatatcgagatttacaataattatatatatgacttactggaagaagttccttttgaccccataaaacccaagtggaattcttgtagtacacccatgcggaatacggactttgtgcctccccagtccaagcttcttcgtgaggacaagaaccataacatgtacgtggccggttgtaccgaggttgaggtgaagtccactgaggaggcctttgaggtattttggcgaggtcaaaaaaaacggagaatcgcaaatacacacctgaatagggaaagctcccgaagtcactccgtattcaatatcaagctggtgcaggcccctctggatgccgatggggataatgtactgcaggagaaggagcagattacaatcagccagttaagtctcgtggatctcgcgggttcggagcggaccaaccgcacaagggccgagggcaaccgtttacgcgaggccggaaatatcaaccaatccctaatgacattacggacatgcatggatgttttgcgggaaaaccagatgtatggcaccaacaagatggtcccctatcgagactctaaacttacccacctctttaaaaactacttcgacggagaaggaaaagttaggatgattgtgtgcgttaacccaaaggccgaggactacgaggagaacctgcaagtgatgaggtttgcagaggtgacacaggaagtcgaggttgccaggcccgtcgataaggccatctgcgggttgacacccggacggaggtatcgaaaccagcccagaggccctgtcggtaatgagcctctggtgacggatgttgtcctccaatccttccctcctctcccgagctgtgagatcctagatatcaatgatgaacagacactccctcgactcatagaggcactggagaagcgccataatctccggcaaatgatgatcgatgaattcaacaagcaatccaatgcatttaaagccctgctccaggagtttgacaatgccgttctatccaaagagaaccatatgcaggggaaattgaatgaaaaggagaaaatgatcagcggccagaagctggagatcgagcggctggagaagaagaataagacactggagtataaaatcgaaatattagagaaaactaccacaatctacgaggaggacaaaaggaatcttcaacaggagcttgagactcaaaaccaaaaattgcagcgccaattctctgataaaagacggttagaggctaggctgcagggaatggtcactgagactacaatgaagtgggaaaaggagtgtgagcggagggtggccgctaaacaacttgagatgcaaaataagttgtgggtcaaagatgaaaaactcaagcagctgaaggctattgtgaccgaaccaaaaacagaaaaacccgaaagaccatcgcgcgagcgcgacagagagaaagtgactcagcgctccgtgagcccatctccggtgccactccttttccaacctgatcagaatgctccacccatcagactaaggcaccgtcggtcccggtcagcaggtgaccgctgggtggatcacaagcctgcgagtaacatgcagactgaaacagtgatgcagcctcacgttcctcatgcaatcacagtatcagtcgcgaacgaaaaagccttggccaaatgcgaaaagtacatgctgacgcaccaggagctagcatctgacggcgaaattgagacgaaactgattaagggagatatctataagacaaggggaggaggacagagcgtccagtttacagatattgaaacgctgaaacaggaaagtcccaatggaagcagaaagcggagatccagcaccgtggcacccgcacagcccgacggcgctgagtccgaatggacagatgttgaaactcgatgctcagtggcagtggaaatgagagccggatcgcaattggggccagggtaccagcaccacgctcaaccgaagaggaagaagccttag

SEQ ID NO: 227848 - DNA, 2571 bp, synthetic construct
  misc_feature 1..2571: note = Description of Artificial Sequence: Synthetic coding sequence
  source 1..2571: mol_type = other DNA
atgaaaagtgcccgagctaagacgccgaggaagcccacggtcaagaaaggaagccagactaacctaaaagacccggttggcgtctattgccgggtaagaccacttggatttcccgaccaggagtgttgtatcgaggtaattaacaacaccacagttcagctgcacacacccgaggggtataggctgaacaggaacggcgattataaagagacccagtactcattcaagcaggtgttcggcacgcatacaacccagaaggaactgttcgatgtcgtcgcaaatccactggtcaatgatctgattcatggcaagaacggcctcttgttcacctacggtgttactggctccggaaaaacacacacaatgaccggatcaccgggtgaaggcggactgctcccgcgttgcctggatatgattttcaatagcataggttcatttcaagctaaaaggtatgtctttaagtccaacgaccggaactccatggacatacaatgcgaagtggacgcgctgctggaaagacaaaaacgggaagccatgccaaaccctaaaaccagttcttccaagcgccaagtggatccagaattcgctgacatgatcaccgtgcaagaattctgtaaggcagaggaagtggacgaggattccgtttatggcgtgttcgtgtcatacattgaaatttacaacaactatatatacgacctccttgaggaagtcccgtttgaccctattaaacccaagccaccccagtctaagctcttgagagaagataagaatcataacatgtacgtggccggatgtaccgaagtcgaagtcaagtccaccgaagaggcctttgaggtgttttggcgaggccagaaaaagaggcgaattgccaacactcaccttaaccgagagagttctcgctcccacagcgttttcaacatcaagctggtgcaggcccctctggacgctgacggtgataatgtactacaggaaaaggagcagatcactatttctcagctttccctagtggacctagcgggtagtgagcggacaaatcgcaccagggccgagggaaatcggctgagggaggccggtaacatcaaccagagcctgatgacactgaggacatgcatggatgtgctaagagaaaaccagatgtatggtactaacaagatggtgccatacagggactctaaattaacccacctgtttaaaaactacttcgatggggaggggaaagttagaatgatcgtttgcgtgaacccaaaggctgaggattacgaggaaaatctccaggtgatgcgctttgctgaggtaactcaagaggtagaagtggcaagaccagtggacaaggctatttgcggtctgactcctggcagacgctacagaaaccaaccccgaggtcccgtgggaaacgagccactggtgactgacgtggttctccagtcattccctcccttgcctagctgtgaaatcctagacatcaatgatgaacagacgctgccgaggctcatcgaggcactggagaaacgacataacctacgacagatgatgattgacgagttcaataaacagtcaaatgcctttaaggctttgctccaggagtttgacaatgcagttctttcaaaggagaatcacatgcagggcaaattgaatgaaaaggaaaaaatgatctccggccaaaaactggagatcgagagactggagaagaaaaacaagactctcgagtacaagatcgagatcctcgagaagacaaccactatctatgaggaagataaaagaaacctccagcaggagctagagacccaaaaccagaagctccagagacagttctctgacaagaggcgcctggaggcgaggctgcaaggaatggtcactgagaccactatgaagtgggagaaagagtgtgagaggcgagttgccgctaaacagttagaaatgcaaaataaactgtgggtgaaggatgagaaacttaagcaactgaaggccattgtgacggaacccaaaaccgaaaagcctgaaaggccatctcgtgagcgggacagagaaaaggtgacgcagcggtcagtgagcccctcacccgtgcctctgctgtttcagcctgaccagaatgcaccccctatacgcttaaggcataggcgctcccgctcggctggcgacaggtgggtagatcacaaacctgcctcaaacatgcagacagaaaccgtgatgcagcctcacgtaccacatgccattacagtgtctgtggccaacgagaaggctctagctaagtgcgaaaagtatatgctgacccatcaagaactcgcctctgacggtgagatcgagaccaagctgattaaaggtgacatttataaaacaaggggcggaggccagtcagttcagtttaccgatatcgagaccctaaaacaggagtctccaaacggctcccgtaagaggcggagctcaaccgtcgcccctgcccaaccagacggcgctgaaagtgagtggaccgacgtcgaaacaaggtgtagcgtggctgtcgagatgcgggcagggagccagcttggaccgggttaccagcaccatgcccagcccaaaagaaagaagccttag

SEQ ID NO: 227849 - DNA, 2520 bp, synthetic construct
  misc_feature 1..2520: note = Description of Artificial Sequence: Synthetic coding sequence
  source 1..2520: mol_type = other DNA
atgaccggtagtcccggtgaaggaggccttttgccgaggtgtctcgacatgatctttaactccatcggcagtttccaggccaaacggtacgtgttcaagtcaaacgaccgtaattccatggatatccagtgcgaggtggacgccttgctggaaaggcaaaagcgggaggccatgccgaatcccaagacgagtagctcaaagcgccaggtcgaccctgagttcgcagacatgatcaccgttcaagagttttgtaaggccgaagaagtagacgaggactccgtgtacggcgtattcgtcagctatatagaaatttataataattacatctatgacctactcgaggaggtgcctttcgacccaataaagcccaagcccccacaaagtaagctgctgagagaggacaaaaatcataatatgtatgtcgcagggtgcaccgaggtcgaggtgaaatctacagaagaagcctttgaggtgttttggcgtggtcagaagaagcggcgtatcgcaaacactcatctgaatcgggagagttccagatcgcactccgtgttcaatattaagcttgtgcaagctccactggacgccgacggcgataatgtgctgcaggaaaaggagcagatcactatctctcaactctcattggtcgacctggcagggtccgagcgcactaatcggacgcgtgcagagggtaacaggctgcgggaggctgggaatattaatcagtccctgatgacacttcgtacttgtatggacgtcctcagggagaaccagatgtatgggaccaataagatggtaccttacagggacagcaaactgacccacctcttcaagaactacttcgacggagagggcaaagtgcgcatgatcgtatgtgtaaatcccaaggctgaggattatgaagagaacctccaggtgatgcgatttgcagaggttacgcaggaagttgaggtggcaagacccgtggataaggccatctgtggcctcactccagggagaagatacaggaatcaacctcggggacccgtggggaacgagcctcttgtaactgacgtagtgttgcagagttttccaccgctccctagttgcgagatcttggacattaacgacgagcagactctgcctcggctaattgaagctctcgaaaagcgccacaacttacggcagatgatgatagacgaatttaataaacaaagcaacgccttcaaggccctgttacaggagttcgacaatgcggtgctgagtaaggagaaccatatgcagggaaaactgaacgagaaagagaaaatgatctcggggcagaaactggagattgagcggctggagaaaaaaaataaaaccttagagtacaagatagaaatactcgaaaagactacgactatctatgaagaggacaagcggaacctgcaacaggagctagaaacccagaatcagaagctccagaggcagttctctgataaacggagactggaagcccgtctgcagggcatggtgacagagaccactatgaagtgggaaaaggagtgtgaacgccgtgtcgcggcaaaacagttagagatgcaaaacaaactgtgggttaaagatgagaaactcaaacagctgaaggcgatcgtgaccgaacccaagacagaaaaaccagagcggccatcaagagaaagggaccgggaaaaggtgactcagaggtctgtctctccttcccccgtgcccctctcgtctaattatattgcccagattagcaacggccagcagctgatgtcacaaccacagttgcatcgcaggtcaaactcctgctctagcatttccgttgcctcttgcatctctgagtgggagcagaagatccccacatacaacacacccttgaaagttacctctatcgcccgacggaggcaacaggaacccggacagtcaaaaacatgcattgtgtccgatcggagacgcggaatgtactggaccgagggacgtgaagtggttccaacctttagaaacgaaatcgagatcgaagaggatcactgtggtcggcttctcttccaaccggaccagaacgcgcctcccattcgcctgaggcatcgacgctctaggtccgccggagacagatgggttgatcacaaacccgctagtaatatgcaaaccgagacagtaatgcagcctcacgtgccacacgctattaccgtgtctgtggcgaatgagaaagccttggctaaatgcgagaaatatatgcttacccatcaagaacttgcatccgatggagagattgagacgaagctcatcaaaggcgacatctacaagaccagaggcggaggccaatcggtgcaattcacagatattgagaccctgaagcaagaatcccctaacggcagcaggaagcgaaggtcctcaacagtcgcgccagcccaacctgatggagccgaatctgagtggactgacgtagaaaccagatgtagcgtggccgtggaaatgcgtgccggttcccagctcgggccagggtaccagcaccacgcacagccaaagagaaagaagccatag

SEQ ID NO: 227850 - DNA, 3705 bp, synthetic construct
  misc_feature 1..3705: note = Description of Artificial Sequence: Synthetic coding sequence
  source 1..3705: mol_type = other DNA
atggcatcatggctgtacgagtgtctctgtgaggccgagctcgctcaatactattcccacttcacagccctcgggctgcagaaaattgacgaactggctaagatcacaatgaaagactactctaaactcggggtgcatgacatgaacgatagaaagcgactgtttcaactgattaaaatcattaaaattatgcaggaggaagacaaagccgtgagtatccctgagcgccacttgcagacatcgagcttgcggattaaaagtcaggaactgcgctccggtccaaggaggcaactcaatttcgacagccctgccgacaataaggatcgaaacgcatcaaacgacgggttcgagatgtgcagtctcagcgatttcagcgccaacgaacagaagtcgacgtatctaaaagtgcttgaacatatgttgcctgacgactcgcagtaccacaccaagactgggatcctcaatgctaccgctggcgattcctacgtccagactgagatcagcacaagccttttcagtcctaattacctctctgccatcctgggcgactgcgacattcctattatccagcggatctcccacgtgagcggatacaattatggtattccccatagctgcatccgccagaacactagcgaaaaacaaaacccatggactgagatggagaaaattagggtgtgcgtccgcaagcgccctttgggcatgcgcgaggttcgtcgaggggaaataaacatcataacagtggaggataaggaaactctgttggttcatgagaagaaagaggccgtggatctgactcaatacatcctgcaggtcattctcaaagggagcaaagagcggagcactggtgcaactggcgtgaacgccgatagctcccgaagccatgcagtgattcaaattcagattaaagactcagcaaagcgtacgtttggcaggatctctttcattgacctcgccggatccgaaagagcggctgacgcgcgagactcagaccgtcaaaccaaaatggaaggcgctgagatcaaccagtctctgctcgccctaaaggaatgtattcgagcactggaccaagagcatactcataccccctttcgtcagtccaagttgacacaggtactgaaagactcgttcataggcaacgccaaaacctgcatgattgctaatatttcaccctcccacgtagccacagagcatactctcaacactcttcgctatgccgaccgggtgaaggagctcaaaaaaggcatcaagtgctgcacatctgtgactagccgcaacaggacttctggtaacagtagcccaaagcgcattcaatcatcaccgggtgcactgagcgaggataaatgcagccccaagaaagtgaaactggggttccagcagagcttgaccgtggctgcccctggcagcacaagagggaaggttcacccgttaactagtcacccacctaacattccgttcacatccgccccaaaggtgagcggcaagcgcggtggatctaggggctcaccctctcaggaatgggttatacacgcatcccccgtcaaaggcactgtccggagtggacacgtggctaaaaagaaacccgaggagtctgctcctctgtgctcagagaaaaaccggatgggaaacaaaaccgttctggggtgggaaagcagagcatctggccctggggagggacttgttcggggaaagctatctacaaaatgtaaaaaggtgcagactgttcagcctgtgcaaaagcaactggtgtccagggtggagctttctttcgggaacgcgcaccaccgcgctgagtatagtcaagacagccagagaggcacaccagcccgacctgcatccgaggcatggacaaacataccaccacaccaaaaagaacgggaagaacatcttagattctaccatcagcagtttcagcagccccctctgctgcaacagaaactgaagtaccaacctttaaaacggtctttacgacaatacaggccacccgaaggccaactcaccaatgaaaccccccctctgtttcactcttattctgaaaatcacgacggggctcaagtagaagagctggacgattctgatttctcagaggacagctttagtcatatttcctctcagagggctaccaaacaacgtaatacactggaaaactcagaggattctttctttctgcaccaaacatgggggcagggccctgagaagcaggttgccgagcggcagcagtctctgttttctagcccccgaactggggataagaaggatctcaccaaatcgtgggttgattcaagagacccgatcaatcatagacgcgctgcactggatcacagttgtagtcccagcaagggtcctgtcgactggagtagagaaaactccacttcttccggaccttcacctcgggactcgctggctgagaagccttactgctcacaggtggacttcatttacagacaggaaaggggaggtggaagcagcttcgacctgagaaaagatgcctctcagagcgaagtaagtggcgaaaatgagggcaatctgccatccccagaggaggacggctttaccattagcctttcacatgtggccgtgccaggaagcccagaccagagggacaccgtgactacacccttgagggaggtgtccgccgacgggccaatccaggtgacctcaaccgtgaagaacggccatgccgtcccaggagaggaccctcggggacagctgggcacccacgcggagtatgcatccggccttatgtctcctctgacaatgtcattgttggagaatcctgacaacgaaggatcgccccctagcgaacagcttgtgcaggacggtgcgacacatagcctcgtggccgaatctacaggcggtccagtcgtgagccacactgttcctagcggtgaccaagaggcggctctaccagtgagctctgcgacgaggcacttatggctgtcctcaagcccacccgataataaaccaggtggggacctccctgcattatctccctctcctattcggcagcatcctgcggacaagctgcctagtagagaggccgacctcggagaggcgtgtcagtctcgagagaccgttttgttctctcacgagcacatgggatccgaacagtatgatgccgacgcagaggaaacaggattggacggatcatggggttttcccggaaagccttttacaaccattcatatgggcgtgccacactcgggtccaacactcaccccccgaacgggaagttccgacgtggcagatcagctgtgggcccaggagagaaaacatcctaccagactaggttggcaggaattcggcttgagcacagatccgattaaacttccctgtaactcagaaaacgtgacctggctcaagccacgcccaatctcgagatgtctggcccgaccttcgtcacctctcgtgccaagttgctctcctaagaccgccggaactctccggcagcccacattggaacaggctcagcaagtggtgattagggctcatcaggagcagctggacgagatggcggagctgggcttcaaggaggaaactctgatgagccagctggcatccaacgatttcgaagactttgttacccagctggatgagattatggttttgaagtccaagtgtatccagagccttcggagccagctccagctctacctcacctgccatggaccgacggctgctcctgagggcaccgtgccttcctag

SEQ ID NO: 227851 - DNA, 4107 bp, synthetic construct
  misc_feature 1..4107: note = Description of Artificial Sequence: Synthetic coding sequence
  source 1..4107: mol_type = other DNA
atggccagctggctttacgagtgcttgtgtgaggctgaactcgcccaatactactctcacttcaccgcactggggctccagaaaattgacgaactcgccaaaataaccatgaaagattattctaaactgggggttcatgatatgaatgatcgaaaacgtctatttcaattaattaagatcattaaaattatgcaagaggaagataaagccgtgtcgatccctgagaggcatctgcaaacctcctccctgaggattaaatcgcaggagctccggagtggtccgagaaggcaactcaactttgactcccccgcagacaataaggatcggaatgcaagcaatgatgggttcgaaatgtgttcattgtctgatttctccgctaatgagcaaaaaagcacttacttgaaggtgctggagcatatgctgccggatgactcacagtatcacacaaagactggaattttaaacgccaccgcaggcgacagttacgttcagacagagatcagcaccagtctgtttagccccaactatctgagtgctatcctcggcgattgcgacattcccattatccagaggattagccacgtcagtgggtacaattacggcattccacattcttgtatacgccagaacacaagtgaaaagcagaatccttggacagaaatggaaaaaatccgcgtgtgtgtccgcaaaaggcctctcgggatgcgagaagtacgcaggggcgagatcaacatcatcaccgtggaggacaaggaaaccctcctagttcatgagaagaaggaggctgtggacctcacacagtacattcttcagcatgtgttttactttgatgaagtgttcggcgaggcttgtaccaaccaagatgtatacatgaagacgactcaccctctgatccagcacatcttcaacggaggaaacgcaacatgtttcgcttatggccaaaccggtgctgggaaaacctataccatgatcggcacccatgaaaatcccggactctatgcactcgccgctaaggatatcttcagacagttggaggtgtctcagccccgtaagcatttgtttgtgtggatttctttctacgagatctactgtggccagctgtatgatctgctaaatcgacggaaacgtctattcgctcgggaggattccaagcacatggtacagatcgtcggactgcaagagctgcaggtagactccgtggagttgttacttgaagtgatcctgaaaggttccaaagagcggtcaacaggggcaacgggtgtgaatgcggacagttcccgatcccacgcggtgattcagattcagatcaaggattctgccaagcgcacttttggcagaatttcatttattgacctggcaggatcagaacgggcagcggacgccagggatagcgatagacagaccaaaatggagggcgcagaaattaatcagagcttacttgctcttaaagagtgtataagggctctcgatcaggagcacacccacactccattcagacaaagtaagctaacacaggttctgaaggactccttcattgggaacgctaaaacctgtatgattgccaatattagccccagtcatgtggcgactgaacacacgcttaacactcttcgctacgccgatcgagttaaagaactcaagaaaggaatcaagtgttgcacctccgtcacttctcgcaaccgaacttctggaaattcctcccccaagcggattcagagctcccccggagccttgtccgaggataagtgttcaccaaaaaaggttaaactgggatttcaacagtcactgaccgttgcagcgccaggttcaacgcggggaaaggtgcaccctctgacctctcatccccctaacataccctttacgtccgctccaaaagtatcggggaagagaggcggaagccgcggatctccgtcacaggaatgggtgatacatgcctcccctgtgaagggaacggtgaggagcggtcacgtggctaagaagaaacccgaggagagtgccccactgtgctccgaaaaaaaccgaatggggaacaaaactgtgctcggatgggagagccgggcatccggacccggagagggattggttcggggaaagctctccactaagtgcaaaaaagtacagaccgtgcagcccgtccagaagcagttggtgtcacgcgtggaattgtcattcggcaatgcccatcacagagccgagtattcacaagactcccaacgaggtactccggcaagacccgcttccgaggcatggaccaatattcctccccatcagaaggaaagagaagaacacttgagattttaccaccaacagtttcagcaaccacccttgcttcagcaaaagctgaagtaccagccgctaaagaggtcgttacgtcaataccgtccaccagaagggcaattgactaatgaaaccccacctctgtttcactcttacagcgagaatcacgatggagcacaggtcgaagagctcgacgactctgattttagcgaggatagtttttcccacatttctagtcagcgtgccacaaaacagcgtaatacactcgagaattctgaggacagcttttttctccatcagacctggggtcaggggcctgagaagcaggttgctgagaggcagcagagtctgttttcttctccacgaacgggagataaaaaggaccttactaaatcttgggttgattctagagacccaatcaatcaccgcagggctgcactggaccactcctgcagtccctctaaaggacctgtcgattggtctcgggagaattccacgtcatccgggccatcacccagggactcgctggccgaaaaaccttattgttcccaggtggacttcatttatcgccaggagagagggggaggtagttccttcgacctgcggaaggacgcctctcagagcgaggtaagcggcgagaatgagggcaacctgccgtcccccgaagaggacggcttcacaatctctttgtcacatgtggcagtgccgggatccccagaccagcgcgacaccgttactacccccttgcgcgaagtttcagccgacggacctatccaggtaacgagcaccgtcaaaaatgggcatgccgtgccaggggaggaccctaggggacaattgggaacgcatgctgaatatgcctctggtctaatgtcacccctcaccatgtcgctgctggagaatcctgacaacgaaggatctccaccaagcgagcagttggtccaggacggcgctacccactccctggtagctgaatccacgggtggccctgtggtatctcacacagtgccgtccggagaccaggaggcagcccttccagtgtcttctgcaacaaggcatctatggctttcttctagcccgcctgataataaacccggaggagacctcccagccttaagcccctctcctatcaggcaacatccagcagacaagctcccctcaagagaagcagacctgggcgaagcttgtcagtctagagagacggtgctgttctcacatgagcatatgggcagcgaacagtacgatgccgatgcagaggaaaccggcctggacgggagctggggtttccccggtaagccattcaccaccatccacatgggcgtgccacactccgggcctaccctcacaccaagaactggatcttctgatgtcgctgatcagctgtgggcacaggagcgcaaacaccccactcggctgggatggcaggaattcgggctgagtaccgacccaatcaaactaccctgtaacagtgagaatgtcacctggttgaagcctcgcccaattagccggtgtttagcacgaccctcttctcctctcgtgccttcttgcagccccaaaacagctggtacactccggcagccaaccctcgagcaagctcagcaggtggttataagggcccatcaagagcagctggatgaaatggctgagcttggattcaaggaggagaccttgatgtcacagctcgcttccaatgactttgaggatttcgttactcaattggatgagattatggttttaaaatccaagtgcattcagagtctccgcagccaattgcagctttatctgacatgccatggacccactgctgcgcctgagggtactgtaccaagctag

SEQ ID NO: 227852 - DNA, 4107 bp, synthetic construct
  misc_feature 1..4107: note = Description of Artificial Sequence: Synthetic coding sequence
  source 1..4107: mol_type = other DNA
atggcctcttggttgtacgagtgcttgtgcgaagccgagctggcccagtactatagccatttcacagctctggggctccagaagattgatgagctagctaagattactatgaaagattacagcaagttaggagttcatgacatgaatgaccggaagagactttttcagctcattaagattatcaagatcatgcaggaggaggataaggccgtcagcattcccgagcgtcaccttcagacctcctccctgcggataaagagtcaggagctcaggtcggggccacggcgacagctgaattttgatagccccgcagataacaaagatagaaacgcctccaatgatggattcgagatgtgttctttgtccgatttttctgctaatgagcagaagtccacttacctcaaagtgctagaacatatgctgcctgacgattcccagtaccataccaagacgggcatacttaatgccacggccggtgacagttacgttcaaacagagatttctactagcctctttagccctaactatctttctgccatattgggggattgcgacattccgataatccagcggatatctcatgttagcggttataattacggcatccctcactcttgcattcgccagaacacatcagagaagcagaacccgtggactgagatggagaagatccgggtctgcgtgcgcaagcggccattgggtatgcgcgaggttaggaggggcgaaatcaacatcattaccgtggaagataaagagactctacttgttcatgaaaagaaggaagcggtggatctcactcagtacattctgcagcacgtgttctacttcgatgaagtgtttggcgaagcttgcacgaatcaggatgtgtatatgaagaccacgcatcctttgattcagcacatattcaatggtgggaacgctacatgcttcgcctacggccagaccggcgctggcaagacgtataccatgatcggcacccacgagaatcccggactgtacgcactcgctgccaaggatatcttccgtcagcttgaggtgtctcagcctagaaagcatctctttgtatggatctccttctacgagatttattgcggtcagctgtacgatctcctcaacagacgcaagcggctcttcgcccgagaggactccaaacacatggtccagatagtgggcctccaggagctgcaagtagatagtgtagagttgttactcgaagtcatactgaaaggctccaaagagagaagtactggcgcaacaggggtcaacgccgactctagcaggtctcacgctgtgatccagatccagatcaaagacagtgccaagcggacatttggtcgaatctctttcatcgacctggccggatcagaaagagcagcagatgccagggattcagaccgccagacaaagatggagggcgcagaaattaatcaaagtctactcgcattgaaggaatgtattcgcgcattggaccaggagcatactcacacccctttcaggcaaagtaagcttactcaggttctcaaagattcttttattggcaatgcaaaaacgtgtatgatcgctaacatttctccctcacacgtagctacagaacatacactgaataccctcagatatgctgaccgggtcaaggaacttaagaaaggaatcaagtgctgtacgagcgtgacctccaggaaccggacgtccggaaacagcagtcccaaaagaattcaatcatctccaggtgctttgtctgaggacaagtgcagccctaaaaaggtgaagttgggatttcagcaatctttgacggttgcagcacctggcagcacccgaggcaaggtacatcctttgaccagccaccccccaaacattccgtttacctccgcgccaaaggtctcagggaagcgcggtgggagccggggaagtccaagccaagagtgggtaatccatgcaagtcccgtgaagggcacggtccgctccggacatgtggctaaaaaaaagccagaggagtccgcacccctttgctcagaaaagaatcgcatgggcaacaaaactgttcttggctgggagtcacgcgcatccggaccaggggaggggctcgtacggggaaagttgagcaccaagtgtaagaaggtccagacagtacaacctgtacagaagcagctagtgtctcgcgttgagctctcctttggaaacgctcatcatcgggctgaatactctcaggactctcagaggggaacgcctgcacgtccagcgtctgaagcatggacaaatatccctcctcaccagaaagagagggaagaacacctgcgcttttaccaccagcagttccaacagcccccactgctccaacagaaactgaaataccagcccctaaagcgcagtctgagacagtacaggcccccagagggccagctcactaatgagacgcctccactttttcatagctactccgaaaaccacgacggagctcaggtcgaggagcttgacgacagtgatttcagtgaggactcgttctctcatatatcaagccagagggcaactaagcaacgcaatacactagagaatagtgaagacagcttctttctccaccaaacttggggacaggggccagagaagcaggtcgccgaaagacaacagagcttgttctctagcccaaggaccggagataagaaggacttaacgaaaagctgggtcgattcaagagatccgattaaccaccgcagagcggctcttgaccattcctgtagcccgagcaagggtcctgtggattggagtcgcgaaaatagcaccagctcgggcccatctccaagggactcactggccgaaaagccctattgttcccaggtcgactttatttatcggcaggagcgcggaggtggctcctcattcgatctcagaaaagacgcttcacaatccgaggtgtcaggcgaaaatgagggaaaccttccttcacctgaagaagatggcttcacaatttctctgtctcacgtggcggtgcccggaagcccggaccagcgcgacactgttactacccctctgagggaagtgagtgcagacggaccgatccaagtaacttcaaccgtcaaaaatggccatgccgtacccggtgaggacccacggggacagctcgggactcacgcagaatacgcttcaggtctgatgtcacccctcactatgagcttgctggaaaatcccgataacgaaggcagccctcccagtgaacagctggtacaggatggcgcaacgcatagcctagtggctgagagtactgggggtccggtcgtgtcacacactgtgcctagcggtgaccaggaagcggcactaccagtgtctagtgcgacccgccacctgtggctgagtagctcaccacctgacaacaaacccggtggagatctaccggctcttagccccagtcccatcaggcagcatcccgcagacaagctgcccagccgggaggccgacttgggcgaggcttgtcagtccagggagacggtactgtttagccacgaacacatgggaagcgagcagtacgatgcagatgctgaggagaccggcctcgacggctcttggggattcccaggtaagcccttcactaccatccacatgggtgttcctcactccgggccaactctgacccctcggacgggatcctctgacgttgcggatcagctgtgggcccaggagcgcaaacatcccacccgcctgggatggcaagagttcggactgagcacggatcccatcaaactgccatgtaactcagagaatgtcacttggctaaagcccagacctatcagccgctgcctggccagaccttccagccctctagttccttcttgcagtcctaaaactgccggaaccttaagacagcctacactggaacaggcacaacaggttgtcatccgagcccaccaggagcagctggatgaaatggccgaactcggttttaaggaagaaactcttatgtcacagctcgcatcaaatgattttgaggatttcgtgacccagctggatgagatcatggtccttaaatccaagtgcatccaatctttgcgttctcagttacagctttacctgacttgtcatgggccaacagccgctcccgaggggacagtgccctcttag

SEQ ID NO: 227853 - DNA, 3477 bp, synthetic construct
  misc_feature 1..3477: note = Description of Artificial Sequence: Synthetic coding sequence
  source 1..3477: mol_type = other DNA
atggcatcatggctgtacgagtgtctctgcgaggccgagttagctcaatattattcacatttcactgccctgggactgcaaaaaatcgacgaactggcaaaaattactatgaaagattactccaaacttggagtgcacgacatgaacgatcgcaaaaggctattccagttaatcaagatcattaagattatgcaggaagaggacaaagcagtttccatccctgagcggcatttacagacatctagcctgagaattaaaagtcaggagctgcgtagtggccctcgaagacagttgaatttcgacagtccagctgacaacaaagaccgtaatgcttcgaacgacggcttcgaaatgtgtagtctcagcgatttttcagcaaacgaacagaagtccacatacctgaaggtccttgagcatatgctgccggacgattctcagtaccatacgaagactggcatccttaacgccaccgccggagactcctatgtccagactgagataagtacatccctgttcagccccaattatttgtcggccattcttggcgattgtgacatcccgattatccagagaatctcacatgtctccggctataattacgggataccgcactcttgtatacgccagaacaccagcgagaagcagaatccatggactgagatggaaaagatacgagtatgcgtgaggaaaaggcccctcgggatgcgggaggttaggagaggtgagattaacatcattaccgttgaggataaggagactctattggtgcacgaaaagaaggaggccgttgacctgactcaatacatcctacagcacgttttttacttcgacgaggtgtttggtgaggcatgtaccaaccaagatgtctatatgaagaccactcacccactaattcagcatatctttaatggcggaaacgcaacatgtttcgcctacggacagacaggggcaggcaagacatacacgatgattggcactcatgagaacccgggtctatatgccctggccgcaaaggatatatttcgtcagctcgaggtgagccagcccagaaaacacttgtttgtctggatcagcttctatgaaatttactgcggtcagctctacgacttgttaaaccgtcgcaaacgacttttcgcgagagaagacagcaagcacatggtccaaatcgtcggcctccaagaacttcaggttgatagtgttgaactattactggaagtaattttaaagggcagcaaagagcgatccactggggcaacaggagtgaatgcggacagcagccgctcccatgccgtcattcaaatccagatcaaggattccgcgaagcggaccttcgggcgaatcagctttatcgatttggcaggtagcgaacgagccgctgatgcccgagactccgatcgacagactaagatggaaggtgctgagatcaatcagtccctgttagcgctgaaggagtgcatacgcgctctggaccaagagcacacccatactccttttagacagagtaaacttacccaggtacttaaagacagctttataggaaatgccaagacatgcatgatagcaaatatttctcctagtcatgtggccactgaacacacccttaatactctgaggtacgccgatcgagttaaagaactgaaaaaggggattaaatgctgcacatctgtgacctcgcggaaccggacaagtgggaacagcagtcctaagagaatacagtcatcgccgggtgctctgagtgaagataagtgttcgccaaagaaagttaagctcggctttcagcaaagcctgaccgtggccgcaccaggcagcaccaggggaaaggtccatccgttaacgagtcaccctcctaacatcccatttacttcagctcccaaagtgtccggcaaaaggggcggttctcgaggttcccccagccaggagtgggttattcacgcaagcccagtgaaaggaacagtgcgctctggacatgtggctaaaaagaagcccgaggaatcagccccactatgcagcgagaagaacagaatgggcaacaaaacggtgctgggttgggagtccagggcctcaggtccaggcgagggcctggtgcgcggaaagttgagtacgaaatgcaaaaaagtccagacggtccagcctgtccagaaacagttggtgtcgagggttgaactctccttcgggaacgcccatcaccgggctgagtacagccaggactcgcagcggggtacacctgcgagacctgcaagtgaagcctggacgaacatcccccctcaccagaaggagcgggaggaacatcttaggttctatcaccaacagttccagcaaccccctctgcttcagcagaaattaaagtatcagcccctaaagaggagcctcagacagtatcggccacccgaggggcagctgactaatgagaccccgccactgttccactcctattcagagaaccatgatggagcgcaagttgaagaattggacgattctgatttcagcgaagatagcttttcacacattagcagccaaagggcaactaagcagcggaatacactggagaactctgaggattctttcttcctgcaccagacttggggccaaggcccagaaaaacaggtggccgaacgacagcagtccctgttctcaagtcctcggacaggcgacaagaaagatcttaccaagtcctgggttgattctcgtgacccaatcaaccataggcgggctgctctggaccattcctgttctccaagcaagggcccagtcgattggagcagagagaactcaacctctagcggaccaagcccgcgtgactctctcgccgagaaaccctactgtagccaagtggattttatctacaggcaggagcggggaggaggcagtagctttgatctgcgcaaggatgcaagccagagtgaagtatccggggagaacgaaggtaatcttcccagtcctgaagaagacggattcactattagcctatctcacgtggcggtgcccggttcgccggatcagcgtgacactgtcactacacccctgcgcgaggtctcagcggatggacccatccaggtcacctccaccgtgaagaacggccacgccgtccccggagaggacccgagaggccagcttggtactcacgctgagtatgctagtggactgatgagccctttaactatgagcttgctagagaacccggataacgaagggagcccaccctccgaacaactggtccaggacggcgctacgcattctttggtcgcagagagcaccggtggacctgtcgtgtcacacactgtgccaagcggcgatcaagaggcggctctccctgtgtcttctgccaccaggcatctgtggctgtctagcagtcctccggataacaagccaggtggcgatctgccagctctgggcccaggcgaaaaaacttcttataaggcttggctggcaggcgtgtggttcgtacatcgtcctcatcaggtggcgctccagcagtag

SEQ ID NO: 227854 - DNA, 999 bp, synthetic construct
  misc_feature 1..999: note = Description of Artificial Sequence: Synthetic coding sequence
  source 1..999: mol_type = other DNA
atgacatggacttctgggcagctgcaacgcgaaaagcaggcacgtcccggttctggtgcggtgttagcgttccccgatgataaggacctacgggtgtacggtcctgcagaatcccagagcgctgtctttggcgatgtctgcccactgctcacaagcctcctggatggctataatgtatgtgtcatggcttatgggcagacaggctctgggaaatcatacactatgctaggaaggcactccgatgacgggcctgtcttaccccttgacccccagtccgatctgggcatcattccacgcgtcgctgaggaattatttcgcttgatcctggagaacaccagtcgctccccaaaagtagaggtgtcaatcgttgaggtgtataataacgacatttttgatctcctagccaaggattctatcgctgcggtttctggagttaaacgggaggtagtcacagcaaaagacggacgcacagaggtagctctgctagcaagtgaagccgttggatcagcctccaagttaatggagctcgtgcacgggggtttacaattgcgggctaaacatcccacgctggtgcatgccgacagctctcgatctcacctgattatcacagtgacattgaccacggctagttgctctgatagcacggccgaccaggcgtgctctgcgacactgccaagagagcagacggaagcaggtagagccggaaggtctcggagagcttctcaaggagcactagcaccccaactcgtgcccggaaatccagcgggtcacgcagagcaggtgcaggccaggctgcagctggtagatagtgccggtagcgaatgtgttggtggcgacgccaaattactggtcatcctgtgcatctctccatcgcagcggcatctggcccaaacattacagggactcggtttcggcattcgggcaaggcaggttcagcgaggcccagcaaggaagaaacccccatccagccagactgaagggaagaggagaccggactag

SEQ ID NO: 227855 - DNA, 1155 bp, synthetic construct
  misc_feature 1..1155: note = Description of Artificial Sequence: Synthetic coding sequence
  source 1..1155: mol_type = other DNA
atgacatggacctctgggcagctgcagagggagaaacaggctcggccagggtcgggcgcagtcctcgcatttccagacgataaggatttgcgggtttacgggccagccgaatcccagagtgctgtgtttggggatgtctgccctcttttaacaagtctgttggacggctacaatgtgtgcgtaatggcctatgggcaaacaggctcaggcaaatcctataccatgctcgggaggcactccgacgatggaccggttcttcctctcgacccccagtccgacctgggcatcatccccagagtcgctgaagagctgtttagactgatactggagaacaccagcagatctcctaaggtcgaggtttccatcgtcgaggtgtacaataacgacatcttcgatttgttggccaaggatagcattgctgcggtgtcaggagtgaagcgcgaggtggtgaccgctaaagatggcaggaccgaagtggcgctgctagcctccgaggccgtgggcagcgcatcgaagcttatggaactggtacatggaggccttcagctcagggcgaaacaccccacgctagtccatgccgattctagccgatctcacctgattattaccgttaccctgacgaccgcctcctgtagtgactcaacagctgaccaggcctgctccgcaaccctgccaagagagcagaccgaagccggaagggcgggtagaagccgcagagctagtcagggcgctcttgcaccacagctggtacctggcaaccccgctggacacgctgaacaggtccaagccaggctgcagctggtagattccgccggaagcgaatgtgtgggcgtatccggtgttactgggctggccctccgcgagatggcatgcatcagcagaagtctggcggcattggccggagttctgggagctctcctggagcatagggggcacgcaccctaccggaatagtcggctcacccatctgctgcaggactgcctgggcggagatgcaaagttactggtgatcctgtgcattagccccagccagcgacatctggctcagaccttacaagggttgggatttggcattagagcacgtcaagttcaacgaggccctgcccgtaagaaaccaccttcctcacagacagaaggtaagagaaggccggattag

SEQ ID NO: 227856 - DNA, 1155 bp, synthetic construct
  misc_feature 1..1155: note = Description of Artificial Sequence: Synthetic coding sequence
  source 1..1155: mol_type = other DNA
atgacctggacaagcggtcagctgcagagagaaaaacaggctagaccaggttctggggcagtcctggcttttcccgacgacaaagacttgcgcgtttacggacctgctgagtcacaatcagcagtttttggagatgtttgtcctttgctgacatctctgctggacgggtataacgtctgtgtgatggcatatggtcagactggaagtgggaagagttataccatgttaggcagacactcagatgacgggcctgtgttgcccctcgatcctcagtctgacctcggaattattccacgggtggctgaggaactgttccgactcattcttgagaatacttctcgaagtcctaaagtggaagtctccatcgttgaggtgtacaataatgatattttcgatctactggcaaaggactccatcgctgcagtctcaggcgttaaaagagaagtggtcactgctaaagacgggaggacagaggtcgccctcctggcctctgaggccgtggggtctgcatccaagctcatggaactcgtccacgggggtttgcagctacgagccaagcaccccaccctggtccatgccgatagttccagaagtcacctgatcataacggttacgttgaccacagcctcttgttccgacagcaccgccgaccaggcatgtagcgcgacattgcctcgcgaacagactgaggctgggcgagcaggccgttccagaagagcgtctcagggagctctggcacctcagctggtacctggaaatcccgcaggacacgcagagcaggttcaagctaggcttcagttggttgattcggccggaagcgagtgcgtgggcgtgtcgggagtgaccgggctggccctccgcgagatggcttgcataagccgatctctggctgctttagcgggtgtccttggggctttactggaacaccggggtcatgctccttacagaaactcccgtttaacacatttacttcaggattgcttgggcggagatgcgaagctcctggtgatcttgtgtataagccccagccaacggcacctcgcgcaaacactccaggggctcggattcggcatccgggctcgccaggtacagagggggcctgctcgtaagaagcccccttcgtcccagacggagggtaaaagaaggccagactag

SEQ ID NO: 227857 - DNA, 5648 bp, synthetic construct
  misc_feature 1..5648: note = Description of Artificial Sequence: Synthetic coding sequence
  source 1..5648: mol_type = other DNA
atggtcgggagaggagtcccactctgcgccgctcagccggctgttgctgagggcggtccagctagggagccccctcctttactcgaggtgagtccaaggaaacgcttaccggctggtcccgaccaggacccctgcggctcacgcccagccccagagggcgctggagcgggaccagagcagggccactcagcgggaggtggcggatggtgcaggcattgtcatacaaagctcgttgagttaaaaagacaagcttggaagctggtctctggacccggaacaacactgagggatccctgcttatcagcgttgcttttggacaaactgcccgctcccggtgctttaccagcctgcaggccagaggccgaaagacggtgcgacgtgtgtgctacccacctgcagcagctcactagggaggctatgcatctgctgcaggccccagcatcccatgaagatttggacgcaccacatgggggtccctcccttgctcccccttccactacgacctccagcagggacactccaggccctgccggacctgccggtcggcagccagggcgagccggtcctgatcggaccaaaggtctggcttggtcccctggccctagcgtgcaggtgagcgtcgccccagctggtttagggggagcactgagtacggtcacaatccaggctcaacagtgtcttgaaggcatgtggtcggtgtctagggttaatagcttcttgcccccagcttgtttggccgaagctgcggtcgccgctgtagcagtggccgacactgtcagggagtgtccgcctgtcgccggtcctgatggcctttccaaggcatggggaaggggcggagtttgcactagtgctctcgtgacgccaacacccggatccgtcgggggaagcactggaccctcagctgccgctagtttctttatccgcgcaatgcaaaagctgagtctcgcctctaagcgcaagaaaccccaccctcctcctccacctgcgactagagggacttctacataccctacagactttagtggcgtccttcagctgtggccaccgcctgcacccccttgcctattgagggcggctagtaaaacaaaagacaatcctggatcaattgggaaagttaaggtcatgttgaggatctggcccgcacagggcgcacagagatcagccgaggctatgtctttcttgaaggtcgatcctagaaaaaagcaggtgatcctgtacgatcctgcagccggaccccctgggtcagccggtcccagacgcgctgccacagccgcagtgccaaagatgtttgcgtttgatgccgtgtttccacaggactccgaacaggcagaagtatgctctgggaccgttgcggacgttctccagtcagtggtgtcaggagccgatggctgcatcttctccttcggccacatgtccttgggtaaatcctacacaatgatagggaaagacagttctccacagtcacttgggatcgtgccttgtgctattagttggttatttcgcctcatcgaagaacgtagggaacggacgggtaccagattcagcgtcagggtgtcagcagtggaagtttgtggtcgtgatcagagtctgcgcgatcttttagccgaagtggcccctggatctctgcaagacacccagagcccgggtgtgtacctaagggaggatccagtatgtggtgctcagctgcaaaaccagagcgaactgagagcgccaactgcggaaaaagccgcattttatctagacgctgcccttgccgcaagatccacgtcacgcgctggctgtggcgaagacgcgagacgcagctcccacatgctttttacactccacgtgtaccagtacaggatggaaaagtgcggacggggaggcatgagcggtggccgatcccgcctccacctcattgacttgggttcttgtgaggcagctgccggtagggctggggaagctgccggtggcccattatgtttgtcactgtccgcattgggcagtgtcatccttgccctggttaatggcgctaagcacgtgccctaccgcgatcacaggctaactatgctcctgcgggaatccctcgccactgccggatgtcgaaccactatgatcgcccacgtgagtgacgctcctgcccaacatgccgagaccttgagtactgtccagcttgctgctagaattcaccgtctccgaaggaaaaaagccaagtacgcatcgagcagttctggtggggaatcatcttgtgaagaaggtagagctaggcgccctcctcacttgcgcccattccacccaaggacagtcgcattagacccggataggactccaccgtgtctgcccggagatcccgattactcttccagctcagaacagagctgcgacaccgtgatctatgttggtcctggcggagctgccctctcagacagggagctgacagataacgagggcccaccagatttcgtgcccataatccccgcactgagcagacacagaccgtctaagggtcctagagacgccgaccatttcaggtgttctacctttgccgagctgcaggaacggctggagtgtatggatggaaatgagggaccaagtggagggccaggcggaacagatggcgcacaggcatctcctgctcggggtggcagaaaaccatccccccctgaagcagcctcccctcgcaaagccgtgggcacacctatggctgcttccaccccaagaggaagttcaggtccggatactcaccagggtacgcctgaaccctgcaaagccatcgtgtggggcgaccagagggaagactcaagcgcctggcccgagctcctcgtgccagaaaaagccgcagtgagcgggggtcggagacccctcccttctcctgctcctcctccgccacagcttctggaggcttgtcgggctccggaggagcccggaggcggtgggactgatggcgtggcacggactccacccgtgggtatgagcggacaggtggcaggaagccccatgctgccaggagcgacttgccccagacttgcagcaggtagccggtgccctgagcggggtctgcttaccaccactgtcacactgcagcgcccagtcgagctcaatggcgaggacgagctcgtattcacggtggtcgaagaactctccctaggcgctttggcaggagcaggccgtcccactagcctcgcaagtttcgactcagactgcagtcttagagcgctcgcctctggcagcagaccggtgtcaattattagcagcattaatgacgagtttgatgcttataccagtcaggctccagaggggggtcccctcgagggggctgcatgggcgggatcaagccatggatccagtatcagcagctggctctctgaggtctctgtctgcaccgctgattccagggatccaacaccccagcctaggttttcacccgacagcctcgcaggcctggatccagggggacctcccgctttagatggatcattgggcgatggaagctcagggttcttggggccagataggcccgactctccaggacccacatggggcccttgcccgggtgaggtcgccgctgtagcaccatcccgccctgggagagagccgcaagcaggcccatccaggtgggcatccgccgcacagacgatccacagtagcttaccgagaaaaccgagaactgcaagtgctaccaccagagtcgggtgcgccaggttgggacagtctccaccaggcagaggcggattgttcgaagatccatggctgctacgcgtgggcgagtgtgacacccaagcggcaagcgcaggacgtgctccctctcctactttgggcagtcctcgactgccagaggctcaagtaatgttggcttgtgctcagagggtggtggatgggtgtgaggttgctgccagggccgcaagaagacccgaggcagtcgctagaatcccgccactgcggagaggagccaccaccctgggagtgaccacccccgcagtctcttggggggacgccccaacagaagtggtggcatgtagtgggagcctgaaagcgtcccctaccagcaaaaaaggactggcaccgaaagctggcttcctcccaagaccaagtggggcagcaccccctgctccccctacaaggaaatcaagccttgagcagcggtcatctccagcaagtgcccctcctcacgctgtgaatcccgcaagggtcggggctgccgcagttctgcgcggtgaagaagagccacgcccttcaagtcgcgctgatcattcagttcctcgagccacaagctctctaaaggccagagcatccaaggtggaagcagcacaccgcctcgcaggccacgccagcctggaacggtacgagggcctcgctcatagtagttctaaaggcagggaggcacctggcaggccccctagagccgtccctaaattgggcgttcctccctcctcgccgacacacgggcctgctcctgcctgcaggtccggtgccgctaaggcagtgggagctcccaagcccccagtgggcggaggaaagggtcgtgggctcgtggctgggggttctagggcactgggcccttcagttaaactttctactgcttccgtgactgggcgatctcctgggggtccggttgctggcccaagggcagcccctcgggcagggccaagcgtaggggcaaaagccggtcggggaacagttatgggtactaagcaggcactgcgggcagcccattcgcgcgttcacgaactgtctgccagtggagcaccgggtcgtggcggatcttcgtggggctcggcggattcagatagtggacatgactcgggagtaaacgtgggagaagaaaggccaccgacggggcctgcgctaccaagtccctactctaaggtgaccgcacccaggaggccccaacgctactctagcggacacggctcggacaatagttccgtactctcaggtgagttacccccagccatgggacggactgcactgttccatcattctggtggatctagcggctacgaatccttgaggagagattcggaggctaccgggagtgcctcatccgctccagatagtatgtctgaatcgggcgcagcaagcccaggggctcggactagaagccttaagtctccaaaaaagcgggctaccggactacaacgcagacgcctgatcccagcacctctaccagataccactgcactcggcaggaagccatcgctgcccggacagtgggtcgacttacccccaccattagcaggatccttaaaggagccattcgagattaaagtctatgagattgacgatgttgaaagacttcagaggcccagaccaaccccgagggaggcacctacccaggggctcgcgtgcgtgagtaccaggctcaggctggcagaacgtagacaacagagactccgtgaggtccaggcaaaacacaagcatctatgtgaggaactcgcagagactcagggtaggctgatgctggagccgggtcgatggctggagcagtttgaagtggatcctgaactggagccagagtccgcagagtacctggccgcactcgagcgcgctaccgctgcactcgagcagtgcgtcaatttgtgcaaagctcatgtgatgatggttacgtgtttcgacatctcagtcgcagctagcgccgcaattccgggaccccaggaggttgatgtgta

SEQ ID NO: 227858 - DNA, 5183 bp, synthetic construct
  misc_feature 1..5183: note = Description of Artificial Sequence: Synthetic coding sequence
  source 1..5183: mol_type = other DNA
atgatgatggactggaaagcagtcgccgcacagaaactgaacctatcctccaaaaagaaaaagcacagaccatctacctccagcgctgcagagccacccctctttgcaaccagcttttccgggattcttcagacatcaccaccaccagctcccccttgtctccttcgggctgtgaataaggtgaaggacacccctggtttgggcaaggttaaagttatgcttaggatatgctcgactttggctagagacacatcggagtcctccagctttttaaaagtcgatccacgcaagaaacaaatcacactctatgaccccctgacctgcggtggccaaaacgccttccagaaacgcggaaaccaagtgccccctaaaatgttcgcctttgatgccgtgttccctcaggacgcatcgcaagccgaagtctgtgctggtaccgtggcagaggtcatccagtcagtggtgaacggcgcagacggctgtgtgttctgtttcggacatgctaaactggggaaaagttacaccatgattggcaaagatgacagcatgcaaaaccttggcatcataccgtgtgcaattagttggttgttcaaactgataaacgaacggaaggagaaaacaggcgctcgattcagcgtgcgtgtgtcggccgtggaagtctgggggaaagaggaaaatctgagagatttgctgtctgaggtggcaacaggcagccttcaggatggccaaagtcctggcgtgtacctctgtgaggatccaatttgtggtacccaactgcagaaccagagcgaactccgcgcacctacagcagagaaggccgcattcttccttgatgctgccatcgcctccaggcgttcccaccagcaggattgcgatgaggacgatcatagaaactcccatgtctttttcactttacacatttaccagtaccgcatggaaaaatcgggcaaagggggaatgtctggcggtaggagcagactgcaccttatcgacctggggtcatgcgtgaaagccctttcaaaaaatcgggagggaggatccggtctgtgcctaagtctgtcggcactggggaatgtgatcctggctttggtcaacggctcaaagcacatcccctacaaggagagtaagctggcaatgctgctccgggaatcactggggaacatgaactgtaggacaaccatgattgctcacatcagtgccgctgtcggcagctacgccgaaaccctgtcaaccatccagatcgcctccagggtgctgcgtatgaagaagaagaagaccaaatacacgagttccagcagtgggggtgagagcagctgcgaggagggcagaatgaggagaccgacccagctaaggcccttccacacaagggccaccgttgatccagacttcccaatcgctcacttgtcctctgaccctgattacagcagcagttctgaacagtcatgcgacacagtaatctatattggtcctaatggaactgctctgtcagataaagagttaacagacaatgagggcccacctgattttgttcctattgtcccagctctgcaaaaaacacgcggtgattctcgtccagcagaggccggtgaagctgctgcagggaaaagcgaaagggattgcctgaaatgcaacaccttcgctgagctgcaagagcgtctcgattgcattgatggatctgaggaacccagttcattcccatttgaggaattgcctgctcaattcgggccagaacaggcttctcggggtccacgactgtcccaggccgctggcgctagcccattgtcagagagcgacaaagaagataacggctctgaaggacaacttactaatcgcgagggacctgaactcccagcctccaagatgcagcgttcacattccccagttccagctgctgcccctgcccattctccctctcctgcttcgcctaggtccgtccctggcagcagcagtcagcactctgcatcacctctggtgcagagcccttctctccagtcaagccgtgaaagccttaatagctgtggctttgtggagggaaagcctaggccaatgggtagtccacgtctcgggattgcctctctgagtaaaaccagcgagtacaagccaccttcatctccaagtcaaagatgtaaggtgtatacccaaaaaggggtgctcccgtcgcctgccccactccctccttctagcaaagacagcggtgttgcatcccgcgagtcgctgctgcagcctgaggtgcggacgccaccagttgggatgagcccgcaagtgctcaagaagagcatgtccgcgggaagcgagggtttccccgagaccccagtggacgatgagcagcaggccgcaaccccatccgagtccaagaaggagatcctgagcacaactatggtaacagtgcaacagcctttggagctgaacggggaagacgaactcgtttttactttggtcgaagaactgacaatctctggcgttcttgatagcgggaggcctactagtattattagttttaactcggattgctcagcgcgagccctggcctctggatctcgacccgtgtctatcatttcttccatcagcgaggatctggagtgttatagttccacggcgcctgtatctgaagtatccatcacgcagtttctccctctgcctaagatgtcattggacgagaaggcacaggacgcaggctctcggagatcctccatttcctcctggctgtctgagatgtcagccggatcagagggtgaacagagctgccatagctttatcgcacagacatgtttcggtcatggtgaagctatggccgagcccgttgcctctgagttcgttagctccttgcagaacaccgctgtggtgtgcagggaaaagcccaaagctagcccagataacttgttaatcttgagcgagatgggagatgatagtttcaacaaggctgcacccatcaagggctgcaaaataagtacagtgagtaaagcaatggtgaccatctccaacactgcaaacctgagcagttgtgaaggctacatccccatgaagactaacattacagtatatccttgcatcgccatgtcacctcgcaatattcaggagccagaggccccaacggcaacacctaaagctggccctactctggcccagagtcgggagagcaaagagaactcagctaaaaaggagatgaaattcgaggacccctggctgaagcgtgaggaagaggtgaagaaagagacagcccatcctaatgaggaaggcatgatgaggtgcgagactgccaccgggccttccaatgcagaaacccgggcagaacaagaacaggacgggaagccctcgcccggagaccgactctcgagtagtagtggagaagtatccgcttcgcctgtgaccgataattttagaagagtagttgacggttgcgagatggcactgccaggcttggccacccaatcaccagtgcaccccaataaatcagttaaatctagctctctgcccagagcctttcaaaaggcttcccgccaggaagagccggattcgctgtcttactattgtgcagccgaaactaacggtgtaggcgcagcttcaggtacacccccatccaaggctacacttgagggaaaagtggcaagtcctaaacactgcgtgttggctcgtcccaaaggcaccccccctctgcccccagtgcgcaagagttcacttgatcaaaagaatcgtgcaagcccacagcattctgcctccgggtctggcacaagcagtccacttaaccaacccgcagcctttcccgcaggactccccgacgaaccctcagggaaaacgaaggatgccagctcctcatcaaagctattctcagccaaactggagcagctggcctcacgaagcaatagcctcggcagggcaacggtctcacattatgaatgtctatctctggaaagagccgaaagcttaagctccgtctcctctaggttacacgccggaaaagatggcactatgccaagagcgggaaggtctcttggccgatcagcaggcaccagtccgcctagctcaggagcttcccctaaggcgggacaaagcaagatttccgccgtttctaggctgcttcttgcatctcccagggcccgagggccttcagcctccactaccaagactttgtcattttcaactaaaagcttgccgcaggctgtgggccagggtagctccagcccccctgggggtaaacataccccctggtccactcaatctctgagtaggaatagatcgagtggactggccagtaagctaccactgcgagcagtgagcggtaggattagtgaattgcttcagggaggcgcaggggctcgcggactgcaactgcgggctggtccggaagcggaggcccgaggaggcgctctggcagaggatgagccagcagctgctcacctgctgccttcgccctacagtaagatcacaccacccagacgaccgcatcgttgctcaagtggacatggttccgataattcctccgtgttgtccggggaactgccccctgccatggggaagacagcattgttttaccacagtggaggtagcagcggctacgagtcggtgatgcgcgactcagaggctacagggagcgcatcatccgcccaggattccacgtcggagaactcatcctcagtgggtggtaggtgcaggtccctcaaaacccccaagaaacggtctaatcccggatcgcagcggagacggcttatccccgctctgagcctcgatacctccagtcctgttaggaagccacccaactcaacgggggtccgctgggtcgatggtcccctacgaagttccccacggggactaggcgagccttttgagatcaaagtctatgagattgatgacgtcgaaaggctgcagcggcgacggggaggagccagcaaggaagcaatgtgcttcaatgctaaattaaagatcctggaacatcgacagcagcgtatcgcggaggtccgggctaaatacgaatggttgatgaaggaactggaagcaaccaagcaatacctgatgttggaccctaacaagtggttgagcgagttcgacctggaacaggtctgggagctcgattctcttgagtacctagaagctctggagtgcgtgacagagcggttagagagcagggtcaatttttgtaaggcacacctaatgatgatcacctgcttcgacattacgtcaaggcgcaggta

SEQ ID NO: 227859 - DNA, 6326 bp, synthetic construct
  misc_feature 1..6326: note = Description of Artificial Sequence: Synthetic coding sequence
  source 1..6326: mol_type = other DNA
atgaactctgtggctggcaacaaggaacgcctggcagttagcactcgaggcaagaaatacggagtcaatgaagtttgtagtcctaccaaacccgctgcacccttctccccagagtcttggtaccggaaggcctacgaggaatcccgggctggcagtagacctaccccggagggagcaggaagtgccttgggatcttccggcaccccatcaccaggtagcggaacgagctctccttctagtttcactggaagcccaggacccgcatcgccaggcatcggcacgtcctctcctggtagcctcgggggttcccccggattcggaaccggttcacccggaagcggctccggtgggggatcctctcctggaagcgatcgaggggtgtggtgcgaaaactgcaatgcccgactcgtggagctgaagcggcaggcgctcaggctgctcctgccgggaccttttcccggaaaggatccggctttttccgccgtgatccatgataagcttcaggtcccgaacactattagaaaagcctggaatgaccgagacaacaggtgcgatatctgcgctacccatctaaaccaactgaagcaggaggcaatacagatggtgctgaccctagaacaagcagccggaagtgaacactacgatgctagcccatgcagcccccctcccctgtcgaacattcctaccctggttggaagcagacacgtaggagggctgcaacaacctcgcgattgggcctttgtgcctgcaccatgcgccacttctaactataccggatttgctaataaacacggaagcaagccttcttcacttggggtgagcaatggggcagaaaagaaaagcgggtcgccgacacatcaggccaaggtgtccctccaaatggccaccagtccttctaacggaaacattctcaactctgtcgctatccaggcacaccagtatctagacggcacatggtctctcagccggacaaacggcgtcacgctctacccgtatcagatttcccagctgatgactgagagctcccgcgaggggctgaccgaggcagtgctgaaccggtacaacgctgataaacccagcgcttgttctgtccctgcgtcacaggggagttgcgtggccagtgagaccagcacgggaaccagcgttgccgcatccttcttcgcacgcgcagcacaaaaactcaatctttccagtaagaaaaaaaagcaccgccctagcacaagtagcgccgcagaaccccctctttttgcaacaagcttcagcggtatccttcagacaagtcccccacccgcacccccatgtctgcttcgagcggtgaacaaagtgaaagacactcccggattaggcaaagtaaaggtcatgcttaggatatgttcgacgctcgctagggacaccagtgaatcttcttcttttctgaaggtcgaccctcggaaaaagcagatcaccttatatgaccctctcacatgcgggggacagaacgctttccagaagaggggaaatcaggtgccaccgaagatgttcgccttcgatgccgtgttcccacaagacgcctcacaggccgaagtgtgtgcaggtaccgtggctgaggtcatccagtcagtggtaaatggtgctgatggctgtgtgttctgctttggccacgccaaactcgggaagagctataccatgatagggaaggacgacagtatgcagaacctcgggatcatcccatgtgcgatctcatggctgttcaagcttatcaatgagcgtaaggagaagacgggagccagattttctgtccgcgtgtctgcagtcgaggtgtggggaaaggaggaaaatctcagggacttgctgtcagaggtggccacgggcagtctgcaagacgggcagtctccgggagtctacctgtgcgaggatcctatatgcggtacgcagcttcaaaaccagtccgaattacgagcccctaccgcggagaaagctgcatttttccttgacgcagccatagcatctcgcaggagccatcaacaggattgcgatgaggatgatcacaggaacagccatgtgttttttactttgcatatctaccagtatagaatggagaaaagcgggaagggcggtatgtcaggcggtcgctctcgtctgcacctcatcgacctcggctcttgcgttaaggccctgtccaagaaccgcgagggaggaagtggtctatgtctgtctttgagtgcactgggcaacgtgatccttgccctggtgaacgggagtaagcatattccatacaaagagagcaagctggcaatgcttctcagagagtccctgggtaacatgaactgtcgcaccaccatgattgcacacatatcagctgccgtgggcagctatgctgagaccttatccactatacagatagcatcaagagtactaagaatgaagaagaaaaaaaccaagtacacatcgtcttcctcgggcggagagtcttcatgcgaggagggacgaatgaggcgtcctacgcaattgcgcccatttcatactcgagccacagtggacccagatttccctattgcccacctctcatcagatccagactactcttcttcaagcgagcagtcctgcgacactgtaatttacatcgggccaaacggcactgccttgtctgataaggaactgacagataatgagggaccaccagattttgttccgatagtacctgcacttcagaaaactcggggtgatagtcgtcccgctgaggccggagaggctgcggcaggaaaatctgaacgcgactgtctgaaatgtaatacatttgcagagctccaggagaggctggactgcatcgatggctcagaggagccatccagcttcccatttgaggaactgccggctcagtttggccctgaacaagcatctaggggcccacgtctgtcccaggccgctggcgcttctccactgtcagagtccgacaaagaagataacggaagcgagggccagctaacgaacagagagggtccggaactgccagcctcgaaaatgcagagatcccacagcccagtgcccgcagccgctccagctcattccccctcccctgcctctcccaggtcagtgcccggaagctcttcccagcactcagcctcccccctggttcagagcccaagcctgcagagctcaagggaatctctcaattcatgtgggttcgtggaggggaaacccaggccaatgggcagccccagactcggcatcgcaagtttatcaaagacgtctgaatataaaccccctagctcaccgtctcaaagatgcaaggtttatacacagaaaggtgtccttccttcccccgcaccactgccaccaagttcaaaggactcgggggtcgcttctagagagagcctccttcagcccgaagtgagaactcccccagtagggatgagcccccaggttctgaagaagtcaatgtctgctggaagtgaaggattccctgagacccctgtggatgatgaacaacaagcagccactccttcagagtcaaagaaggaaatcctaagtactacgatggttacagtgcagcagcctctggaactgaatggcgaggatgaactcgtgttcaccttggtggaggaactaaccatatcaggagtgctcgattctggcaggcccaccagcatcattagtttcaactctgactgttccgccagagcactggcctccgggagccgaccagtgtcgattatctcctcaatatcagaagacctggaatgctactcatctactgcacccgtgagcgaggtatccatcacccagtttctgccactgcctaagatgtcactggatgagaaagcccaggacgcaggctccaggagatcctcaatttcttcatggctcagcgagatgtccgccggatcagaaggggaacagtcgtgccattcctttatcgcgcagacatgctttggacacggagaggctatggccgaacccgtggctagcgagtttgtgtccagcctccaaaacacggccgttgtgtgtagggagaagcccaaagctagcccagataacctgctgatcctgagtgagatgggagacgactctttcaataaggctgctccaattaaaggttgtaagatatcaaccgtaagcaaggcaatggttacaattagcaatacagctaacctgtccagctgcgaaggatatatcccgatgaagaccaatatcactgtctacccttgtatcgcaatgtcaccacgaaacattcaggaacctgaagcacctacagccaccccaaaagctgggccaactctagcccagtctcgggaatcaaaagaaaattctgcaaaaaaagagatgaagttcgaggatccctggctgaagcgggaggaagaggtaaaaaaggaaactgcccatccaaacgaggaaggcatgatgcgctgcgagaccgcgactggccctagcaatgccgagaccagggcggagcaagaacaggatggaaaacctagcccaggggatcgcctttcctccagctctggtgaagtgagtgcatcaccggtgacagacaacttccgccgtgtggtggacgggtgcgagatggctctccccggtctggcaacacagtctccagtccaccccaataaaagcgtcaaatcctcatccctcccaagagccttccagaaagcatctaggcaggaggaacccgactccctctcctactactgtgcagcagaaactaatggcgttggagccgcatccggaacgccacccagcaaggcaacgctcgagggcaaggtggctagccctaaacattgcgtcctcgccaggcccaagggtacccccccactcccgcctgttcgcaagagctcactggatcagaagaatcgcgcatcgccacagcacagcgcgtctggttccggcacatcctctcctcttaaccaacctgcagcctttcccgcaggcctcccagatgagccatctggcaagaccaaggatgcatcttcatcatccaaactgtttagtgccaagttggagcagctggcatccagatcgaattctctggggagggctactgtgtcccactacgaatgcctgtctcttgagagagccgagagcctgagttctgtaagttcaaggctacacgccggaaaggatggaactatgcctcgagccggacgcagtctcggcaggtccgctgggacatctcctccaagcagtggcgctagccccaaggccggacagtctaaaattagcgccgtctctcgtctccttctggccagcccacgggctcggggaccaagtgcttctacaactaagactttatctttttccacgaaatctctcccgcaagctgttggacaagggagtagctctccgccaggcggtaaacacaccccctggtctacccaatcactaagcaggaatcgcagctcaggtctagcatccaagctccccctccgggcagtctccggccgaatttccgaactgctgcaggggggtgcaggcgctcggggtcttcagctgcgggcaggcccagaggctgaagcgcgtgggggagcacttgctgaggacgaacccgcagctgcacatctgctgccctccccttactccaaaatcacgcctcctcgacgcccacacagatgctctagtggacatggcagtgataacagctcagtgctgtccggagagctgcccccagccatgggtaagactgccctcttctatcactccgggggaagcagcggctatgaaagtgtaatgagggatagcgaagccaccgggagcgcctctagcgctcaggactccacctcggagaactcttcaagtgtgggtgggagatgtcggagcctgaagactcccaagaagcgcagtaaccccggaagtcagaggaggcgtctcattccagccctatctctagacacgtccagtcccgttcgcaaaccaccgaattccacaggcgtgcggtgggttgacgggccactgagatcgagccctcggggactcggcgaacctttcgagatcaaggtgtacgagattgatgatgtagagcgcctccaaagacggagggggggagcatctaaggaagctatgtgcttcaatgcaaaattgaaaattctggagcatagacagcagagaatcgctgaggtgagagccaagtacgaatggctgatgaaggaactcgaagcgacaaagcagtatcttatgctggacccaaataaatggctctccgagttcgacctcgaacaggtatgggagctcgatagcttggaatatctcgaggctctagaatgtgtgaccgaacgcctggagtctcgggtgaatttctgtaaggcacacttgatgatgatcacatgtttcgacataaccagcaggcgaagata

SEQ ID NO: 227860 - DNA, 5174 bp, synthetic construct
  misc_feature 1..5174: note = Description of Artificial Sequence: Synthetic coding sequence
  source 1..5174: mol_type = other DNA
gactggaagacaaaggcagctcagaagctaaacctgagctctaagaaaaagaagcatcgcccaagcacaagctccgccgctgagccccctctgtttgctacaagcttctctgggattctccagacctcaccaccgccagccccaccgtgcctgctgagggctgtaaacaaagttaaagacactccaggcttgggcaaggtgaaggtgatgcttaggatttgttctactctggccagggacacctctgaatctagcagctttctcaaggtggaccccagaaaaaagcagatcaccctgtacgatcctctgacatgtggaggccagaacgcatttcagaagcggggtaatcaggttccccctaagatgttcgctttcgacgcagtgttccctcaagatgcttcgcaggcagaagtgtgtgccggtaccgtggctgaggtcatccaatccgtggtgaatggcgctgatgggtgcgtcttctgttttggtcacgccaagctgggcaaaagctacacgatgataggcaaggatgactccatgcagaatttgggaatcattccttgtgctatctcgtggcttttcaagctgatcaatgaacggaaagagaagactggggctcgattttctgtcagagtctccgctgtggaggtgtggggtaaagaggagaatctgcgggatttgctgtccgaggtcgccacagggtccctccaggacggccagagccccggagtctatctatgcgaggaccctatttgtggtacacagttgcagaatcagagcgagttgagagcccctacggctgagaaagccgcattttttctggacgccgctattgcttccaggcggtcacaccaacaggactgcgatgaggatgatcatcggaactcccatgtgtttttcacactgcatatctaccagtaccgcatggagaaatctggcaagggtggaatgtccggaggcaggagtaggctccacctaatagatctcggatcgtgtgtaaaggccctgagcaaaaaccgggaaggagggtcaggtctgtgcctttctctgagtgctctgggaaatgtgatacttgccctggtcaatggctcgaaacacattccctacaaggagtccaaactggcaatgctgctgcgcgaatcacttgggaatatgaactgccgcacaactatgattgcacacatcagtgccgcagtgggctcctacgctgagacactgagcactatccagatcgccagccgggtgcttcgaatgaagaagaagaaaactaaatatacaagttcaagctcaggaggcgaatcttcgtgtgaagagggaaggatgcgcaggcctacccagttgcggccattccacacccgtgccacagtcgatccggattttcccatcgctcatctgtccagtgatccagattatagctcttcttcagagcagtcctgtgacacggtaatctacatcggtccaaacgggaccgccctgtcagacaaggaacttactgacaacgaagggccaccggacttcgttccaattgtgccagccctgcagaagacccgcggagattctaggcccgcagaggctggcgaagccgctgctggaaaatcggaaagggattgcctgaagtgcaacaccttcgcagaactgcaggagcggctggattgtatcgatggcagcgaagagcccagctcgttcccttttgaagagctgcccgctcaattcggtcccgaacaggcatcccgaggacctagacttagccaggccgctggtgccagccccctgtctgagagcgataaggaggataatggttctgaggggcagcttactaatcgagaaggaccagagttacctgcatcgaagatgcagagatcccatagtccagtgcccgcagccgctccagcccatagtcctagtcctgccagtcccagaagtgttcccggtagcagcagccagcattcagccagcccccttgtgcagtcaccctcgttgcagagctctagagagagtttgaattcctgtgggtttgtggaaggaaagccacgtcctatgggcagcccgcgtctgggtatcgccagcctgagtaaaacctctgagtacaaacccccatcgtctccttcacagcggtgtaaggtgtatactcagaagggcgtgctcccctctcctgcacctttgcccccatcgtccaaggattcaggtgtggctagccgagagagcctcctccagcctgaagtgaggacccctccggtcggcatgtctccacaagtactcaaaaagagtatgagtgcagggtctgaaggctttcccgaaacacctgtggacgacgagcagcaggccgctactccaagcgagtccaagaaggaaatcctcagcacgaccatggtgacagttcagcagcccttggagctcaatggggaagacgaactggtatttacattggtagaggagctgactatctctggggtgcttgattctggaaggccgacgagtatcatctctttcaactcagactgttcagctagagccctcgccagtggcagtaggcccgtttccattatctcaagcatcagcgaagatcttgagtgttacagttctactgccccagtttccgaagtctccatcacacagtttctgcccctgccaaaaatgagcttagatgagaaggcacaggacgccggaagcaggcgtagttccatttcttcctggctctccgaaatgagcgccggatcagaaggcgagcaaagttgtcactcattcatcgcccagacgtgttttggacacggcgaggccatggcagagccagttgcctccgaatttgtatccagccttcagaatacggccgtggtatgtcgtgagaagccaaaggctagcccggataacttgctaatactcagcgaaatgggcgatgattcttttaacaaggcagcccctatcaagggttgtaagattagtacggttagcaaagctatggtgaccatatccaatacagcgaatttaagttcttgtgagggatatatccccatgaagactaacatcaccgtttatccttgcatagcaatgtcccctagaaacattcaggagcccgaggcacctactgctacacccaaagccggacccacacttgcacagtctcgtgaatctaaggagaactccgccaagaaagaaatgaaattcgaagacccgtggctgaaaagggaggaggaggtaaagaaagaaactgcacatcccaatgaagaggggatgatgaggtgtgaaacagcgaccggcccatctaacgccgaaacccgcgctgagcaggaacaggacggcaagccaagccctggcgaccggctcagctcatcctcaggcgaagtgagcgcgtctccggtgacagataactttaggagggtggtcgacggttgcgaaatggcactgccaggtctcgccacccaatctcccgtgcatcctaataagagcgtgaagtcctcttctctgcctagagcgttccagaaggcctctaggcaggaggaaccagacagcctctcctactattgcgccgcagagacaaatggtgtgggtgctgcatctgggacgccaccatctaaagcgacgctcgagggcaaggtggccagtcctaaacattgcgttttggcacgacctaagggcactccccctcttccccctgtgagaaaaagctccctggaccagaaaaatcgagcctcaccccagcacagcgcctccggatctggaacaagctcgcccttgaaccagcctgcggctttccccgcaggccttcccgatgagccctccggcaaaaccaaggacgcttcgtcaagctctaaacttttctctgccaagctggaacagctggcctcaaggtctaattccctgggacgggctaccgtgtcacactatgaatgtctcagtctggaacgggctgagtcgctcagcagcgtttcctcccgcctgcacgcaggcaaggacggcactatgccacgcgctggacggtcactggggaggtccgccggaacttccccgccaagcagcggcgcttcaccgaaagccggacaatcaaaaatctctgctgtctcaagattgctccttgctagccctagagccaggggtccatccgcctccacgactaagactctcagcttttccaccaagtctctgccccaggctgtgggccaagggtcatcaagcccgcctggaggaaagcataccccatggtccactcagtctctcagccgtaataggtcttccgggctcgctagcaaactgcctttaagagccgtatccggacgcatctctgaattgcttcagggtggggcaggagcaaggggactgcagctgcgagcaggaccagaggccgaagccaggggcggtgccctggccgaggacgaacccgcagccgcacacttgcttccttctccctacagtaagatcactcctcccaggcgaccccataggtgttcttcaggacacggctctgacaatagttctgtgcttagcggcgagctccccccagccatgggaaagactgctctgttctatcatagtggcggatcaagcggttatgaatcagtgatgagggacagcgaagcaacaggaagcgccagttccgcacaggattcaacttcggagaactcatcaagcgtaggcggaaggtgtcgtagtctgaaaacaccaaagaaaaggtcgaatccaggctcccagcgcagaaggctgattcctgctctgtctcttgacacgagtagcccagtgcggaagccaccaaactctactggagttagatgggtggacggccctttgcgatcatctccacggggacttggagagcccttcgagataaaggtttatgagattgatgatgtggaaaggctccagcgacggcgtggtggagcctcgaaagaggccatgtgttttaacgctaagctcaaaattctcgagcaccggcagcagagaatcgctgaggtgagagcaaaatatgaatggttgatgaaagagttggaagccaccaagcagtacttaatgctggaccctaataaatggctgagcgaattcgatctggagcaggtgtgggagttggactcacttgagtacctcgaggctcttgagtgtgttaccgagcggctcgagagccgggtcaacttctgtaaagcccatttgatgatgatcacgtgttttgacatcacttcacgcaggagata

SEQ ID NO: 227861 - DNA, 2016 bp, synthetic construct
  misc_feature 1..2016: note = Description of Artificial Sequence: Synthetic coding sequence
  source 1..2016: mol_type = other DNA
atgatagacttcgacgacgtcgccgcaatcaatccagagctattgcagctcctacccctgcaccctaaagataacttgccccttcaggagaacgtcactattcagaaacagaagcgcagatcagtgaactccaagatccctgctccaaaagagtctctccgtagcagaagtaccagaatgtcaacggtaagtgagttgagaatcaccgcacaggaaaatgacatggaagtcgaactgcctgctgcagctaactcccgcaagcaattctccgtccctccggctcccacgcgtcctagctgccctgctgtggctgagataccactgcgtatggttagcgaggagatggaggagcaagtacactcgattcgcggatcaagttcagctaatcccgtgaatagcgtccgcaggaaatcctgtttagtgaaggaggtcgaaaaaatgaagaataaaagggaggagaaaaaagcacaaaactctgagatgcgcatgaagagggctcaggaatacgatagctcattccctaactgggagttcgctcggatgattaaggaatttcgtgccaccttggaatgccaccctctaacaatgactgacccaatcgaagaacaccgcatctgcgtttgcgtgcggaagcgtcctttgaataaacaggaactggccaaaaaggagatcgacgtaattagtatcccgtctaaatgccttctactggtgcatgagccaaaacttaaggttgacttaaccaaatatttggaaaatcaggcattctgcttcgatttcgcctttgatgaaacagccagtaacgaggtcgtgtaccgtttcaccgcccgtcctctggtccagactatatttgagggcggaaaggccacctgctttgcttacgggcagaccggcagcggaaagacccacactatgggaggggatttgtccggaaaggcacaaaatgcctccaagggtatttatgcgatggcttcaagggatgtcttcctgttgaaaaatcaaccttgctatcgtaaactggggctggaggtttatgttactttctttgagatttataatggcaagctttttgacctattaaataagaaagctaaactaagagtgttagaggacggcaaacaacaggtacaggtggtaggcctgcaggaacacctggttaattctgcagacgatgtgattaagatgatcgacatggggtctgcatgtaggacatccgggcaaacatttgctaatagcaacagcagtcggtctcacgcttgtttccagattatccttagggctaaggggagaatgcacgggaaatttagtttggtggatctggcaggtaatgagcgcggagccgataccagtagcgcagacaggcaaacgcgtatggagggtgctgagataaacaagtctctactggcattgaaggaatgtatccgagctcttgggcagaacaaagcacatacacctttccgggaatccaagctcacccaggtgctgagggacagtttcatcggtgagaatagccgaacctgtatgattgctaccatcagtcccggaataagcagctgcgaatataccctcaacacactcagatacgccgatcgcgtgaaagagctgtctcctcacagtggtccctcaggagagcagctgatacagatggagaccgaagagatggaagcatgttctaacggagccttaatacccggtaatctatcgaaggaagaggaagaactgtcttcccagatgtcttcctttaacgaagcgatgacccagataagggagctggaagagaaggcaatggaggagctgaaagagattattcagcaggggcctgactggttagagctatcagagatgaccgagcagcccgactacgatctcgagacttttgtgaacaaagcagagagtgctctggcacaacaggccaagcacttttctgccctgagggacgtgatcaaagcacttaggctggcgatgcagctcgaggaacaggccagtcgacagataagctccaaaaagcgccctcagtag

SEQ ID NO: 227862 - DNA, 2055 bp, synthetic construct
  misc_feature 1..2055: note = Description of Artificial Sequence: Synthetic coding sequence
  source 1..2055: mol_type = other DNA
atggccatggattccagcctccaggcaaggctgttccctggtctggccatcaagatccagaggagtaatgggctgattcactctgctaacgtaaggactgttaatctcgaaaagtcatgcgtttcagtggagtgggcagagggcggtgctacaaaggggaaggagattgacttcgacgatgtggctgctattaatcccgaactcttacagctcctccccttgcacccaaaagacaacctgcccctgcaggaaaatgtcaccattcagaagcagaagagacgttctgtgaatagtaagatccccgctcccaaagaaagcttacgctcaagatcgacaaggatgagcacggttagcgaacttcgcataactgctcaggaaaatgatatggaggtggagctgccagccgctgcaaacagccgcaagcagttttctgtgccgctgcggaggaaaagctgcctggtgaaagaggtcgagaaaatgaagaacaaaagggaggagaagaaggcgcagaattctgaaatgaggatgaaacgggctcaagaatatgattccagttttcctaactgggagttcgcaaggatgattaaagagtttagggcaactctggaatgtcaccccttgacgatgaccgaccccattgaggagcataggatctgtgtttgtgtcagaaaacgccctctgaacaagcaggaattggccaaaaaagagatagatgtgatttcaataccaagcaagtgtctcctcctcgtccatgagcctaagctgaaggtggatctgactaagtatctagagaaccaggcattttgcttcgattttgccttcgacgagacagctagtaacgaggtggtatacaggttcacagccaggccactggtgcagacgatcttcgaaggaggaaaggctacgtgcttcgcatacgggcagacaggcagtggcaagacacacaccatgggcggagacctgtcaggcaaggctcagaacgctagcaagggcatttatgccatggcaagccgcgacgtcttcttgctcaagaatcaaccatgctaccgaaagctggggctggaggtgtatgttactttttttgaaatctacaatggcaagctgttcgatcttcttaacaaaaaagctaaactgcgtgtgctggaagatgggaaacagcaggttcaggtagtgggcctgcaggagcatctggttaactccgccgacgatgtgatcaaaatgattgacatggggtcagcctgtaggacttccgggcagactttcgctaacagtaacagttccaggagtcacgcctgctttcagatcattctgagagcgaagggcagaatgcatggcaagttcagtctggttgacctggccggaaacgaaaggggagcagataccagctcagctgataggcaaacgcggatggaaggagccgagattaataagagcctgctggcgctgaaggagtgtatacgagccttaggccaaaacaaagcccacacgccattccgtgagtctaaactcacgcaggtcttgagagattcttttataggtgagaacagcaggacctgtatgatcgccaccatctcacccggtatttcaagctgtgaatacactctgaatactctgcgctacgccgaccgggttaaggagctgagcccccactcagggccaagcggcgaacagctaattcagatggagactgaggagatggaggcctgttcaaacggcgcacttataccaggcaacctctctaaagaggaagaggaactgagctctcaaatgtcttctttcaatgaagccatgacgcaaatccgtgagttagaagaaaaagcaatggaagaactcaaagagatcatccaacaggggcctgattggctggagctttctgaaatgactgagcagccggactacgacctcgaaactttcgtgaacaaagccgagagcgcgttggcacagcaggctaagcatttctcagctctgcgcgacgttatcaaggcgcttagattagcgatgcaacttgaggagcaggctagcagacagattagcagcaagaaacggccacaatag

SEQ ID NO: 227863 - DNA, 1839 bp, synthetic construct
  misc_feature 1..1839: note = Description of Artificial Sequence: Synthetic coding sequence
  source 1..1839: mol_type = other DNA
atgtcaactgtttcggagttacggatcacagcccaggaaaacgatatggaggtggagcttcctgccgcagccaatagccggaaacagttcagcgtccccccagcccctacccgaccctcctgtccagccgtcgccgagattcctttgcgaatggtgagtgaggagatggaggaacaggtccacagtattcgcggatcctcttccgccaatcccgtgaactctgtgaggcgcaaaagttgtcttgtcaaagaggtagagaagatgaaaaataagagggaagagaagaaggctcaaaacagcgagatgagaatgaaacgggcacaggaatacgacagcagctttcctaattgggaattcgctcggatgatcaaggaattccgcgcaacattggagtgccaccctttgaccatgaccgaccctatagaagagcatagaatctgcgtctgcgtgagaaagcgtcctctgaataaacaggaactggccaagaaggagatcgatgtgatcagcatcccctctaagtgtctgttgctagtgcacgagcccaagctgaaggttgaccttaccaagtacctggagaaccaggctttttgctttgactttgcatttgacgagacagcttcaaatgaggtggtgtacagatttacggcccgacctcttgtccagaccattttcgagggcggaaaggcgacatgttttgcttacggccagaccggttctgggaaaacccacaccatggggggagatctgagcggaaaggctcagaacgccagtaaaggaatctatgcaatggctagtcgggatgttttccttctgaaaaatcaaccttgttaccgaaagctggggctggaggtgtacgttaccttcttcgaaatttataatggtaaactctttgatttgctcaacaaaaaggctaaactgcgagtgctggaggatggcaagcagcaagtgcaggtagttggtctacaggagcatctggtgaactcggcagacgacgtgattaagatgattgacatggggtccgcctgtagaacctcaggccagactttcgctaacagcaactcttcgcggtcccacgcatgctttcagattatccttcgtgcgaagggacgcatgcatggcaaatttagtctcgttgacctggcagggaatgaacgaggtgctgacacaagttctgcagatcggcagacccgcatggaaggcgctgaaattaacaaatcactgctggccttgaaggagtgcatacgcgctctcggacagaacaaggcccataccccctttagagagtccaagctgacacaggtgctgcgggatagctttatcggggagaactcgagaacctgtatgattgcgactatctcccctggcatctcgagctgcgagtacactctgaacaccctccgctacgcagaccgcgtcaaggagttgtctccccactctggcccttctggcgaacagctcattcagatggaaacagaagagatggaggcgtgttcgaacggggctctgattcctggaaacctatccaaggaagaggaggagctgtccagtcagatgtcaagttttaacgaggctatgactcaaatccgggagctggaggagaaagctatggaagagttgaaggagatcattcagcagggacccgactggctggaactctccgagatgaccgaacaacccgactacgacctagaaacgttcgtgaacaaagccgagtcagccctcgcccagcaggctaaacactttagcgctctgcgggatgttattaaggccctgagactggctatgcaactggaagaacaggcctccaggcagataagcagcaaaaagcgcccacagtag

SEQ ID NO: 227864 - DNA, 2178 bp, synthetic construct
  misc_feature 1..2178: note = Description of Artificial Sequence: Synthetic coding sequence
  source 1..2178: mol_type = other DNA
atggccatggattcctccctgcaagcacggctgtttccgggtctggctattaaaatacagcgatcaaatggtctgatacacagtgctaacgtgagaacagtcaatttagagaaatcatgcgtctccgtcgaatgggctgagggaggtgccacaaaaggcaaagagatcgacttcgacgatgtggctgctataaatcctgaactgctccagctgcttccccttcaccctaaagataacttacctctccaggagaacgttactatccaaaaacagaagcgtcgttcagttaactccaaaattcctgccccaaaagagtccctacgctctaggtcaaccagaatgtccaccgtgtctgaactaaggattacagctcaggaaaatgatatggaggtggagctccctgccgcagcgaattcaaggaagcagttctccgtccctcccgctccaacacggccaagttgtcctgctgtagctgaaattcccctcagaatggtgagcgaggagatggaggaacaggtgcactctattaggggttcctcgtctgccaatccggtgaattccgtcagaagaaagtcgtgcctggtgaaagaagtcgaaaagatgaaaaataaacgcgaggagaagaaggctcagaactctgagatgcgtatgaagagagcacaggagtatgactcctctttcccaaattgggaattcgcacgaatgatcaaagaattcagggctaccctggagtgtcaccctctgaccatgacagaccctattgaggagcatcggatctgtgtttgtgtacggaagagacccctgaacaagcaggagctcgctaagaaagagatcgatgtcattagcatcccctcaaagtgcctgcttctagtgcatgagcctaagttgaaggtcgatctgacaaagtacctcgagaaccaagctttttgctttgatttcgctttcgatgagaccgcatctaacgaggtcgtctaccgctttacagcaagacctttggttcagacaatcttcgaggggggaaaggcaacatgtttcgcctacgggcagacaggctccggcaaaacacatacaatgggaggtgatcttagcggaaaggctcagaacgcctctaagggcatctacgccatggctagtcgggatgtgttcctgctcaagaatcaaccatgctatcggaagttaggtcttgaggtgtacgtaacatttttcgaaatttacaacggcaaactcttcgacctgttgaacaagaaagcgaaactgcgggtacttgaagacggtaaacagcaagttcaggtagtcggtcttcaggagcacctcgttaactcggctgacgatgtaattaagatgatagatatgggctctgcctgccgaacatctggacagacatttgcaaacagcaattctagtcggtcacatgcctgtttccagattattcttagagccaaaggccgaatgcacggcaaatttagcctggtcgatcttgcgggtaatgagcgcggtgctgacactagttctgctgacaggcagactcggatggaaggtgctgaaatcaataagtcccttttagcgctgaaggaatgcatcagagcactgggacagaacaaggcacataccccctttcgcgaatccaagctcacccaggttctgcgcgacagtttcattggagagaattctcggacgtgtatgatcgccactatcagccccggaatctcctcatgtgagtacactctaaacacacttcgctacgctgaccgagtgaaagagttaagcccccacagcggtccgagcggggaacagcttattcagatggaaacggaggagatggaagcctgttctaacggcgctcttatcccgggtaacttgtccaaagaggaggaagagttatccagccagatgtctagtttcaatgaggccatgactcaaattcgcgaactggaggaaaaggctatggaagaattgaaggagatcattcagcaaggccctgattggcttgaactgagtgagatgactgagcagcccgattacgacttggagacgttcgtgaataaggctgagagtgccctggcgcagcaggcgaaacatttcagtgcattgcgagatgtgatcaaggcgctgcgactggccatgcaactcgaggagcaggcctccagacagatctcctccaagaagcgacctcagtag

SEQ ID NO: 227865 - DNA, 324 bp, synthetic construct
  misc_feature 1..324: note = Description of Artificial Sequence: Synthetic coding sequence
  source 1..324: mol_type = other DNA
tgaaaggagtgtatacgagccctaggccagaacaaagctcataccccgttccgtgagtctaaactgacccaagttctccgagactcattcatcggtgagaattcgaggacatgtatgattgcgactatttctccgggaatctcgtcatgtgaatatactcttaacactctcagatacgcagacaggcagggctgtcattcgataccgctggagccacaggcatctaaacccggtaggtgccatatccctctgctgagcaaggaggaggaggaacttagcagccagatgagctcctttaatgaggcaatgacccagatccgctag

SEQ ID NO: 227866 - DNA, 1011 bp, synthetic construct
  misc_feature 1..1011: note = Description of Artificial Sequence: Synthetic coding sequence
  source 1..1011: mol_type = other DNA
atggccatggactcaagtcttcaggcccgactgtttccagggcttgctataaagatccagcggtctaatggcctcattcacagcgcaaatgtcagaaccgtgaatttagaaaagtcatgtgtcagcgttgagtgggctgagggtggggcaaccaaaggaaaagagattgatttcgacgatgtcgccgctattaatcctgagttacttcagcttctgccactgcatcctaaggataacctacctctgcaggagaacgtcactatacagaaacagaagaggcgctccgtcaactccaagattccagctcccaaggaaagtctcaggtctcggtcaacgagaatgtccaccgtgagtgagctgagaattacagcccaggaaaacgatatggaagttgaactgccagccgcagcaaactcaagaaagcagttctccgttcctctccgaagaaagagctgcctggtaaaagaggtggaaaagatgaaaaataaacgcgaagaaaagaaggcacagaattccgagatgaggatgaaacgagcccaggaatacgattctagctttcctaactgggaattcgccaggatgataaaagagttcagggctacacttgagtgccaccctcttacaatgacagatcccattgaggagcatcgaatttgtgtttgcgtaagaaagaggccgctcaataaacaggaactggccaaaaaggagatcgatgttatcagtatccccagcaaatgccttctcttggttcatgaacctaagcttaaggtggatctgaccaagtacttggagaatcaggccttttgctttgactttgcctttgatgagactgcaagcaacgaagtggtgtacaggttcactgcgagacctctggtgcagaccatatttgagggtggtaaggctacatgtttcgcctacggacaaactggcagcggcaagactcatacaatggggggagatttatccggtaaagcacagaacgcatccaaaggtatctatgccatggcgtag

SEQ ID NO: 227867 - DNA, 864 bp, synthetic construct
  misc_feature 1..864: note = Description of Artificial Sequence: Synthetic coding sequence
  source 1..864: mol_type = other DNA
atggtacggtctggcgtgcccagaagcagagggctcgtgtcagggctgatccacagcgccaatgtcaggaccgtcaatctcgaaaagtcttgcgtatctgtagagtgggccgagggaggagcaaccaaaggcaaggagattgattttgacgatgtcgctgccataaatccagagttattacaactcctccccctccatcccaaggacaacctccctctgcaggagaatgtgactatccagaagcagaaacgaagatctgtgaatagtaagatccccgctccaaaagagtccttaagatctcggtcgacacggatgtctacggtctccgaactccgcatcacggctcaagaaaatgatatggaggtggaactccctgctgcagcaaattctaggaaacaattttccgtgcctcccgctcctacaaggcctagctgccctgccgtcgctgaaatccccttacgcatggtgtcagaggagatggaggaacaggtgcattcaattagagggagctctagcgcaaatcccgtgaactcggttcggcgtaaaagctgcctggttaaagaggtggagaaaatgaaaaataaacgggaggagaagaaagcccaaaacagcgagatgcgcatgaagagggcacaggagtatgattcctcgtttcctaactgggaattcgccagaatgattaaggagtttagagcaactctggagtgccatcccctcaccatgactgacccgattgaagagcatagaatctgtgtatgtgtacggaaacggcctctgaataaacaggagctggctaagaaggagatcgacgttatttcaatccccagcaagtgcctgctgctggtgcacgagcctaagctctag

SEQ ID NO: 227868 - DNA, 2244 bp, synthetic construct
  misc_feature 1..2244: note = Description of Artificial Sequence: Synthetic coding sequence
  source 1..2244: mol_type = other DNA
atgagcaagctgaagagtagcgagtccgtgcgagtggtggttcggtgcaggccaatgaacggcaaggaaaaggccgcttcctatgataaagtagtggacgtagatgtaaaactgggccaggttagcgtgaaaaacccaaaaggcactgctcacgaaatgcccaagaccttcaccttcgatgcagtgtatgattggaatgcgaaacagttcgaactgtatgatgagacttttaggcctttggtcgattccgttttgcagggattcaatggcactatcttcgcctacgggcagaccgggacgggcaagacatatacaatggaggggatcagaggagacccagaaaagcgaggagttattcccaacagctttgaccacatcttcactcacatctccaggagtcaaaaccagcaatatctggtaagggcatcttatttggaaatataccaggaggaaatacgcgacctgctctccaaagaccagaccaaacgtttggaactgaaagagagaccggacacgggcgtctatgtgaaggacttatcatccttcgtgaccaagtctgtgaaggagattgaacatgtgatgaatgtcgggaaccaaaacagaagcgtaggggcaactaatatgaacgaacactcatcacgaagtcatgctatttttgtgatcactatcgagtgctcagaggtcggactggatggagagaaccatatccgcgtgggcaagcttaatctagtggacctggccggatccgagagacaggccaaaaccggagcacagggggagcgcttaaaggaggccactaagattaatctcagtttgagcgccctgggtaacgtgatctctgccctggttgacggcaagagcacccatattccttatcgcgattctaaactcaccaggctgctccaagacagcctggggggaaacgcaaagactgtaatggttgctaatgtggggcctgcctcgtataatgtcgaggagacccttactactttaagatatgctaacagggcaaaaaatatcaaaaataagcctagagtgaatgaagacccaaaggacgccttattacgagagttccaagaagagatcgctagactgaaagctcagctagagaagaggagtattggtcgacgaaaacggagagaaaagcgcagggagggcggaggaagtggaggaggcggtgaggaggaggaagaagagggtgaggaaggagaggaggaaggcgacgataaagacgactattggcgagaacagcaggaaaaactagagattgagaagagggccattgtggaggaccatagtttggttgccgaagaaaaaatgcggctgctgaaggaaaaggagaagaagatggaggatctacggagagaaaaggacgcagccgaaatgcttggcgcaaaaatcaaagccatggagagcaagctcctggtgggcggtaagaacatcgtcgaccacacaaatgaacagcagaagattctcgagcagaagcgccaggagatcgcagaacagaagagacgcgagagggagatacagcagcagatggaaagcagagacgaagaaacactggaactgaaggagacatattcctccttacagcaggaggtcgacattaagaccaaaaagctgaagaagctgtttagcaagctacaggctgtcaaggcagagatccatgacctgcaggaagagcatatcaaagaacggcaagagctcgaacagactcagaacgagttgactagggaattgaaattaaagcatctgatcatcgagaattttatcccactggaggaaaaatctaagatcatgaacagagctttttttgacgaagaagaggaccattggaagctccatcccataacacgactagaaaatcagcagatgatgaagcggccagtgtccgctgtgggctacaagaggcccctctcccagcacgccagaatgtcaatgatgattagaccagaggccagatacagggccgagaatatagttttgctcgagttggacatgccatctcggacgaccagggattatgagggtcccgcaatcgcaccaaaggttcaggctgccttagatgctgcattacaggacgaagacgaaatccaggtagacgcttcctccttcgagtccacagctaataagaaatctaaggcaaggcctaagtctgggagaaagtccgggagttcgagctccagctcaggcacaccagcatcccagttatatccccagtctcgcggactggttccaaaatag

SEQ ID NO: 227869 - DNA, 1122 bp, synthetic construct
  misc_feature 1..1122: note = Description of Artificial Sequence: Synthetic coding sequence
  source 1..1122: mol_type = other DNA
atggtggccaatgtgggcccagcaagttataacgtggaggaaactttgaccacgctacgatacgccaaccgcgcaaaaaatattaagaataagccaagggtgaatgaagaccctaaagatgctttgctgagggaatttcaagaggagatcgccagactgaaggcccagctggagaaacgttcaatagaagagaagatgaggttgctaaaagagaaggagaagaagatggaagatcttcgcagggaaaaggacgccgcagaaatgctcggggctaaaattaaagccatggaatccaagctgctagtcggaggtaagaacatcgtggaccacactaatgaacagcagaaaattttggagcaaaagcgtcaggagattgctgaacagaaacgccgtgaaagagagatacagcagcagatggagtcccgcgatgaggaaacactggagttaaaggagacctattcctccttgcagcaagaagtcgacatcaaaacgaagaaacttaagaagctctttagcaaattgcaggccgtaaaagccgagatccatgatctgcaggaggagcacataaaagagcgacaggaactcgaacagacgcagaacgagctgacccgcgaactaaaactcaagcacctgataatcgagaattttattcccctcgaagagaagtctaaaattatgaaccgcgcttttttcgatgaggaggaagaccactggaagctgcacccgattacacgtctcgagaaccagcagatgatgaagcgtcccgtgtctgcagtgggctacaaacgcccactgagccagcatgcccgaatgtccatgatgatccgacccgaggccagatacagagccgagaacattgtcttgctggagcttgacatgccctcgagaaccacaagggactatgaggggccagctatagctcctaaggtgcaggctgcactggacgccgcattacaagacgaggatgagatccaggtggatgcctcttcttttgagtctaccgccaacaagaaaagcaaggccaggccaaaatccgggaggaaatcagggtcctcaagcagctctagcggaaccccagcctcacagctgtatccacagagccgcggtcttgttcccaaatag

SEQ ID NO: 227870 - DNA, 2382 bp, synthetic construct
  misc_feature 1..2382: note = Description of Artificial Sequence: Synthetic coding sequence
  source 1..2382: mol_type = other DNA
atggcctctaagaccaaggcaagtgaggctctcaaggtggtggccagatgtcgacctctgtctcgaaaggaggaagcagccggacatgagcagattcttaccatggatgtaaaattaggacaggtcacccttaggaatcctcgggctgctccaggcgaattacctaagacttttacatttgacgcagtgtacgacgcaagcagtaagcaggccgacctttacgacgaaacagtgcgacccctgatcgatagcgtacttcaaggatttaacgggactgtgttcgcgtatggccagaccggaacaggcaaaacctatacgatgcagggtacctgggtagagccagaactcaggggggtgatacccaatgcgttcgaacatatatttacacacatcagcaggtctcaaaaccagcaatacttggttcgagcctcatatcttgaaatttaccaggaagagattagggacttacttagtaaggagcctggtaagaggctagagcttaaagaaaatcctgaaaccggcgtgtacatcaaagacttgagtagcttcgtcaccaagaacgtgaaagaaattgaacatgtcatgaacctggggaatcagactagggccgtcggctctacacacatgaacgaggtctccagccgcagtcatgcaatattcatcatcactgtcgagtgttcagagagaggaagcgacgggcaggaccacatccgtgtgggaaagcttaacttggtggacctggccggatctgagcgacaaaacaaggcaggtccgaatacagccggtggcgctgcaaccccgtcctctggtggtggtggaggcggaggcggttccggaggaggcgcagggggagaacgaccaaaagaggctagtaagataaatttgagcctatccgccctggggaacgtgattgcagctctggccggtaatcggagcacccatattccctaccgggactcaaagttgactcgactgttgcaggactctctcggtggcaatgcaaagacaatcatggtggctactctgggtcccgcatcgcattcatacgatgaatctctttccacgctgaggtttgcaaacagggctaagaacattaagaacaaaccacaggtaaacgaagaccccaaagatacactgctgcgagaattccaagaggagattgcaaggttgaaggctcagctcgagaagcgcggtatgttgggaaaaaggccacgtagaaagagttccaggagaaaaaaggcagtctcagcccctcccggttacccggagggccctgtcattgaagcttgggtcgccgaagaggaagacgataacaacaacaaccaccggccaccacagccaatcctcgaatctgctcttgagaagaacatggaaaactatctgcaggagcagaaagaacggttggaggaagagaaagccgcaatccaggacgatagatccttagtgagcgaggaaaagcagaagttgctagaggagaaggaaaagatgctggaagacctgcgcagggaacagcaggcaacggagctcctcgctgcgaaatataaagctatggagagcaaactcctcattggcggtcgcaacatcatggaccacacaaacgaacagcagaagatgctcgagttgaagcgccaggaaatcgccgagcagaagcgcagggagcgggaaatgcagcaagaaatgatgctgcgagatgaggaaactatggaactacgcggtacgtacacatcccttcaacaggaagtggaagtaaaaacaaagaagttaaagaagctctatgccaaactgcaggccgttaaagccgagattcaagaccaacatgatgaatatatcagagtccggcaggatttagaggaagcccagaacgagcagacacgggaactgaaacttaaatatctaattattgagaattttattcctccagaagagaaaaataagatcatgaaccggctctttcttgattgtgaggaggagcagtggaaatttcaaccactagtccctgcgggagtcagttctagccagatgaaaaaacggccaacaagcgctgtcggttataagcggccaatttctcagtacgccagagttgcaatggcaatgggctcccaccctcggtatagagcagagaatataatgttcttggaactggacgtcagcccaccggcagtgtttgagatggaatttagccatgaccaggagcaggatcccagagcactccatatggaaaggctaatgcgcctggatagctttctggaaagaccctccacgagcaaagtaaggaagagcaggagctggtgtcagtctccccagcgccctccaccatcaactacccacgccagcctggcttctgcctcccttcgcccagcaaccgttgctgaccatgagtag

SEQ ID NO: 227871 - DNA, 2382 bp, synthetic construct
  misc_feature 1..2382: note = Description of Artificial Sequence: Synthetic coding sequence
  source 1..2382: mol_type = other DNA
atggcttccaagactaaagcctctgaggccctcaaggtggttgctcgatgtcgcccattgtcaagaaaggaagaggcagctggccatgaacagatcctaaccatggatgttaagctgggccaggtcacattgcggaatccacgggctgcacctggagagctgcccaagacctttacgttcgacgctgtctacgacgcgtcatccaaacaggcggacctgtatgatgagacagttaggcccttaattgatagcgtgttgcagggtttcaacggcactgtcttcgcttatggacagactggcactggaaagacttatacaatgcaaggaacttgggtagagcccgagctgagaggggtaattcctaatgcctttgagcatattttcactcacatcagccggtctcagaatcagcagtatctggtcagggcgagttacctagagatatatcaggaggagatccgcgacctcttgagtaaagagccaggcaagcggcttgagttgaaagagaatccagagaccggcgtttacatcaaggatctgagctcgttcgtcaccaaaaacgtgaaagagatcgaacacgttatgaatctgggaaaccaaacccgggcagtcggatcaacgcatatgaacgaagtgagctctcggtctcatgctattttcatcataacggtagaatgcagcgaacggggatccgatgggcaggatcacatccgcgtgggcaaactgaacctggtcgacctcgcgggatctgaacggcagaacaaggccggaccgaacactgctggcggagccgctacccctagttcggggggtgggggtggcggaggtggctcaggcggaggagccggtggcgagcggccaaaggaggcaagtaaaatcaacttatccctgtccgccctcggcaatgtgatagctgcgctcgcgggaaacagaagcacccacatcccatacagggacagcaagttgactagactccttcaagattctcttggaggtaacgcgaagacgattatggtggccaccctgggtccagcttcccattcgtacgatgaatctctgagtacacttaggtttgcgaaccgggctaagaacatcaagaataagccccaggtaaatgaggatccaaaagacacgttgctccgagaattccaagaagaaatcgctcggctcaaggcgcagctggaaaaacgagggatgctggggaaaagacccagaagaaagtcatctcgcagaaagaaagctgtgtccgccccaccaggctatcctgagggacctgtcatcgaagcctgggtggctgaggaggaggacgacaacaacaataatcacagaccgccacagcccatccttgaatctgccttagaaaaaaacatggagaattatctgcaagaacagaaggagaggcttgaggaagaaaaggccgctatccaagacgaccggagcctggtgtccgaggagaagcaaaagctgctggaggaaaaggagaagatgctcgaagacctgaggcgagaacaacaggctacagaattgctggcagcaaagtacaaagcgatggaatccaaattactgatcggcggaaggaacattatggatcatactaatgaacagcaaaagatgttggaactgaagcggcaggaaatagcagagcagaagaggagagagcgggagatgcagcaagaaatgatgttgagagacgaagaaacaatggagctgagaggaacatacacctccctgcaacaagaggtcgaagttaagaccaaaaaactgaaaaaactttatgctaagctccaggcagtgaaagctgaaatccaggaccagcatgatgagtatataagggtgcgccaggacttagaagaggcacagaatgagcagacaagagagctcaaactgaagtacttgatcatcgagaactttattccaccggaggaaaagaataagatcatgaaccgactgttcctcgactgcgaggaagagcagtggaaattccagccattggtccccgctggcgtgagttcatcgcaaatgaaaaagagacctacctctgccgtaggatataagcgacccatatctcaatacgcacgcgtcgcaatggccatggggtcccacccacggtacagggccgagaatattatgttccttgagcttgacgtatcccctcctgcggtgttcgagatggagttctctcatgaccaggagcaagatccgagggcactccatatggagcgcttgatgcgtctggactcttttctggagcggccatctacctctaaggttcgcaagagcaggagctggtgccagtcccctcagcgccctccaccgtccacaacccatgcctctctggcatctgcctcgctgcgtcctgccactgtcgccgatcacgaatag

SEQ ID NO: 227872 - DNA, 1800 bp, synthetic construct
  misc_feature 1..1800: note = Description of Artificial Sequence: Synthetic coding sequence
  source 1..1800: mol_type = other DNA
atgaatctcgggaatcaaacacgcgctgtcggctctacccatatgaatgaggtgagcagcaggagccacgcaatctttattatcacagtggaatgttctgagcgtgggtcagatggacaggatcacattcgggttggcaagctcaacctcgtcgatctcgccggatcagagaggcagaataaggcgggacccaacacggcaggcggagcagcaaccccttcatctgggggtggaggtggagggggtggcagcggcggaggtgcaggtggcgagcggcctaaagaggcctcaaagataaacttatcgctctccgctctgggaaacgtgatagctgctcttgcaggcaacaggtcaacccacataccttatcgggatagcaagctgactcgcctactacaggacagcttaggcggaaacgctaaaactatcatggtcgcaactttggggcctgcatcccattcctacgatgagtcgctgagtactctgcgttttgcaaatcgggcaaaaaatatcaagaacaagccacaggtgaatgaagacccgaaagacacacttctgcgcgagtttcaggaagagattgctaggctgaaagctcagctcgagaaacgtgggatgctggggaagaggcctaggcgaaagagctcccgcagaaaaaaggcggttagcgcccctcccggatatcctgaaggcccagtaatcgaggcttgggtagccgaagaggaggatgataataacaacaaccatcgacctccacagcccatcctcgaaagcgcgcttgaaaagaatatggagaactatctgcaggaacagaaagagagactcgaagaagagaaggctgccattcaggacgacagatcactagtgagtgaagaaaaacagaagttgctcgaggaaaaggagaaaatgttggaggacctgagacgcgaacaacaagccacggagctgctcgctgcaaagtacaaagcgatggaatccaagcttttaataggaggcaggaacatcatggatcataccaatgagcagcagaagatgctggagctgaagcggcaagaaattgccgagcagaagagaagggagagggaaatgcagcaggagatgatgctccgtgatgaggaaactatggagctgagaggcacctatacttcgctgcagcaggaagtggaggtgaaaacgaaaaagttgaagaagctgtatgccaagctgcaagccgtcaaagccgagatacaggaccagcacgacgagtacatcagggttcgccaggatctggaggaggcccagaacgagcagaccagagaactgaagcttaagtatttaatcatagagaacttcatcccaccggaggagaaaaataagataatgaatcgcctcttcttggactgcgaggaggagcagtggaaattccaacctcttgtaccagctggggtctccagctcccaaatgaagaagcgaccaaccagcgcggtcggttacaaaaggcccattagccagtatgcaagggtggccatggctatggggtcccacccaagatacagagccgagaacatcatgttcctggaactggatgtgagcccgccagcagtatttgagatggagttctcccacgatcaggaacaagatccccgagctttgcacatggagcgccttatgcggcttgattcgttcctggagagacccagtaccagtaaggtgagaaagtcacgctcgtggtgccaatccccccagcggcctccgccaagcactacccacgcctcattagcgtctgccagcctccgaccagcaactgtcgctgaccatgaatag

SEQ ID NO: 227873 - DNA, 3384 bp, synthetic construct
  misc_feature 1..3384: note = Description of Artificial Sequence: Synthetic coding sequence
  source 1..3384: mol_type = other DNA
atgaaagaggaggtaaaaggcatccccgtgcgtgtggccttgcgctgtcggccactggtgcccaaagagattagcgaaggctgccagatgtgtctctcttttgtgcctggggagccgcaggtcgtagtcgggaccgataagtccttcacatacgattttgtgttcgacccctctactgagcaggaggaggtgttcaatacggctgtggccccactcataaaaggagttttcaaagggtataacgcaacagtgcttgcttacggccagacaggctcaggcaagacatacagcatggggggagcgtatacagctgagcaggaaaacgagcctactgttggagtgataccccgagtgatacagttgttattcaaagagattgataaaaagtcagattttgagtttactttgaaagtgtcatacttggaaatctacaacgaggagattctggacctgctgtgtcccagccgcgagaaagcgcaaatcaatatcagggaagaccctaaagaggggattaaaatcgtgggtctgacggagaagactgtcttagtcgcattggacactgtgtcctgtcttgagcagggaaataattctaggacagtagcgtctacagctatgaatagtcagtcatcccgcagccatgctattttcactatatcactggaacagcgtaagaagagcgacaagaacagctccttccggagcaaactacatctggtcgacctggcaggctctgaaaggcagaaaaagaccaaagccgagggtgatcggctgaaggaagggatcaatatcaaccgcggacttttatgcctgggcaacgtcataagcgccctgggcgacgataagaagggcggttttgtcccttatagagacagcaaattaacccggcttctccaggatagcttaggtgggaatagccatacattaatgatcgcctgtgtgagccctgcagatagcaatctagaggagaccctcaacacactacgttatgccgaccgggctcgaaaaataaagaacaaacctatagtgaacattgatccacagaccgccgaattgaaccacctcaaacagcaggttcagcagctgcaggtcctcctgctgcaggcgcatgggggaactctccctggtagcattaccgtggagccatccgagaacttgcagagcttgatggaaaagaatcagagtctcgtggaagagaacgagaaactgagccgcggtttaagcgaagccgctgggcagaccgcccagatgttggaaaggattatcctgaccgaacaggcaaatgagaagatgaatgcaaaacttgaggaacttagacagcacgctgcatgcaagctggacctgcagaagctggtggagactctggaagaccaagagctaaaggaaaacgttgaaattatctgtaacctccagcaactgatcacgcagttgagcgatgaaaccgtggcttgcatggccgctgcgatagatactgccgtggagcaggaggcccaggtcgagacctctcccgagacctccagatcgtccgatgccttcacgacgcagcatgctctaaggcaggcgcagatgagcaaggagctcgttgaactgaacaaggccctcgctttgaaggaggccttagcgcgaaaaatgactcaaaacgatagtcaactccaaccaatccagtatcagtaccaggacaacattaaggaattggagctggaggtgatcaatttgcagaaagagaaggaagaactggttctggagctgcagacagccaagaaggatgccaaccaggccaagctaagcgaaagaagacgcaaaagactccaggaattggaaggccaaattgcagacttgaaaaaaaagctgaatgaacaatcaaaactactcaaactcaaggagtccacggagcgtacagtttcaaagttaaaccaggagatcaggatgatgaaaaatcagagagtgcaattaatgcgacaaatgaaggaagacgctgaaaagtttaggcagtggaaacagaagaaagataaggaggtgatccaactcaaagaaagagacagaaagaggcagtacgagctcttgaagcttgagcgcaacttccagaaacagtccaacgtcctgagacgtaaaacagaggaggctgcggcagccaataaacggctgaaggatgccctccagaaacaacgcgaggtcgccgataagcgcaaggaaactcaatcgcgcggaatggagggcacggctgctcgagttaaaaactggttgggtaatgagattgaggtgatggtttcaacagaggaagccaagagacaccttaacgatctattagaagatcggaaaatactggctcaggacgtggcgcagttaaaggaaaaaaaagagtcgggggagaaccctcctcctaagctgagacgaaggacattctcccttacagaggtgagggggcaggtgtcagaaagcgaagatagtattaccaaacagatcgagtctttagaaaccgagatggaattcaggagcgctcagattgccgatctccagcaaaagttgttggacgcagaatccgaggaccgtccaaagcagcggtgggaaaacatcgcaaccatcctggaagcaaagtgtgccctgaagtatttaattggcgagctagtttcctctaagattcaggtttcgaaactggaaagctcactgaagcagtccaagacctcttgcgccgacatgcagaaaatgctcttcgaggagagaaaccactttgcagaaattgagacagaactgcaagctgaattggtgcgaatggagcagcagcaccaggagaaggtgctctatctcctctcacagttgcagcagtctcagatggcagagaagcagttggaggagtctgtgtcggaaaaagagcagcagcttctcagtacgttaaagtgccaggatgaagagttggaaaagatgcgagaggtgtgcgagcagaatcagcagctgctgagggagaacgaaatcatcaaacagaaactgaccttgctccaggttgcctctcgccagaaacatctgcccaaagacactttgctcagtcctgactccagctttgaatatgtacctcctaaaccaaaaccctctcgcgtcaaagagaaattcttggagcaatctatggatattgaagatctaaaatactgctctgagcattctgtaaacgagcatgaagacggcgatggtgatgacgatgaaggagacgatgaagagtggaaacctactaaactggtgaaggtgtcccgtaagaatatccaaggagtactgctcctgacacctgtcatttcagccttgtgggaggccgaagcacgaggtttgctcgaggcacggagcagccgacccgcatgggcaacatggagagatcctgtatcaaccaagcccaagaattag

SEQ ID NO: 227874 - DNA, 3699 bp, synthetic construct
  misc_feature 1..3699: note = Description of Artificial Sequence: Synthetic coding sequence
  source 1..3699: mol_type = other DNA
atgaaggaagaagtgaagggaatccccgtacgcgtggcgctacggtgcagaccactggtgcctaaggagattagtgagggctgccaaatgtgcctgagcttcgtgcctggagagccccaggtggttgtagggaccgacaaatcctttacgtacgatttcgtgtttgatccaagtaccgagcaggaggaggtatttaataccgctgtggcaccgctgatcaagggcgtgtttaaaggctacaacgccactgtgctcgcctatggtcagaccggaagcgggaaaacttactcaatgggcggtgcctacaccgcagagcaggaaaacgaacctaccgtgggggtgatccccagagtgatccagttgcttttcaaagagatcgataagaagtcagacttcgagtttacgttgaaggtaagctatctggagatctataatgaggagattctggatctcctttgccccagccgagagaaagcccaaatcaacattcgagaagatccgaaagaagggatcaaaattgttgggctgactgagaaaaccgtgctggtggctttggacaccgtatcgtgcctcgaacagggcaataacagtcgaacggttgcttctactgccatgaattcccagtcatcaagaagccatgccatattcactatttccctggaacagagaaaaaaaagtgacaaaaattcttcattccggtctaaattgcacctcgtggacctcgcaggatccgagaggcaaaagaaaaccaaagccgagggagaccgactcaaagaagggattaatatcaatcggggattactgtgcctcgggaacgtgattagcgctctcggcgacgacaagaagggaggctttgtgccataccgggattccaaactgacaagattgctacaggattcattgggcggaaacagtcacaccctgatgatcgcttgcgtttctcccgcagactcaaacctggaagaaaccctgaatacactgagatacgctgatagagctcgtaagatcaagaataagcccattgtgaatattgacccacaaacagctgagctcaatcacctgaagcagcaggtgcagcagctgcaggtcctgctgctccaggcccacggaggcactttgccaggttctatcaccgtcgagccgagtgaaaacctgcaaagcttgatggagaaaaatcagagcttagtcgaggaaaacgagaagctctcccgaggactgagtgaagctgcaggtcagaccgctcagatgcttgaacgtatcattttaactgagcaagcgaacgagaagatgaatgccaagctcgaagagctgcgacagcatgccgcatgtaagctggatctgcaaaaattggtcgagactctcgaagaccaggagttgaaagagaatgtggagatcatctgtaacctccagcagttgatcactcagctgagcgacgaaaccgtagcttgtatggcagccgcaattgataccgcagtcgaacaagaggctcaggtggaaacctcgcctgagacctcccgctcttctgatgccttcacaactcagcacgccttaagacaggcccaaatgtccaaggagctcgtggagttgaataaggcactggccctcaaggaagcactcgcgagaaaaatgacacagaatgattcccagctgcaaccgatccagtatcagtaccaagacaatattaaggaactggaactggaggtgattaacctgcagaaagaaaaagaggaactagtcctggaactccaaactgcaaagaaggatgccaaccaggccaaacttagcgagcggcgtaggaagaggctccaggaactggaaggtcagatcgccgatttgaagaagaagcttaacgagcagtctaagcttctcaaactcaaggagtctacggagcgcacggtgtccaaacttaatcaggagatccgtatgatgaaaaaccaacgcgtccaattgatgcgccagatgaaagaagatgcggagaaatttcgtcagtggaagcaaaagaaggataaagaggtgattcaattgaaagaacgcgaccgcaagaggcagtacgagctgctaaaactggagcgaaactttcagaaacagagcaatgtgttaagaagaaagacagaagaggcagccgctgcaaacaagcgattgaaggatgctcttcagaagcagagggaggtggctgacaaaagaaaagagactcagtccagaggtatggagggcaccgctgccagggtgaaaaattggctgggcaacgagattgaggtcatggtatccaccgaggaagcaaaacgccacctcaacgatctgctggaagatcgaaagattttggcccaagatgtagcccagctaaaagagaaaaaggagtcgggggagaaccctccaccgaagctgagacggcgaacattctctctgaccgaagtaagggggcaggttagtgagagtgaggacagcattaccaagcagattgagagcctggagacagaaatggagttcaggagtgctcaaatcgccgacctgcagcagaagctgctggacgctgaaagcgaggaccggccaaagcagagatgggagaacattgcaaccatcctcgaggcaaagtgtgctcttaagtatttgataggggagttagtgtcatccaagattcaggtaagcaagctggaatcctctctcaagcaaagcaaaaccagctgtgccgacatgcagaagatgctgttcgaagagaggaatcactttgctgagattgaaaccgagcttcaggctgagctcgtccgaatggaacagcagcaccaggagaaggttctttatcttctttctcaattacaacaaagtcaaatggctgagaaacagcttgaagagtccgtttctgagaaagaacagcagttactatccacacttaaatgtcaggatgaagaactagaaaagatgagagaggtgtgcgagcaaaaccaacagctattgcgggaaaacgagatcatcaaacagaagctaacactgttacaagtggcttcccgacaaaaacatcttcccaaggacacgctcctgtcccccgattcgagttttgagtatgttccccctaagcctaagcccagcagggtcaaggagaaattccttgagcagtccatggacatagaggacctgaaatattgttcggaacactccgtcaacgagcatgaggacggggatggagacgatgacgaaggagatgatgaagaatggaagcccactaagttagttaaggttagccggaagaacatacagggttgttcatgtaagggatggtgcgggaacaaacagtgtggttgccggaaacagaagtccgattgtggtgtggactgctgttgcgacccaactaaatgtaggaaccggcagcagggtaaagattctctcggtactgtagagagaacccaggatagcgaaggctccttcaaactggaagacccgaccgaggtgaccccagggctgagcttctttaaccctgtctgcgctacccctaatagtaagatcctgaaggaaatgtgtgacgtggaacaggtcctgtcaaaaaaaacgccaccggctccaagcccattcgatcttccggaactgaagcacgtagccacggagtaccaggaaaataaggctccgggaaaaaaaaaaaagagagctctggcctcaaacacatcattcttcagcgggtgtagtcctatcgaagaagaagcgcattag

SEQ ID NO: 227875 - DNA, 1605 bp, synthetic construct
  misc_feature 1..1605: note = Description of Artificial Sequence: Synthetic coding sequence
  source 1..1605: mol_type = other DNA
atgtgcagtgatgtaaagcgcgaggcggcagctgctaataagcggctcaaggacgcgctacaaaagcagagggaagtggccgataaacgcaaagaaactcaatcccgcggaatggaagggaccgctgccagagtcaagaactggctgggcaacgaaatagaggtcatggtatctacggaggaagcgaaaagacatctgaacgatttgctggaggacaggaaaatcttggcccaggatgtagcccagctcaaagagaaaaaagagagtggtgaaaacccgccacccaagctgcgccgaaggacattctctctgactgaagttcgcggacaggtatccgagagcgaagacagcattactaagcagatcgagtcattggagactgaaatggagtttagatctgctcagatcgcagatcttcaacagaagctgttggacgcagagtccgaagatcgaccaaaacagagatgggagaacatagccacaattctcgaagcaaaatgcgccctgaagtacctgattggcgagctcgtcagctccaaaatccaggtgagtaagctggaatcgagtctgaagcagagcaagacctcatgcgcagacatgcaaaaaatgcttttcgaagagagaaatcattttgcagaaatagaaaccgaattgcaagccgagctggtgcggatggagcaacagcaccaggagaaggttctgtacttactttcccagcttcaacagtcacagatggccgaaaagcagctagaagagtccgtatccgagaaggaacagcagctcttgagcacacttaaatgtcaggacgaagagctagagaaaatgagggaggtctgcgagcagaatcagcagctactgagggagaacgagataatcaagcagaaactgactcttctgcaggtggcatcccgccaaaaacatctgccgaaagacacactgctgtctcccgattcaagctttgagtacgtgccccctaaaccgaaaccatcacgagtgaaggagaagtttctggagcaatccatggacatcgaggacctgaaatattgttctgagcactccgtgaatgaacacgaagatggcgatggcgacgacgacgaaggagatgatgaggaatggaagcctactaaactcgtcaaagtctctcggaagaacatccagggctgctcctgtaaaggatggtgcgggaataaacagtgtggttgccgaaaacagaaatcagactgtggcgtggactgttgttgtgatccgactaagtgccggaaccggcaacaggggaaagactcgctcgggactgtcgagaggacccaagattcggagggctctttcaagctcgaagatccaactgaagtcactcccggtctgtcattttttaaccctgtgtgtgcaacacccaactctaaaattcttaaagaaatgtgcgacgtggagcaagtgttgtcaaagaagactcccccagccccttctccctttgacctccctgaacttaaacacgtggccactgagtatcaagagaataaagctcccggaaaaaagaagaaaagggcactcgcgtccaacacctccttcttctctggctgctcccccatagaggaggaagctcactag

SEQ ID NO: 227876 - DNA, 3705 bp, synthetic construct
  misc_feature 1..3705: note = Description of Artificial Sequence: Synthetic coding sequence
  source 1..3705: mol_type = other DNA
atgaaagaagaggtgaagggcattcctgttcgcgtggccttgaggtgccggccactcgtgcccaaagagattagtgagggctgtcagatgtgcctgtcattcgtgccaggggagactcaggtggtagtcgggaccgacaagtcattcacctatgatttcgtgtttgatccctgtacagaacaggaagaggtctttaacaaggcagtggcacctctcatcaagggaatttttaaaggctacaatgctaccgtgctggcatatggtcagaccggcagcggcaagacttacagcatgggcggtgcctacacagcagagcaggaaaacgagccaaccgtgggtatcatccccagagttattcagctcttatttaaagagatagacaaaaagtccgactttgagtttacgttaaaggtatcttacctagagatatataatgaagagatactggatctgttatgtccatctcgcgagaaggcacagatcaacatccgcgaggaccccaaagaaggcattaagatagtgggtctgaccgagaagaccgtgctggttgcccttgatactgtatcttgcctggagcagggcaacaatagtagaaccgtggccagtaccgcaatgaactctcagtcttctcggagtcatgccatttttaccatttctattgaacaacgtaaaaaatcagacaagaactgcagcttcaggagcaagcttcacctggttgatctggctgggtcggagcggcaaaaaaagaccaaagctgagggagatcgattgaaggagggcatcaacattaaccgaggactcctctgcttggggaatgtgatttctgctttgggcgatgataaaaaaggctcctttgtgccctacagggactctaaactgactcgtctcctgcaggacagtctggggggtaactctcatacactcatgatcgcctgcgtgtcacctgcagacagcaaccttgaggagaccctgagtactttacggtacgccgatcgggcaagaaaaatcaagaacaagcccattgtaaatattgatcctcatacagctgagctgaatcatctcaagcagcaggtccagcagctccaagtgctcctgctgcaggcccacggaggcactctgcccggatccataaacgccgagccatcagagaacctgcagtcattaatggaaaaaaaccagtcattagtagaggaaaacgagaagctttcaaggtgcctttctaaagctgccggtcagacggctcaaatgctcgaacgaatcattttgaccgagcaggtgaacgaaaaattaaatgctaaactcgaagagctcagacagcatgtcgcctgcaaactggatctccagaagcttgtcgagaccctggaggatcaggaattgaaggaaaacgtggaaatcatctgtaacctccaacagctcatcacccagcttagcgatgagactgtggcatgcaccgcagccgcaattgatacagcggtcgaggaggaggcacaggtggagacctcccctgaaacgtctagatcaagcgatgccttcaccacacagcacgccctccatcaggcgcaaatgagcaaggaggtggtggaactgaacaatgcactcgctctgaaagaggcactggtccgaaagatgacccagaacgataaccagcttcagcctatccaattccagtaccaggacaatatcaagaatctcgagttagaagtgatcaacctgcagaaggagaaggaagagttggtgcgggagttgcagacggccaagaagaacgtcaaccaggcgaagctgagtgagcacaggcataaactcctgcaggagctggagggacagatcgctgacctcaagaagaaactgaatgagcaatcaaaactgctgaaacttaaggagtcaaccgagcggactgtgagcaaattgaatcaggaaatctggatgatgaaaaatcagcgggtccagctgatgaggcaaatgaaagaagatgccgagaagttcagacagtggaagcagaagaaagataaggaggttatacagctgaaggagcgggaccggaagcgccagtacgagttgctgaagttagaacggaatttccagaaacaatctagtgttctgcgcagaaaaactgaggaagccgcagccgctaacaaaagacttaaggatgcacttcagaaacagagggaagtgaccgataagcgaaaggaaacacaaagccatggtaaggaaggcattgccgctagagtcaggaattggcttggaaatgagattgaagtcatggtctccaccgaagaggctaaacgtcacctgaacgatctattggaagatcgtaagatcctggctcaggatgtggtccagcttaaggaaaaaaaagagtcaagggaaaacccccctcccaagctccgtaaatgcacgttctcattgtcagaagtacatggtcaagttttggaatccgaagactgcattacaaagcaaatcgaatctctggagacggaaatggagctaaggagcgctcagattgccgacctgcaacagaaactgttggatgcagagagtgaggatcgcccaaagcagtgctgggaaaatattgccacaattttagaggctaaatgcgccctgaagtacctgataggcgaattggtttccagtaagatccatgtgacgaagctggaaaattccctaagacagagcaaagcctcttgtgctgacatgcagaaaatgctgttcgaggagcagaaccacttttccgagatagagaccgaattacaggctgagctggtacgcatggaacagcaacatcaggaaaaagtgctctacttggtttctcagttacaggagagccaaatggctgaaaagcaacttgagaagtccgctagcgagaaggaacagcagctggtatccaccctgcagtgtcaggacgaggaactcgaaaagatgagagaggtgtgcgaacagaaccaacaactgctgcaggagaacgagataatcaagcagaaactaatcctgctgcaggtcgcaagccgtcaaaagcatctaccaaatgatactctgttgtcaccagactctagcttcgagtatataccaccaaagcctaagccttctagagtgaaggagaaattcttggagcagagtatggatattgaggaccttaagtactgctccgagcacagcgtaaacgagcatgaggatggagacggggatggagattcagatgaaggagacgacgaagaatggaagcctacaaagctggtcaaagttagccggaaaaatattcaggggtgttcttgtaaaggctggtgcgggaataaacaatgtgggtgcagaaagcaaaagagcgactgcggagttgactgctcctgtgatcctaccaagtgtcgcaacagacagcagggcaaggacagcctgggcacagttgagcagacacaggactctgaaggatctttcaagcttgaggatcctaccgaggtgacaccaggcctctccttctttaatccagtttgcgccacgcctaatagtaagatattaaaagagatgtgtgacatggaacaggtattgtccaaaaaaactgctcccgctccgtcccctttcgaccttccagagagcaaacacggggctacagagtaccaacagaataagcctcctgggaaaaaaaagaagcgcgctttagcgtcaaacactagtttcttttctgggtgtagtcccattgaagaagaggcacattag

SEQ ID NO: 227877 - DNA, 3099 bp, synthetic construct
  misc_feature 1..3099: note = Description of Artificial Sequence: Synthetic coding sequence
  source 1..3099: mol_type = other DNA
atggcagagaccaataacgagtgctccataaaggtgctgtgcagattccgcccattaaaccaggcagagatccttagaggtgacaaatttattccaatcttccagggcgacgactcagttgtgattggcggaaagccatacgtgttcgatagggtctttccacccaacacaacccaggagcaggtgtaccacgcctgtgcaatgcagatagttaaggatgtcctggctggctacaacggtaccatcttcgcttacggacagacgtcaagtgggaaaacacatactatggaggggaaactccacgaccctcagctcatggggataataccccgtatcgccagggacatattcaatcacatctacagtatggacgaaaatctggagtttcacattaaggtgtcctacttcgagatatacctggacaagattagggacctgctggacgtgaccaagactaacctgtccgtgcacgaagacaaaaatcgagttcccttcgtcaaaggatgcaccgagcgattcgtttcgagccccgaagaaatcttagacgttattgatgaggggaaatctaaccgccacgtagcagtgactaatatgaatgaacatagctctagatcccactccattttcctgatcaacattaagcaggaaaacatggaaaccgaacaaaaactgtccgggaagttgtatctggtggacctggccggttccgaaaaagtgagcaagacaggggctgaaggagcagttctggacgaggctaaaaatattaacaagtcattgagcgcccttggaaacgtgatcagtgcgctggcagagggaacaaaaagctatgtcccataccgagatagtaaaatgacacggatcctgcaggacagcctgggcggaaattgtcggacgacaatgttcatctgctgtagtccttccagttacaacgatgccgaaactaaaagtactctgatgtttggccagcgtgctaaaaccatcaaaaatacagcctccgtcaatctggaactcacagctgaacaatggaagaagaagtacgagaaagaaaaagagaagacaaaggcccagaaagaaaccatagctaagctcgaagcggagctgtctcggtggagaaacggtgagaatgtccccgaaactgagcgcctggccggagaggaggccgcactgggagcggaactgtgtgaggagactcccgttaacgacaactcaagtattgttgttagaattgcgcctgaagaaaggcagaagtacgaagaagagattcgtaggctctataagcagctggacgacaaagacgatgaaattaatcagcagtcacagctcatcgaaaaactgaagcagcaaatgctcgaccaggaagagctgctggtcagcaccaggggggataatgagaaagtgcaaagggagcttagtcaccttcagagcgagaacgacgcggcaaaggatgaagtcaaggaggtgctgcaggccctggaggagctggctgttaattacgaccagaaatcacaggaggtggaggagaaaagtcagcagaaccaactgctcgtggacgaactcagccaaaaggtagctacaatgctttctctggagtcagagttgcagaggctgcaggaggtgtccggccatcagcgtaaaagaattgcagaggtgctgaacggactgatgaaggatctgagtgaattttctgtcatcgtcgggaacggagaaattaagctaccggtcgaaatttcaggcgctattgaggaggagtttaccgttgccaggctctacatcagcaagattaaatcagaagtgaagtcagtggtgaaacggtgcaggcagctggaaaacctgcaggttgaatgtcaccgcaaaatggaggtaaccgggcgagagctcagctcctgtcagctgctcatctctcagcacgaggccaagattagatccttaaccgaatacatgcaatcagtagaacttaagaagcgtcacttggaagaatcttacgattcactgagcgatgaactggctaagctgcaggcgcaagagactgtgcatgaagtggccttaaaagacaaggaacccgacacgcaggatgccgatgaggttaagaaggctctcgagctgcaaatggagtcgcatcgagaagcccaccaccggcagcttgccaggctacgagacgaaataaacgagaagcagaagacaattgacgagctgaaggacctcaatcaaaagcttcaactcgaactagaaaaactgcaggcagattacgagaaactaaaatccgaagaacacgaaaagtcaacaaaacttcaggaactgaccttcctgtatgaacgccatgagcaatctaaacaggatttaaaaggccttgaagagaccgtcgcccgagaactccaaaccctccacaatctgcgcaaattgttcgttcaggacgttacaactagggttaaaaaaagcgcagagatggaacctgaggatagcggcggaatccactctcagaaacagaagatttctttcctggagaataatctggaacagctgactaaggtgcataaacagttggtacgcgataacgcggacctcaggtgcgagttaccaaagctcgagaagcggcttagagcaaccgctgagagggtgaaagccttagaaggtgccctcaaagaagccaaggagggtgcaatgaaggacaagcgaaggtatcagcaggaagtagaccgaatcaaagaagctgtgcggtataaatcctccggcaagcgcggacacagcgcccagattgccaaacctgttcgaccaggacattacccagcgtccagtcccaccaacccttatggaacgagaagcccggagtgcattagctatacaaactctctgttccaaaactaccagaacctctatttgcaggccaccccatcgagcacaagcgatatgtattttgccaatagttgcacatcatcgggtgctacttcgagcgggggaccgctcgcgtcctatcaaaaagccaatatggataacggaaacgctacagacataaatgacaataggtccgacttgccttgtggctatgaagccgaagatcaggctaagctgtttcctctgcaccaagaaacggctgcgtcctag

SEQ ID NO: 227878 - DNA, 381 bp, synthetic construct
  misc_feature 1..381: note = Description of Artificial Sequence: Synthetic coding sequence
  source 1..381: mol_type = other DNA
aagagcagcggaaaaagaggtcactctgcccaaattgccaaacctgtcagacccggtcactatcccgcttcttctccaacaaatccctacgggacccgatcccccgagtgcatatcatacactaatagtttgttccaaaattaccaaaacctgtaccttcaagcaaccccatcttctacctccgacatgtacttcgccaattcttgcactagctccggggcaacttcgagcggcggacctctagccagctaccaaaaagcaaacatggacaacggcaatgcaaccgacattaatgacaatcggagtgacctgccatgcgggtacgaggccgaagatcaggcgaaacttttcccgctccatcaagaaaccgccgcatcatag

SEQ ID NO: 227879 - DNA, 2892 bp, synthetic construct
  misc_feature 1..2892: note = Description of Artificial Sequence: Synthetic coding sequence
  source 1..2892: mol_type = other DNA
atggccgaccttgctgagtgtaatatcaaggtcatgtgcagattcaggcctctgaacgaaagtgaggtgaacagaggggataagtatatcgccaagttccagggggaggacaccgtggtcatagcctctaagccatacgcctttgacagagtttttcagtcctctactagccaggaacaagtatataatgactgcgctaagaaaatcgtgaaggatgtgttggaagggtataatgggacaatcttcgcatacggacagaccagtagcgggaaaactcacacgatggagggcaagctgcatgaccctgaagggatggggattattccacgcattgttcaggatatttttaactacatttacagcatggatgagaatcttgagttccatattaaggtctcctacttcgagatctaccttgataagatcagggacctcttagatgtgagcaaaaccaacctgtcagtgcatgaagataagaatcgtgtcccttacgtgaaaggctgtacagagaggttcgtctgtagtcctgacgaagtaatggatactatcgacgagggaaaatctaatcgtcacgtggcagtaaccaacatgaacgagcattcttcccgtagccacagtatattcctgataaatgtcaagcaagaaaacactcagacagagcaaaagctgagtggaaaactctacctggtggatctggccggttctgaaaaagtgtctaagaccggggctgagggcgcagtgctggatgaggcaaaaaacatcaataaatccctttcagctctgggcaacgtgatctcagctctggccgagggatccacatatgtcccttacagggacagcaagatgacacggattctacaggactcactgggcggtaactgccgtactacgattgttatatgttgtagccccagttcctacaacgaaagcgagacaaaatctacactcctcttcggtcagagggcgaaaacgataaagaataccgtgtgtgtgaacgtggagcttacagccgaacagtggaagaagaagtacgaaaaggaaaaggagaaaaataagattcttagaaatacaatacagtggctggaaaacgaactgaataggtggaggaatggtgagacggtcccaattgatgagcaattcgataaggagaaggccaacctcgaggccttcactgtagataaggacatcacactaactaacgacaagccagcgacggcaattggggttataggtaatttcactgacgccgagaggaggaaatgtgaggaggaaattgccaaattatacaagcagctggacgataaggatgaagagattaatcagcaatcacagctagttgaaaaactcaagacccagatgctcgaccaggaggagctgctggcttctactaggagggaccaagacaatatgcaagctgagttaaaccgcctgcaggcagaaaatgacgccagcaaagaagaggtgaaagaggtgttacaagccctcgaagagttggcagttaattacgaccagaagtcacaagaggtggaagataagacaaaggagtatgagctgctgtcagacgagctcaaccagaaatcagctactttggcgagtatcgatgcggagctgcagaaactcaaggaaatgactaaccaccagaagaaacgcgcagccgaaatgatggctagcttattgaaggacctcgccgaaattggtattgccgtggggaataacgatgtgaaacaacccgagggtacaggaatgatcgatgaagagtttactgtggcccgtctttatatttctaaaatgaagagcgaggtgaaaactatggtcaaacggtgtaagcaactcgaatcgacacagaccgagtcaaataagaagatggaggagaacgaaaaagagctggcggcttgccagttgcgtattagtcaacatgaggccaagatcaagagccttacagagtacctgcagaatgtggagcaaaaaaagcgccaactggaagagtctgtcgacgctctgtccgaggagttggttcagttaagagcccaagagaaagtccacgagatggaaaaagaacatcttaacaaagtgcagaccgcgaacgaagtgaaacaagcagtggaacagcagattcagagccaccgcgagactcatcagaagcagatttctagcctgcgcgacgaggtggaagcaaaagcgaagttgatcacagatctgcaggatcagaaccagaagatgatgctagaacaggaacggctaagggtcgagcacgagaaacttaaggccacagaccaggaaaagtcacgcaaacttcacgagctcactgtgatgcaagatagaagagaacaagccagacaggacctcaaaggcctcgaggaaacggtggccaaggagttgcagaccctgcacaatcttaggaaactcttcgttcaggacttggcaacacgggtgaaaaaatctgcagaaatcgacagtgacgataccggcggttccgccgctcaaaagcagaagatctccttcctagaaaataacctggagcagctaactaaggtgcacaaacagctagtcagagacaatgccgacctgagatgcgaattgccaaagctggaaaaacgcctaagagcaacagcagagagagtcaaggccttggaatctgcattaaaagaggctaaggagaacgcctcaagagatagaaaacgttaccaacaggaggttgataggatcaaagaggccgtgcgatccaagaacatggcgaggagaggccattccgctcaaatcgctaaacctatacgacccggacagcaccccgctgccagtcccacccacccttctgccattcgcggtggcggtgccttcgtacagaactcacagccagttgcggttcgaggcggtggcggtaagcaggtgtag

SEQ ID NO: 227880 - DNA, 2583 bp, synthetic construct
  misc_feature 1..2583: note = Description of Artificial Sequence: Synthetic coding sequence
  source 1..2583: mol_type = other DNA
ggcaaattgcatgatccacagctgatgggcattatccccagaattgcacatgacatcttcgaccacatctattcaatggatgaaaatttagaattccatatcaaggtctcatacttcgaaatttatctcgataaaattcgagatttgttggacgtgtccaaaacaaatctcgcagttcacgaagacaagaacagggtaccatatgttaaaggctgtactgagcgctttgtcagttcccccgaagaggtgatggacgttattgacgaaggtaaagccaaccgacacgttgccgtcacaaacatgaatgagcacagcagtaggtcacatagcatattcttgattaatattaaacaggagaatgtggagactgagaagaagctgtcagggaaactgtacctggtggaccttgccggttcagaaaaggtcagtaagacgggtgcggagggtgccgtgctggacgaagccaaaaacatcaataaaagtctgtcagccctgggcaacgtcataagcgcgcttgctgaaggtactaagacccatgttccatatcgcgactcgaaaatgaccagaatactccaggacagtttaggcggaaactgccggaccactatagttatctgctgctcaccaagcgtattcaacgaagctgaaactaaatcaaccctcatgtttgggcagagagctaaaaccatcaagaatactgtgtcagtgaatctggaactaacggctgaggaatggaaaaaaaagtatgagaaggaaaaggagaagaacaagacgctgaaaaatgtaattcagcacttggaaatggagcttaatcgctggaggaatggcgaggctgttcccgaggacgaacaaataagcgctaaggaccagaaaaacttagagccttgtgacaacactcccattatcgacaacatcgccccagtggttgccggaatctccacagaggagaaggagaaatacgacgaagagatctcaagcctgtacagacagctggacgataaagacgacgaaattaaccaacagagccagctggctgagaagctgaagcagcagatgctagatcaggatgagctgctagccagcacccggcgagactacgagaagatacaggaggaactaacccgcctccaaattgagaacgaggccgcaaaagatgaagttaaggaagttctacaggctctcgaagagctggccgtgaattatgaccagaagagccaggaagtcgaggataagacccgggctaatgaacagcttaccgacgagctcgctcaaaagaccaccaccctgacaaccacacagagggagctgtcccagctccaagagctcagtaatcaccaaaaaaagcgtgctacagaaattctgaatctgctacttaaggatctcggtgagatcgggggtatcattggaacaaatgatgtgaaaacactggcagacgttaacggcgtgattgaagaggaatttaccatggcacggctctatatctcaaagatgaaaagtgaagttaagagtctggtcaataggtctaagcagctagagagcgctcagatggattcaaaccgaaaaatgaatgcatccgagagagaactggctgcttgccagttactcatttcacagcatgaggccaaaataaagagcctgaccgactatatgcagaatatggagcagaagagacgccagctcgaagaatctcaagacagtctgagcgaagagctggctaagctgagggcacaggaaaaaatgcacgaagttagcttccaggacaaggagaaagaacacctgacgagactgcaggacgccgaggagatgaagaaggcgttggagcagcagatggaatcacatcgcgaagcacatcaaaagcagttgtcccgcttgcgcgacgaaatcgaggagaaacagaaaatcattgacgaaattcgtgacctgaatcagaagctgcagcttgaacaggagaaactgagtagtgactacaacaagttgaagatcgaggaccaggagcgcgaaatgaagctggaaaagctcttgctcctcaacgataaaagagaacaagctcgcgaggacctcaaggggctggaggagaccgtgagcagggaattgcagaccttgcacaacctgcgcaagctctttgtccaagatctaactacacgggtgaaaaaaagcgtggagctggataatgacgacggtggtggttctgcagctcagaagcagaagatatccttccttgagaataatctcgaacagttaaccaaagtgcacaagcagcttgtaagggataacgctgatttgcgttgtgaactgcccaagctagaaaagcgactgcgagccaccgccgagcgggtcaaagccctagagtctgcactgaaggaggcaaaggaaaatgcaatgcgggaccgaaagcgatatcagcaggaagttgataggataaaagaggcagtgagagctaaaaacatggctcggagggctcatagtgcccagattgccaagcccatccggcctggacattacccagcctcatcgcctaccgcagtacacgccattaggggaggaggcggttcaagctctaactcaactcattatcagaaatag

SEQ ID NO: 227881 - DNA, 2178 bp, synthetic construct
  misc_feature 1..2178: note = Description of Artificial Sequence: Synthetic coding sequence
  source 1..2178: mol_type = other DNA
atggccacctacatacatgtctcaaagaccggtgctgaaggagcggtgctggatgaggcaaagaacataaataagtccctgagcgctctaggcaacgtcatctccgcacttgccgaagggacaaaaacacatgtgccttatcgagactcaaaaatgacacgcattttacaggatagtctaggcggtaactgtagaacaactatcgtgatctgttgctcgccttcggtattcaacgaagcagagacgaaaagtaccttgatgtttggacagcgtgcgaaaactattaagaatactgtatcagtcaatttagaattaacggccgaggaatggaagaagaagtacgagaaagaaaaagaaaagaataagacgctcaagaacgtaatccagcacttggagatggaacttaatagatggagaaatggggaagcagtgcccgaggacgaacagatttcagcgaaggaccagaagaatctagagccttgcgataacaccccgatcatagacaatattgccccagtggtagccggaatctcaactgaggagaaagaaaaatacgacgaggagattagttctctgtaccgtcaactggatgataaggacgacgagattaatcagcaatctcaactcgccgagaagttgaagcaacagatgctcgatcaggatgagttgttggccagtactcgtcgtgactacgaaaagattcaggaggaactcacccggctgcaaattgaaaacgaggctgccaaggacgaggtgaaggaagtgctccaggctctggaagagctggccgttaattatgatcaaaagtcccaagaagtggaggacaaaacccgggcaaacgaacagctcacagacgaattggcacagaagacgaccaccctgaccactacacagcgagagctatctcagctgcaagagcttagcaaccaccagaaaaaacgggctactgagatcctgaacctcttgctgaaagacctgggagaaattggtggcataataggaacaaacgatgttaagactttagccgacgtaaacggcgtgatcgaagaggagttcaccatggccaggctttacatcagtaagatgaagagcgaggtgaaatctctcgtcaatagaagcaagcagctcgagtccgcgcagatggactcaaacagaaagatgaacgcaagtgaaagagagctcgccgcttgccagctgctaatctctcagcatgaagccaaaattaaaagcctgaccgactatatgcagaacatggagcagaagagaaggcagctggaggagtcccaggatagtctgagcgaagagctcgccaaacttagagcccaagaaaaaatgcacgaagtcagttttcaagataaggaaaaggaacaccttaccagactccaggatgcagaggaaatgaagaaggcactggagcagcagatggaaagccacagggaggcccaccaaaagcaattgtctcgcctgagagacgagatagaggagaagcagaaaattatagatgagatcagggatcttaaccaaaaattacagcttgagcaggagaaactgtctagtgactacaataaactgaaaatcgaagatcaggagagagaaatgaaattggaaaaactgcttttattaaacgataaacgggaacaggcacgggaggacctgaaaggactagaggagacagtctccagagaactgcagaccctccataatctcagaaagctttttgtacaggacctgacgacaagagtaaaaaaaagcgtggagttggataatgacgatggaggcggttccgccgcacaaaaacaaaaaatcagttttcttgaaaataatctggaacaactcacaaaagttcacaagcagctggtgcgcgataacgccgatttacggtgtgagcttccaaaacttgagaaaagactgcgggctaccgcagagcgcgtgaaggccctggagtccgccctaaaagaggctaaggagaacgctatgcgggatagaaaacggtatcagcaggaagtcgaccgtattaaagaagcagtcagagccaaaaatatggctagacgcgctcacagcgcccagatcgccaaacccatcaggcccggtcactaccctgccagttctccaacggccgttcatgccatacggggaggcggaggaagtagcagcaactcaacccactatcagaagtag

SEQ ID NO: 227882 - DNA, 2589 bp, synthetic construct
  misc_feature 1..2589: note = Description of Artificial Sequence: Synthetic coding sequence
  source 1..2589: mol_type = other DNA
atgtgggggaaactgcacgacccccaactgatgggaattatccccagaatagcacacgatatattcgaccatatctacagcatggacgagaaccttgagtttcacatcaaggtgagctactttgaaatctatctggataagatcagagatctcctcgacgtctctaaaaccaatctcgccgtgcacgaggataagaaccgagtgccctatgtgaaaggatgcactgagaggtttgtgtcttcgcctgaagaagtcatggatgtgatcgatgagggaaaagccaatcggcacgtcgccgttacaaacatgaatgaacattcttccaggtctcattcaattttccttatcaacataaagcaggagaacgtagagacagaaaagaagctaagcggaaaactctatctcgtggatctcgctggaagcgagaaagtttctaaaacaggcgctgagggtgccgtgttggacgaggcaaagaacatcaacaaatcactgtctgcactgggaaacgtgatcagcgccctggcagaaggaactaaaacacatgttccctatcgggacagcaaaatgacacggatcctccaagatagccttggtggtaactgtagaacaaccatcgtgatttgctgctcacctagtgtcttcaacgaagccgagaccaagagcacgcttatgttcggacaacgtgcaaaaaccattaaaaatacagtctcagtcaatttagagctgaccgcagaagaatggaagaagaagtacgaaaaagagaaagagaagaacaagacactgaagaatgttattcagcacctcgagatggagctcaatcggtggcgaaacggcgaggctgtgcccgaagacgagcagatttccgcgaaagatcagaaaaaccttgagccatgcgataacacccctatcattgataatatcgccccagtggtggctggaatcagtactgaggagaaagagaagtacgatgaggagataagtagcctgtatcgccagctagatgacaaggatgacgagataaatcaacaaagccagcttgccgagaagctgaagcagcagatgttggaccaagacgagctgctggctagtacgcgcagagactatgagaaaattcaggaggaactcacgaggcttcagattgaaaatgaggctgccaaagatgaggtcaaggaggtgctccaagcactagaggagctggcagtgaactatgaccagaagagccaggaagtcgaggataagactagggccaacgagcaattaaccgacgagttggcgcagaagacaactactctgactacgacccaaagagagttgagccaacttcaagagttaagcaaccaccagaagaaaagggctactgagatactaaacctgctcctgaaggatctgggggagatcggcggtattataggaaccaacgacgtaaaaactctggctgacgtgaatggtgtcatcgaagaggaatttacaatggctcgcctgtacatcagtaaaatgaaatctgaggtaaagtcgctagtaaacaggtcaaaacagttggaaagtgcccaaatggattctaaccggaagatgaatgcctccgaacgagagctggcagcttgtcagctgttaattagccaacacgaggctaaaatcaagtccctgacggattatatgcagaatatggaacagaagcggaggcaattggaggaaagtcaggatagcttgtctgaagaacttgctaagctgagggcccaggaaaagatgcatgaagtttcatttcaagataaggaaaaagagcatttgaccaggctgcaggatgcagaggaaatgaagaaggcccttgaacagcagatggagtctcacagggaggcgcaccagaagcagctctccagactaagagacgagattgaagaaaagcagaagataatagatgagattagggacctgaatcagaaactgcagcttgagcaagaaaaactgtcatcagattataacaagctgaagatcgaggaccaggaaagggagatgaagttagagaaactcctgctcctgaatgataagcgggagcaagctagggaagacctgaaaggacttgaggaaacagtcagccgagagctgcaaaccctccataacttacggaagttgtttgtacaggacctgaccactcgggtgaagaagtcagtggagctggacaacgacgatggagggggttcagcagcccagaagcagaaaatttcattcctagagaataacctcgaacaactgaccaaagtccacaaacaactcgtgagggacaacgctgatcttcgatgtgaactcccaaagctcgaaaaacgccttcgtgccacagcagagagggtcaaagctctcgaatcagcgctgaaagaagccaaggagaacgccatgcgcgatcggaaaagataccagcaagaggtggatcgtatcaaggaggccgtgcgcgcaaaaaacatggcacgccgtgctcactcagcacagatcgccaaaccaatcagaccagggcactatccagccagcagtcctactgcggttcatgccattcgaggaggcggaggaagtagctcaaacagcacgcactatcagaaatag

SEQ ID NO: 227883 - DNA, 2874 bp, synthetic construct
  misc_feature 1..2874: note = Description of Artificial Sequence: Synthetic coding sequence
  source 1..2874: mol_type = other DNA
atggccgatcccgctgagtgcagcattaaggttatgtgtcgatttaggcccctgaatgaggccgaaatactgcgtggcgataagtttatccctaaattcaagggcgacgaaacagtggtgataggccaaggcaagccttatgtgttcgaccgtgtcctgccgcctaacactacccaggaacaagtgtataatgcctgcgccaaacagattgtgaaggacgtgttggagggctataatggaactatctttgcctatggacagacctcgtctgggaaaactcacactatggagggaaagctacacgatccccagctcatggggattatcccaagaatcgctcatgacatatttgaccacatttacagtatggacgaaaacctcgagttccatatcaaagtctcctacttcgaaatatacctggacaagattcgagatctgctagacgtgtccaaaactaacctcgctgtacatgaagacaaaaaccgtgtgccctatgtgaagggatgtaccgagcgttttgtgagcagcccagaagaggttatggacgttatcgacgaggggaaagccaataggcacgtagccgttaccaacatgaacgagcacagcagtcgcagccatagcatcttcctcattaacatcaagcaggaaaacgtcgaaaccgaaaaaaagctaagcgggaaactgtatctagttgacctggccggatccgagaaggtgagcaagactggagccgaaggagcagtactggatgaggccaagaacatcaacaaatccctttcagccctcggtaacgtgattagcgcactcgctgaaggaacgaaaacccatgttccttacagggattctaaaatgactcgaatcctgcaagactctctgggcggaaattgtcgcacgacaattgtgatttgctgtagccccagtgttttcaatgaggccgagactaagagcacgctcatgttcgggcagagagccaaaactataaaaaatactgtgtctgtaaacctggaactcacggcagaggagtggaaaaaaaaatatgaaaaagaaaaagagaaaaataaaacactgaaaaacgtgatccagcacctcgaaatggaactgaataggtggagaaacggcgaagccgtccccgaggatgagcagatcagtgccaaagatcagaagaatttagaaccctgtgataacacacccataatcgataatatcgccccagtggttgccggaatctccacagaggaaaaagaaaagtatgacgaagagatttcctccctgtaccggcagctagacgacaaggacgacgagatcaatcagcaatctcagctggctgagaaactgaagcagcagatgctggatcaggacgagttgctcgcttctaccaggcgggattacgaaaaaatccaggaagagctcactcggctgcagatcgagaacgaagctgcaaaggacgaggttaaggaggtactgcaggccctggaggaacttgctgtcaattacgatcagaagtcccaggaagtggaagacaaaactcgagctaacgagcaactcaccgacgaactggcccagaagaccaccactctcaccacgacacagcgcgaattgtcacagctccaggagctcagcaatcaccaaaagaagcgtgcaactgagatcttgaaccttcttctgaaagatctgggggagataggaggaattataggaacgaatgatgtgaagacactcgcggacgtaaacggagtgatcgaggaagaattcacgatggcaagactgtatatctccaagatgaagagcgaagtgaagtcgctggtgaaccggtcgaagcaactggaaagcgcccagatggattcaaatcggaaaatgaatgcctcagagcgtgagttagccgcatgtcagttgctcatcagtcagcacgaagccaaaattaagagcctgacagactacatgcagaacatggaacagaagcggcgtcagctcgaagagtcccaagatagcctctctgaagagttggccaagctccgcgcacaggagaagatgcatgaagtgagttttcaggataaggaaaaggagcacttaacacgccttcaggacgccgaggagatgaagaaggcccttgagcagcagatggagtcacaccgtgaggctcaccagaagcagctatcgcgactacgggatgaaatagaggagaagcagaagatcatcgacgaaatacgggatctgaaccagaagctgcagctcgagcaggaaaagctgagcagcgactataataaactgaaaatcgaggaccaggagagagagatgaaactagagaaactgctcctgctgaacgacaagcgggagcaggctagagaggatctgaaggggcttgaggagactgtttctagggagctccagacccttcataacctcagaaagctcttcgtccaagacctgactactcgcgtgaagaagtcagtcgagctggacaatgacgacggtggaggctctgccgctcagaagcagaaaatttcttttcttgaaaacaacttggagcagttgaccaaggtacataaacagctggtgcgcgataatgcagatctcagatgtgagctgccaaaactcgaaaagcgtctgcgcgcaaccgccgagcgcgttaaagccctggaatctgctctgaaggaggccaaagaaaacgcaatgagagataggaagcgctaccagcaggaagtggatagaattaaggaagcggtccgtgcaaaaaatatggctaggcgggcacacagcgcccaaattgcaaagccaatcaggcctggacattaccccgcttccagccccaccgctgtacacgcgattcgaggaggcggagggagctctagcaactccacccactatcagaagtag

SEQ ID NO: 227884 - DNA, 219 bp, synthetic construct
  misc_feature 1..219: note = Description of Artificial Sequence: Synthetic coding sequence
  source 1..219: mol_type = other DNA
atggccgatcccgcagagtgtagcattaaagtgatgtgtcggttccgcccactgaatgaggctgaaatactccgtggtgataaattcattccaaaatttaagggcgatgaaactgtggtaataggacagggaaaaccatatgttttcgacagggtgctcccccctaatacaacccaagaacaggtctataatgcatgtgctaaacagattgtgaagtag

SEQ ID NO: 227885 - DNA, 552 bp, synthetic construct
  misc_feature 1..552: note = Description of Artificial Sequence: Synthetic coding sequence
  source 1..552: mol_type = other DNA
atggagcagaggctggccgagtttcgcgcagccaggaaacgcgctggactcgcggctcagcctcccgcagccagccagggggcacagactccaggggagaaagcagaagctgccgcaaccctaaaagccgcaccaggctggctcaagcgatttcttgtgtggaagcccaggccggctagtgcaagagcgcaacccggactagtgcaggaagctgcccaaccacagggctccacatctgagactccatggaacaccgccatacccctcccttcgtgctgggatcagtctttccttactaatatcaccttcttaaaggttctgctgtggctagtgttactgggcttattcgtggaactggaattcggcctggcctactttgtgctctctttattctactggatgtatgtaggaacccggggtcctgaggagaaaaaggagggagagaaaagtgcctactctgtctttaacccgggatgtgaggccatccaaggaacgctgacagccgagcagctggagcgcgagctgcagctccgtccccttgccggacggtag

SEQ ID NO: 227886 - DNA, 2445 bp, synthetic construct
  misc_feature 1..2445: note = Description of Artificial Sequence: Synthetic coding sequence
  source 1..2445: mol_type = other DNA
atggtcaagcagacaatccagatattcgctcgcgtgaagcccccagttcgaaaacatcaacagggaatttatagcatcgatgaagatgaaaaactcatccccagcctcgagatcattttaccaagggacctggcagacggctttgtaaataataagagagagagctacaagttcaagttccagcgaatctttgaccaagacgcaaaccaggagacagtcttcgagaacatcgcgaagcctgtggctgggtctgtgctggccggttataatgggacgattttcgcctatggacagactggcagcgggaaaacttttacaatcaccggtggggctgagcgatacagcgatcggggaatcattccccgtacgttgtcttacattttcgagcaactgcaaaaggactcctccaagatttataccacccacataagttacctggagatttacaatgagtgtgggtatgaccttcttgacccgagacatgaggcttcgtctctggaggatctgcccaaggtgaccatattggaagacccagatcagaacatccatctgaaaaatcttacgttgcaccaggccaccacagaggaggaagccttgaatctgctgtttctcggagacacaaatcgtatgatcgcagaaacacctatgaaccaggcctcaactcggtcccattgtatcttcactatccacctgtcatcaaaggaacccggatcggcaaccgttcgtcacgctaagctgcacctggtcgaccttgccggatctgaaagagtggccaagacaggagtgggaggccacctcctgacagaggctaaatatatcaatctcagcctacattacctggagcaggtgataatagcactgtcagagaaacatagaagccacatcccataccggaactcaatgatgacctctgttttaagggatagtctcggaggtaactgcatgacgactatgatcgcaacactcagcctagagaaacggaatctggatgaatccatatctacctgcagatttgcacagagggtggcgctcatcaagaacgaggccgtgctgaacgaagagattaacccccgactggtgatcaaacggctccagaaggagattcaggaattaaaggatgagttagccatggtcactggcgaacaacgcacagaggccttaactgaagcagagctgctgcagctggaaaagctgattacatcatttctggaggatcaagatagcgattctcgactggaagttggagctgacatgcggaaggtgcatcactgtttccatcatcttaagaagttgctcaacgataagaagattctggagaacaataccgtaagcagcgaaagtaaagatcaagattgccaagagccactcaaggaggaggagtatagaaagttaagagatatattgaagcagagggacaacgaaataaacatcctcgtcaatatgctaaagaaggagaaaaagaaggcacaggaggcactacatcttgctggcatggatagacgcgagttcaggcagtcacaaagtcccccttttaggctcgggaacccagaagagggtcagcgcatgagattgtcctctgctccatcccaggcccaggatttcagcattctgggcaagcgatctagcctgctccacaagaaaatcgggatgcgtgaagaaatgtctttaggatgccaggaggcctttgagattttcaaacgcgaccacgctgactccgtgacaatcgatgataataaacagatcctcaagcagcgcttctccgaagccaaagccctgggcgagtcaatcaatgaagcacgaagcaagatcggacacctgaaagaagaaatcacacagagacatatacagcaggtagcgctggggatctctgagaatatggccgtgcccttaatgcccgatcagcaggaggagaagcttagaagtcaactcgaggaggagaagcgtaggtataaaaccatgttcacacgtctaaaggccctgaaggtggagatcgaacatttgcagcttcttatggacaaagccaaggttaaactgcagaaggaattcgaagtttggtgggcagaggaggccacaaatttacaagttaactcccctgcagtgaactctttggaccataccaagccttttctgcagacgtccgactcacagcatgagtggtctcaactcctctccaacaaatcgtctggcggatgggaggtccaggaccaggggaccggcagattcgacgtttgcgatgttaacgcacgcaagattttaccaagtccctgtccatccccgcacagccagaaacagtcctccaccagtactcctctggaggactctatacccaagcgaccagtatccagcattcctttgactggtgacagccagactgactctgatatcatcgccttcatcaaggccagacagtccatactgcagaagcagtgcctgggaagtaactag

SEQ ID NO: 227887 - DNA, 498 bp, synthetic construct
  misc_feature 1..498: note = Description of Artificial Sequence: Synthetic coding sequence
  source 1..498: mol_type = other DNA
atgattgcagaaacccccatgaaccaggcaagcacgcggtcccactgcatattcacaattcatctatcctccaaggagcccggatcagcaaccgtgcgccacgctaagttgcatctagttgatctcgccggatccgagagagtagccaaaaccggagtgggcggacaccttctcaccgaagcaaaatacatcaacctgtcactacactatctggagcaagtgatcatcgcgctgagcgaaaaacaccggagtcacattccatacagaaacagcatgatgaccagcgtcctgagggacagcctgggagggaattgcatgactaccatgattgccaccctgagcctcgagaagaggaacctggacgagtcaatctctacatgtcggttcgcccagagggttgctttgataaaaaacgaagccgtattgaacgaggaaatcaatccacgccttaaagctccgagtagttctgatggtgtactcttttgtcggaaccagtag

SEQ ID NO: 227888 - DNA, 1962 bp, synthetic construct
  misc_feature 1..1962: note = Description of Artificial Sequence: Synthetic coding sequence
  source 1..1962: mol_type = other DNA
atggccagcagtttgtatgacttaaaaaaagttacgatcctggaggatcccgatcagaacatccatctgaagaatctgactctgcaccaagcgacaaccgaggaagaagccctcaatctgctgttcttaggtgacaccaatagaatgattgctgagacaccgatgaaccaggcgagcacgagatctcattgcatcttcaccatccaccttagttccaaagaaccaggatccgccaccgtgaggcatgctaagctgcatctcgttgatctggcgggaagcgagagggtggccaagacaggtgtcggcggtcatctgctaacagaggcgaaatacataaatctgagtctgcattatttagaacaggtgatcatcgcgctaagcgagaagcacagatcccatatcccgtatcgcaacagtatgatgacaagtgtcctgcgggattcactcggaggaaattgcatgaccactatgatagctaccctctccctggagaaacggaatttggatgaatcgatctctacatgtcgatttgcccaacgagtggccctcatcaagaacgaggctgtgcttaatgaggagatcaatcctcgactcgtaatcaaaagacttcagaaagaaatccaagagttgaaggacgaactggccatggtgacaggagaacagcggaccgaagcacttacagaggccgaattgctgcagctcgagaagctgattacttcttttctggaagatcaggactcggactccaggctcgaggtcggggctgatatgcgaaaagtgcatcactgttttcatcacctcaagaagttgctaaatgataagaagatactggagaacaataccgtttcgtctgagtctaaagatcaggattgtcaggagcctttgaaagaggaggaataccgaaagctgagggatatcttaaaacagagagacaatgaaattaatatcttggtgaacatgttgaagaaggagaagaagaaggcccaggaagccctgcacctggcgggtatggaccggcgtgagtttcggcagtcacagagccccccttttaggctgggcaacccagaggaggggcagcggatgagactatcttcggctccatcccaagcccaggacttttctattcttggtaagaggtccagcctgctacataagaagatcggaatgagggaagaaatgagtctcggatgccaggaagcctttgagattttcaagagagatcacgctgacagtgttacgatcgacgacaataaacagatcctcaaacaaagattcagcgaggccaaggcgctgggcgaaagcataaacgaagccaggagtaagataggccatctgaaagaagaaatcactcagcgccacatccagcaggtggcattgggaatatccgagaacatggctgtgccacttatgcctgatcagcaggaagaaaagcttagaagccagctcgaggaagagaaaagacgttataaaactatgttcaccagattgaaggctctgaaggtcgaaatcgagcacttacagctcttgatggataaagccaaagttaagttgcagaaagagttcgaggtgtggtgggccgaggaggctactaacctgcaggttaacagtcctgcagtgaactcgcttgaccacactaagcctttccttcagacaagtgacagccagcatgaatggtcgcaattgctgagcaataaaagtagtggaggctgggaagtgcaagatcaggggactggaaggttcgacgtctgtgatgtgaatgcacggaagatccttccgtcaccctgcccgtcaccacactcgcagaaacaaagtagtaccagtacacccctggaggatagtataccgaagaggccggtctctagcattccacttaccggcgactctcagacagacagcgatatcatcgcttttatcaaggcacggcaaagcattttacagaaacagtgtctgggttctaactag

SEQ ID NO: 227889 - DNA, 2394 bp, synthetic construct
  misc_feature 1..2394: note = Description of Artificial Sequence: Synthetic coding sequence
  source 1..2394: mol_type = other DNA
atggtgaaacagactatacagatctttgcgagagtcaaaccacccgtacgaaagcaccagcaggggatttattccatcgatgaagacgagaaactcataccttctctggagattatcttgccgagggacctggccgatggatttgtaaacaataaaagggagtcgtacaaattcaagtttcagaggatattcgatcaggatgcgaatcaggagaccgtcttcgaaaacatagcaaagccagttgccggttccgttctggccggttacaacgggaccattttcgcctatgggcagaccggaagtggaaaaacttttactattaccggaggggctgagcgatactcagataggggtatcattcctagaactttaagctatatttttgaacaactccaaaaggatagttctaaaatctatacaacccacataagctacttggagatttataacgaatgcggctacgatctgttggaccctaggcatgaagcctcaagcctcgaggacctgcccaaggtgacgattttggaagaccccgatcagaatatccacttaaagaacttgaccctccaccaggcgactaccgaagaggaagctctcaacctgctcttcttaggagatacgaatcggatgatcgcagagactccgatgaaccaggcgtcaactaggtcacactgcatttttaccatccacctgtctagcaaagaaccgggatcagcaacagtgaggcacgctaaactacacctcgtggatctggctggcagcgagcgtgtggccaagacaggggtgggcggacacctcctgaccgaagctaagtacatcaacctgagcctgcactacctggaacaagtgatcattgccttgagcgaaaaacatcgctcccacattccgtatcgaaattcaatgatgacttctgtcctaagagatagcctcggaggaaattgtatgactacgatgattgccacactctccttagagaaacgtaatttagatgaaagcatatcgacgtgcaggttcgcccagcgggtggcgctgataaagaacgaagcggtcttaaatgaggagatcaaccctcgactggtgatcaaacgcctgcagaaggagatacaagaactcaaggatgagcttgccatggtcaccggcgaacaacgcacagaggcacttaccgaggcagagctcttgcagctcgagaaactaatcacctcttttctggaagaccaggacagcgattcacgattggaggtgggggcagacatgcgaaaagtgcatcactgtttccatcacctgaagaaattgctcaacgataagaagatcctcgagaacaacacagtgtccagcgagtccaaggaccaggactgtcaggagccgcttaaggaggaagagtaccggaagctgagggacatcctgaaacagagggataatgaaattaacattctggtgaacatgctaaaaaaagagaaaaaaaaagctcaggaggccctgcatctggccggaatggacaggagagagtttcgccagtcccagtccccgccttttcgacttggcaaccccgaggaaggccagcggatgcggctgagcagcgcgccatctcaggcgcaggacttctcgattctcggcaagaggagttctctgctgcacaagaagattggtatgcgagaggaaatgagcctgggttgtcaggaagcttttgaaattttcaaaagagaccatgcggattctgtcacaattgacgataataagcagattctgaaacagcgcttttccgaggccaaggcactcggagaatcaattaacgaagcgaggtctaagatcggcatatctgaaaatatggccgtccccctgatgcctgatcagcaggaggagaaacttcgatcccagctggaagaggagaaacggcgttataaaaccatgtttacacgtctgaaggctctcaaagtcgagatcgagcacctccagctgcttatggataaggcaaaggtgaaactccagaaggagtttgaagtctggtgggcggaggaggctacgaacctccaggtgaactccccagccgtgaatagcttagaccacactaagccatttctgcagacaagcgacagccaacacgaatggtctcagctgctgagcaataaatcaagcggcggttgggaagtgcaggatcagggcaccggacgcttcgatgtgtgtgacgttaacgcgagaaaaatacttccctcaccttgtccatcccctcacagccaaaagcagtcaagcacctcgacacccttagaagactccatccctaaaaggccggtctcttccattcccttgaccggggacagtcagaccgactcggacatcatagcattcatcaaggccaggcagtcaatactgcaaaaacagtgcttgggctcaaactag

SEQ ID NO: 227890 - DNA, 2394 bp, synthetic construct
  misc_feature 1..2394: note = Description of Artificial Sequence: Synthetic coding sequence
  source 1..2394: mol_type = other DNA
atggttaagcaaaccattcagatctttgcgagggttaagcctcccgtccgaaaacaccagcaggggatttactctatagatgaggatgaaaagttgatcccttccctcgagatcattctccctagggatctggccgacggcttcgtcaataacaagagggaatcctacaaatttaagtttcaacgtatattcgatcaagatgctaatcaggagaccgttttcgaaaatatagcaaaacccgtggctggatccgtgctagccggttataacggcaccattttcgcctatggccagactgggagcggcaaaacctttacaatcaccggaggtgcggagcggtactcagatcggggtattattccacgcaccttgtcttatatcttcgagcagctgcagaaggactccagcaaaatatacaccactcacatttcttatcttgagatctataatgaatgtggctacgatctactggatccgaggcacgaggcttcttccttagaagatcttcccaaagtcaccatcctggaggaccccgatcaaaacatccacctgaagaacctgacgctgcatcaggccaccactgaagaagaagctttaaacctgctgtttctcggtgatacgaaccggatgattgctgaaacccctatgaaccaggcatccacaaggtctcactgcattttcactatacacctgagtagcaaggagcccggttccgctacggtcaggcacgctaaactacatcttgtcgatctggctgggagtgaaagggtggccaagacaggcgtaggaggccaccttctgacggaagctaaatacataaatctgagtctccactatctggaacaggttattattgccctgtccgagaaacaccggagtcacatcccgtaccgcaactcgatgatgaccagtgtgctgagagacagtcttggcggaaattgtatgaccacaatgatcgcaaccttatcgcttgagaagcgcaacttagacgaatcaatcagtacctgccgattcgcccagcgggtggccctcattaaaaacgaagctgtgcttaacgaggagatcaaccctcgcttagtgattaagaggctgcagaaagagatccaggagctcaaggacgagctggccatggtgactggggagcaaagaacagaggctcttacagaggccgaactgctgcagctggaaaaactgattacttcttttctcgaggatcaggacagcgactcccggctggaagtcggggcagatatgcgcaaagtccaccattgctttcaccacttaaagaagctcctgaacgataagaagatattggagaacaacaccgtgtcttccgaatccaaagaccaggactgtcaggagcctttgaaggaagaagagtacaggaagcttagagacatccttaagcagagggataacgaaatcaacattctagtgaatatgctgaaaaaagagaaaaaaaaagctcaggaggccctccacttggccggaatggaccgtcgggagttcagacaatctcagtctccccctttccgcctgggaaacccagaagaaggccaacgcatgcgtttgagcagcgcgccaagccaggcacaggacttttctattttaggcaaacggtctagcctgttgcacaagaagatcggtatgcgagaagagatgtcactcggctgccaggaggcctttgaaatctttaagcgtgatcatgctgactcggtgacgatagacgacaataaacagattctgaaacagcgcttttctgaggccaaggcactgggagaaagcataaatgaggcccgaagcaagatcggacacctgaaggaggagattactcaacggcatatccaacaggtcgcgcttgggatatctgagaacatggcagtgccgctgatgcccgaccagcaggaggagaagctgcggtcacagctcgaagaggagaagaggcggtacaagaccatgttcacgcgtcttaaagccctcaaggtagagatcgaacacctccagctgctgatggacaaagccaaggtaaaactgcagaaggagttcgaggtatggtgggccgaggaggccaccaatttgcaggttaacagccccgctgtcaactcccttgatcatacaaaacctttcttgcagacgtcagactcccagcacgagtggagccaattgctcagtaacaagagcgatgtgaatgccaggaaaattctgccgagcccgtgccccagcccacactcgcaaaagcagtctagcacgtctaccccgttagaggatagtatacctaaaagacctgtctcctccattccactgactggtgatagccagactgacagtgacattatcgcatttatcaaagcgaggcaatcgattttacagaagcaatgtctcgggtctaattag

SEQ ID NO: 227891 - DNA, 747 bp, synthetic construct
  misc_feature 1..747: note = Description of Artificial Sequence: Synthetic coding sequence
  source 1..747: mol_type = other DNA
atgcgcgaggagatgagcctagggtgtcaggaggcctttgaaatctttaagcgggatcacgccgactccgtcactattgacgacaataagcagatcctaaaacaaagattcagtgaggcgaaagccttaggggagtccatcaacgaggcgaggtcgaagatcgggcatctgaaggaggaaatcacccaaagacacatacagcaggtcgccctcggaatatccgaaaatatggccgtccccctaatgcctgatcagcaggaggagaagctgcgcagccaactggaggaggagaaaagaaggtataagactatgttcaccaggttgaaggcactcaaagtggagatcgagcacctgcagctcctgatggacaaagcgaaggtgaagctccaaaaggaattcgaggtgtggtgggctgaagaagcaacaaatctgcaagtcaactcccctgcggtaaatagtcttgatcatactaagccattcctccagaccagtgattctcagcacgaatggagccaactactgtctaacaagagcgacgtgaacgcgcgaaagattctgccaagcccatgtccatccccacactcgcagaaacaatcgtctacctcgacccccctggaagactctattcctaagcggccagtgtcgtctattccgcttaccggggatagtcagacagattccgacatcatagcctttatcaaagctagacagagcattctgcaaaagcagtgcctgggttctaactag

SEQ ID NO: 227892 - DNA, 486 bp, synthetic construct
  misc_feature 1..486: note = Description of Artificial Sequence: Synthetic coding sequence
  source 1..486: mol_type = other DNA
acccctatgaaccaggcctccacccgcagccactgtatattcactatacacttgtcatcaaaggagcctggctccgcaaccgtgcgacatgcgaagctacatctggtcgacctagcgggaagcgagcgagttgctaaaaccggcgtgggcggtcacctcctgaccgaagcgaagtacatcaatctctccttacactatctagagcaggtgatcatcgccctctccgagaagcacagatcccatataccttatcgcaacagcatgatgacgtccgtgcttagggatagtcttgggggaaattgtatgacgaccatgattgcgactcttagcctggagaagaggaatctggacgaaagcatcagcacttgtaggttcgcacagcgcgtcgccctcatcaagaacgaggcagttctcaacgaggagatcaatccccgactcaaagccccttcttcttctgacggggtgttgttttgccgcaatcagtag

SEQ ID NO: 227893 - DNA, 2070 bp, synthetic construct
  misc_feature 1..2070: note = Description of Artificial Sequence: Synthetic coding sequence
  source 1..2070: mol_type = other DNA
tgaggagcagaacgctactccgatagaggaatcatccctcggaccttgtcctatatctttgagcagctccagaaggatagttccaagatctataccactcacatatcctatctcgaaatttacaacgagtgtggttatgatttactggacccccgacacgaggcgtcctcactggaagaccttccaaaagtgacaatcctcgaagaccccgatcagaatatccatttaaagaaccttacccttcaccaagcaacaacggaagaggaggcactcaatctgctttttctgggagatactaataggatgatcgccgaaacccccatgaatcaggcctcaaccaggagccactgtatctttaccattcacttgagttcaaaggagcccggtagcgcaactgtgcggcacgccaaactgcatctagttgacttggcaggttctgagcgtgtcgcgaaaaccggtgtgggcggacacctcttgacagaggcaaagtacatcaatctgtcactccactacctggagcaggtgattatcgccctttcagagaagcaccgaagccatattccctaccgcaattccatgatgacatccgtgcttcgagacagtctcggcggaaattgcatgaccacaatgatcgctacactgagcctcgaaaagagaaacctcgatgaatccatatccacttgtagatttgcccagcgggtggctctgatcaagaacgaggccgtgctcaatgaggaaattaatccacgtctcgttatcaaaaggctgcagaaagagatccaggagctcaaggatgagttggccatggtgacgggtgagcagcgtacagaggctcttacagaggccgagctcttgcagctggaaaagctgatcacttctttccttgaagaccaggacagtgacagccgccttgaggtgggagccgatatgcggaaagtccatcattgtttccatcacctgaagaagcttctgaatgacaagaaaattttggagaataacacggtgtcttccgagtctaaagaccaggattgtcaagaaccactcaaggaggaggagtacaggaaactgcgagacatcctgaaacagagagataatgaaattaacattctcgtgaacatgctgaaaaaagaaaaaaaaaaggctcaggaagcactacacctggctggtatggaccgacgcgagttcagacaatcccagtctcccccattccgactgggcaatccggaggaggggcaacggatgcgattaagcagcgcccctagtcaggcccaggacttttctatcttgggaaagagatcttcattactgcacaagaaaatcgggatgcgggaggagatgtcgctggggtgtcaggaggcctttgaaatcttcaagagggaccatgctgactctgtgacaatcgacgataataagcagattctgaaacagcgtttctccgaggcgaaggctctcggggagagtatcaacgaggccaggagtaagatcgggcatctgaaagaggagattacccagcgtcatattcagcaagtggctttaggcataagcgaaaacatggctgtgcccctaatgccagaccagcaggaggagaaactccggtcacagctggaggaagagaaacgcagatacaagaccatgttcacgaggctgaaagccttgaaagtggagatcgaacaccttcagctgttgatggacaaggctaaggtcaaattgcagaaagagtttgaagtgtggtgggccgaagaggccactaatctgcaggtcaacagtcctgcggtgaattctctcgatcacaccaagccattcctccagacctccgattcacagcatgagtggtcccagctcctctcgaataaatcggacgttaatgcacgaaagatccttccatcgccatgcccttcgccccattcacagaagcagtcctctaccagtactcccctggaagactcaatcccaaaacggccagtttcatccatccctctgacgggcgattcacaaaccgattcagatatcatcgcgttcatcaaagcgaggcagagcatcttgcagaaacagtgtctcggcagcaattag

SEQ ID NO: 227894 - DNA, 2277 bp, synthetic construct
  misc_feature 1..2277: note = Description of Artificial Sequence: Synthetic coding sequence
  source 1..2277: mol_type = other DNA
atggtgaaacagaccattcagatctttgccagggtcaagccacccgtgaggaaacatcagcagggaatatatagtatagacgaagacgaaaaattgattccatctttagaaatcatccttcccagggacttggctgacgggtttgttaacaataaaagggaatcatacaaattcaagtttcagcgcattttcgaccaagacgcgaaccaagaaaccgtgtttgagaacattgcaaagcctgtggcgggttctgtgcttgctggatataatggaaccattttcgcatatggtcagactgggagtggtaaaacttttactataactggcggtgctgagagatacagtgatagaggcatcattccgcgtaccctgtcatatattttcgaacagctgcagaaggattcatcgaagatctacaccacccacatttcttatctcgagatctacaacgaatgtggatatgatctgctggatccccgtcatgaggccagctcattggaagacctgcctaaagtgacgatattggaggaccctgatcagaacattcacctgaagaatctgacattgcatcaagccacaactgaggaggaggcgctcaacctgctcttcctgggtgatactaaccggatgatcgcagagactcccatgaatcaggcatccacacgaagccactgcatcttcaccatccatttaagcagtaaggagccgggttccgccacggtgaggcacgctaagttacacctggtagatctagctgggtccgagagggtggccaagactggggtaggcggacatctccttactgaggccaagtatatcaacttgtcactgcactacctcgagcaagtgattatcgctttaagtgagaagcacaggagtcacattccatacagaaactccatgatgacctcagtgttgcgagactcactcggagggaattgcatgaccaccatgatcgctaccctgtccctggaaaagaggaatctggacgagagcatcagcacttgtcgattcgcccaaagagtagcgctgattaagaacgaggccgtgcttaatgaagaaattaatccgaggcttgtcataaaaaggctgcaaaaagaaatccaggagctgaaagacgagctcgcaatggtgactggcgagcaacggacggaagccctgaccgaagctgagctgctgcagcttgagaagctgattacctcctttctggaggatcaggatagcgatagtcggctggaggttggggctgatatgcgtaaagtccaccattgttttcaccacttgaaaaagcttttaaacgataagaagatcctggaaaacaacaccgtaagttccgagtccaaggaccaggactgccaagagcctctgaaggaggaagagtaccgaaagctccgcgatatcctgaaacagcgtgacaatgaaatctcgatcctgagcgaagtcatgaagaagctgccactgagttggttcgaaagaggtatgagagaggagatgtctctggggtgccaagaagccttcgagatttttaagcgggaccatgctgatagcgtgacaatagatgacaataaacagatccttaagcagcgcttctcggaagcaaaagccttaggggagtctattaatgaggccagaagcaagatcggacacctgaaggaggagatcacccaacgacatatacagcaagtcgctctgggcatatccgagaacatggccgtgcccttgatgcccgaccaacaggaggagaaacttcgctcccagttggaagaggaaaagagaaggtacaaaacgatgtttacacggcttaaagcactcaaggttgaaatcgagcaccttcagttgttaatggacaaagccaaggtgaaacttcaaaaggagtttgaggtgtggtgggccgaggaggctacaaatctgcaggtaaatagccccgctgtgaactcactcgatcacaccaagccctttctccaaacatccgattcccaacatgagtggagccagcttctgtcaaacaagagttcaggcggatgggaggtccaggaccaaggcaccgggagattcgacgtgtgtgacgtgaacgcgagaaaaatcctccctagcccgtgcccctcaccacatagccaaaagcagtccagcacttctacccccctggaggactccatcccgaaacgcccagtcagttccattccactgacaggagactcacagacagacagcgatatcattgcttttataaaggccagacagtcgatcctgcagaaacagtgcctgggttctaactag

SEQ ID NO: 227895 - DNA, 516 bp, synthetic construct
  misc_feature 1..516: note = Description of Artificial Sequence: Synthetic coding sequence
  source 1..516: mol_type = other DNA
atgcgcgaagaaatgagtctcggctgccaggaggccttcgagatcttcaagagggaccacgccgactctgtcacaatcgacgataataagcagattttgaaacagcgattcagcgaagcaaaggcactgggcgagtccatcaacgaagcgaggtccaagatcggccacttgaaagaggagataactcagagacacattcagcaggtggcactcggcatttctgagaacatggccgtcccactcatgcccgatcagcaagaggaaaaactgagatcccagctggaagaggaaaaaaggaggtataagactatgtttacacgcttgaaggcattgaaggtggagatcgagcatctccagcttttgatggacaaggcaaaggtcaagctccaaaaagagtttgaggtgtggtgggctgaggaagccaccaacctacaggtgaactcaccagccgtgaatagtctcgaccacactaaatcgaagatcaaggctctggccgattccatgagcggcctgtag

SEQ ID NO: 227896 - DNA, 882 bp, synthetic construct
  misc_feature 1..882: note = Description of Artificial Sequence: Synthetic coding sequence
  source 1..882: mol_type = other DNA
atgcgagaggaaatgagcttgggctgccaagaagcctttgagatattcaagagggatcacgcagattctgtgaccatcgacgataacaagcaaatcctaaagcagcgttttagcgaggcaaaagcactgggggaatctataaatgaagcaaggtccaaaatcggtcatctgaaggaagagattacacaacggcatattcagcaggttgcactgggcatatccgaaaatatggcggtgcccttgatgcccgatcagcaggaggagaagcttaggagtcagttagaggaggagaaacggcgttacaaaaccatgttcactcggctcaaagctctcaaggtggagatcgaacaccttcagctgctcatggacaaggccaaagtgaagctgcagaaggagttcgaagtatggtgggcagaggaggctacaaatctccaagtcaattctcccgcagtgaatagcctggaccacaccaagccattcctgcagacttccgatagccagcacgaatggtcccagctgctaagtaataaatccagtggcggatgggaagtacaggatcaggggacggggcgtttcgatgtatgtgacgttaatgccaggaagatccttccaagcccttgtccatctccacatagtcagaaacagtcctccacctctacccctttagaggattcgatccctaaaaggcctgtatcctctatcccacttaccggggattcccagactgactcggacatcatcgcattcattaaagccaggcaatcaatcctccagaaacagtacttgcaacttttatgcagtctgttcccaaagtccgcggtgtccagcgcacaggcctcaaccaatagaaagggcttgtcagacgtattagtgacacgttag

SEQ ID NO: 227897 - DNA, 4032 bp, synthetic construct
  misc_feature 1..4032: note = Description of Artificial Sequence: Synthetic coding sequence
  source 1..4032: mol_type = other DNA
atgggcttagaggcccagagactaccgggtgctgaggaggcccctgtgcgggtcgctctgcgtgtaagacctctcctgccaaaggagctcctccacggccatcaaagttgcctgcaggtcgagccaggacttggacgggtgacactgggcagagatagacattttggtttccacgtggtgctagctgaggacgcagggcaggaggcggtgtaccaggcctgtgttcagcctctgcttgaggccttcttcgagggtttcaacgccaccgtgtttgcttatggccagacagggagcggtaagacttatacgatgggggaggccagtgtggcgtccctgttggaagacgaacaaggcattgtgcctcgggctatggcagaagccttcaagctgattgatgagaacgacttattggattgtctcgtgcatgtgtcgtatcttgaggtgtacaaagaagagtttagggatcttttggaggtgggtacagcctcccgcgatatccagctccgcgaggatgagagggggaatgtggtactgtgcggcgtgaaggaagtcgatgtggagggactcgatgaagtgttgtccctgctggagatgggaaatgctgctagacacaccggcgcaactcatttaaaccacctgtcatcccgcagtcacacggtcttcactgtcacattagaacagcgcggacgcgctccctctagactgcccaggcccgctccgggacaactccttgtgtccaaattccactttgtggacctagctggcagcgagcgcgttctcaaaactggttccactggagagaggctgaaagagagcattcaaatcaatagctccctcctggcccttggtaatgtgatttcggccctgggggacccccagagacggggtagccacataccttatcgagattctaaaatcacacggattctgaaagacagtctaggaggaaacgcgaagaccgtgatgattgcttgtgtgtctcccagctcaagtgattttgacgagactctgaatacgcttaactatgccagccgggcacagaatatccggaaccgagctactgttaactggcgtccggaggcggaacgcccaccagaggaaacagccagtggggctagaggacctccccgacaccggtccgagaccagaattatacaccgcggaagacgggcacctggcccagccacagccagcgccgctgcagctatgcgactcggggcagagtgcgcacggtatcgagcctgcacggatgctgcctattctcttctccgggaactgcaggccgagcccggactccctggcgctgccgctcgtaaggtgcgggactggctgtgcgccgtggagggcgagaggagcgcactgagtagtgcatcagggccagacagcggcatagagagcgcgagtgtcgaggaccaagctgcacaaggcgctggcggtagaaaagaggacgagggtgctcaacagctgctgaccctacagaatcaggtggcacggctggaggaagaaaatagggattttctggccgcactcgaggacgcgatggagcagtataagctccagtcagacagactcagagaacagcaggaggagatggtggagttgcgacttagactcgaactcgtgcggccagggtggggcggacccagactgctgaacgggctgccgcctggctcctttgtgccccgaccccacacagctccactcggcggagcccacgcccacgtgcttggcatggtgcctccagcttgcttgccaggtgatgaagttggctccgaacagagaggcgagcaggtgactaacggccgtgaagcaggggcagagctgttgacagaggtcaaccggctaggttctgggagcagtgccgcttctgaggaagaggaagaagaagaggagccccctcgaaggacgcttcatctgaggcgtaatcgaatcagcaactgctctcagagagcaggagccagacccggtagcctgccagagaggaagggtcctgaactgtgtttagaggaattggatgctgccattcctggcagcagagcagtcggtggatccaaggccagggtgcaggccagacaggtaccacccgcaacggcaagcgaatggcgcctcgcacaggctcagcaaaagatcagggagctcgctatcaacatccgaatgaaagaggagctgattggggaactggttcgtacggggaaggccgctcaggctctgaatagacagcactcccagcggatcagagaactcgagcaggaagcagagcaggtgagggccgaactctctgaagggcagcgccagctgcgcgagcttgagggaaaagagctacaagacgccggtgagagaagccggctgcaggaattccgccgacgggtagccgctgcccagtcccaggtacaggtgttaaaagagaaaaagcaggcaactgagagactggtatccctctctgctcagtcggaaaaacggctgcaggagctggagcgcaacgttcagctgatgcgtcaacagcagggacagctgcagcgacgactgcgcgaggaaactgagcaaaaaagacgtttggaagccgaaatgagcaagcggcagcacagagtcaaagagctagaactgaagcatgagcagcagcaaaaaatccttaagattaaaacagaggaaattgcagccttccagcgtaagcgcaggagtgggtccaacggaagtgtcgtgtctctagagcagcaacaaaagatcgaggagcagaagaaatggttagaccaggaaatggaaaaagtactgcagcaaagacgcgcacttgaggaactgggagaggaactgcacaaacgtgaggccatcctcgctaagaaggaagccctgatgcaggaaaagaccggcctggagtccaaacgccttcggtcctcacaagcactgaacgaggacattgtgcgcgtgtcatcccggctagaacacctggaaaaggaactgtcagagaaaagtggccagctccgccaggggtccgcccagagccagcaacagattcggggagagatagacagtcttcggcaggagaaggattctctcctgaaacaaagactggagattgatgggaagctacggcaggggagtcttctcagtccagaagaggaacgcacactgttccagttagacgaggcgattgaggccctcgacgcagcgatcgaatataagaacgaggccatcacttgccggcagcgggtgcttcgcgctagcgctagccttctgtctcagtgtgagatgaatctgatggccaagctgtcctacctgtcatcctctgaaactagagccctcttgtgtaagtacttcgataaggtagtcaccctcagagaggagcagcaccaacagcagattgcttttagtgagttggaaatgcagttggaggagcaacaacgcctagtgtactggttagaagtcgcactggagcggcagcgtctggagatggacagacagctgaccctgcagcagaaagaacacgagcagaatatgcagctgctgcttcagcaaagccgagaccacttaggagaaggcctggctgacagcagaagacagtacgaagccaggatccaggccttggaaaaagaacttggaaggtatatgtggattaaccaagagttaaagcaaaagctgggaggggtaaatgctgtgggacactcaaggggaggtgagaagcgcagtttatgcagtgaaggacgccaggcgccaggtaatgaggacgagctacacctcgctccagagctgctttggctctctcctctgacagagggcgcacccaggacaagggaggagactcgagacctggtgcatgccccattgccactgacttggaagcgtagtagcctgtgtggggaagagcaggggtcccccgaggaactccgccaaagggaggcagccgagcccctggttggtcgggtgttgcctgtgggagaggctggcctcccctggaacttcgggcctctctctaaacccagaagagagctgaggcgggcttcacctggaatgatcgacgtgcggaaaaacccactgtag

SEQ ID NO: 227898 - DNA, 2022 bp, synthetic construct
  misc_feature 1..2022: note = Description of Artificial Sequence: Synthetic coding sequence
  source 1..2022: mol_type = other DNA
atggatccccaacgctccccgttgttggaagtcaagggcaacattgaattaaagagaccactgattaaagcaccgagtcagcttccgctatccggttcgagactgaagaggcgtccagaccagatggaggatgggttggagcctgaaaaaaagaggacaagaggcctgggcgctaccacaaagattaccacaagccatccaagagtgcccagcctcactaccgtcccccagacacagggccagacaacggcacagaaagtgtccaagaagacagggcctcggtgttctacagcaatcgccaccggtctcaagaatcagaaaccagtcccggctgtgcccgtccaaaaatccggaacaagtggcgtgcccccaatggccggaggtaagaaaccctcaaaaaggccagcttgggacctgaagggacaattatgcgatctcaatgccgagctgaaaaggtgtagggaacgaacccaaactctggaccaggaaaaccagcagctgcaggatcaattacgcgacgctcagcagcaagttaaggccctggggacagagcgaaccaccctagagggccatctggccaaggtgcaggcgcaagccgaacagggacagcaggaactcaaaaatttacgggcatgtgtcctggagctggaagagaggctctctactcaagaagggctcgttcaggagttgcagaaaaagcaagtggaacttcaagaagaaagaagaggattgatgagccagttggaagaaaaggaacgcaggctgcagacctcagaggccgctctgagctcttctcaggcggaggtggccagcctccgccaagaaacggtggcccaagctgcactgcttaccgagcgtgaggaacggttacatggcctcgagatggaacggagaagactgcacaatcaacttcaggagctcaaagggaacattagggtgttctgccgggtccgcccagtacttccaggcgagccaaccccccctcccggtctcctgctcttccctagcggtcctgggggtccaagcgacccacctaccaggcttagtctctcaagatcagacgagcgacgaggaactttgagcggggcacctgcccctccaacaagacatgatttctcttttgaccgcgtcttccctccaggctccggacaggacgaagtgtttgaggaaatcgctatgctggtgcagtcagcactggatggatatcccgtttgcatctttgcttatgggcaaaccgggtccggtaagacctttacaatggagggcggacctggaggagatcctcagctcgaaggcctgataccacgcgcactgcggcacttgttttctgtggcgcaggagctttccgggcaaggatggacctacagctttgtggcaagttacgtggagatctacaacgagaccgtgagggacttgttagcgacaggaacgagaaagggtcaggggggagagtgtgagataaggagggccggtcccggtagtgaagagcttaccgtcactaacgccagatacgtgcctgtgtcatgtgaaaaggaagtggacgccctcctgcacctcgcaaggcagaatcgagcggtcgcccgaacagcccagaatgaaaggagttccaggtcacactccgtgttccagcttcagatctctggggaacacagctcccgaggcttgcagtgcggggctcccctgtcactcgtggacttggcgggttctgagcgactggacccagggttggccctcggaccgggtgagagggaacgtctgcgagagacacaggctattaactcgtccctcagtactctcggcctggtcatcatggccctgtcaaacaaagaaagccacgtcccatacagaaactccaaattgacctatcttttacagaatagcctcggcggatccgctaagatgttgatgtttgtaaatatctcccctcttgaagaaaatgtcagcgaatccctgaatagcctgcgctttgccagtaaggtaaaccaatgcgtcattggcactgctcaggctaatcggaaatag

SEQ ID NO: 227899 - DNA, 612 bp, synthetic construct
  misc_feature 1..612: note = Description of Artificial Sequence: Synthetic coding sequence
  source 1..612: mol_type = other DNA
atggaccctcaacggtctccgctgttagaggtcaaggggaatatcgaactcaagcgccctctaatcaaggcgcctagccaactccccttgagcggttctcggctcaagcggagaccagaccagatggaagacggcctcgaaccagagaaaaagagaaccaggggactcggcgcaactaccaagattaccaccagccaccctcgtgtcccaagcctgacaaccgtccctcagacacaggggcaaaccacagggccttcctcacacccactgccttggcaatgccaccatcaaccattcctagtgacagaccctggagggagatcgtggggtccaggccagaagtggcataggttacacctctggtgtacaagtgcgcaaaaagtcagcaaaaaaactggtccccgatgttctacggccattgctacaggcctgaagaaccaaaagccagtccccgctgtgcctgtccagaaatcgggaaccagcggagttccacccatggccggtggaaagaagcctagcaagcggcctgcgtgggacctcaaaggacagctttgcgacctcaatgcagagctcaagcggtgccgggaacgcacacaaacactggaccagtag

SEQ ID NO: 227900 - DNA, 612 bp, synthetic construct
  misc_feature 1..612: note = Description of Artificial Sequence: Synthetic coding sequence
  source 1..612: mol_type = other DNA
atggacccccagcgctctcctcttctggaggtaaaaggaaatatagaactgaaacgaccacttataaaggcacctagccaactgcccctgagcggaagccgcctcaaacggcgtccagaccagatggaggatggtctggaaccagagaaaaaacgaactcggggactaggcgctactaccaagatcactaccagtcatcctagagtgcccagccttaccaccgttccacagacccaggggcagacaactggcccaagctcccatccactgccttggcagtgccatcaccagccatttctcgagactgatcccggtggcagatcttggggccctggacagaagtggcatcgtcttcacctgtggtgcaccagcgcacagaaggtgtcaaagaagacaggcccacgatgctcaacagccattgcaactgggctcaaaaaccagaagcctgtgcccgctgtaccagtgcagaaaagcggtacttcaggtgttcctcccatggctggagggaagaagcccagcaaaagacctgcatgggacctcaagggtcagttgtgcgacctgaacgcagagctcaagaggtgtagggaacgaacccaaactctggaccagtag

SEQ ID NO: 227901 - DNA, 2022 bp, synthetic construct
  misc_feature 1..2022: note = Description of Artificial Sequence: Synthetic coding sequence
  source 1..2022: mol_type = other DNA
atggacccgcaacgttccccactattggaggtcaaagggaatatcgaactcaaaaggcctctcattaaggcgccatctcagcttccactgtctggatccagactgaaaaggcggccagaccagatggaagacggtctcgaacccgaaaaaaaacgcacaagaggactgggagccacgaccaagatcacaacatcccaccctagagtaccttcacttacgacagtcccccagacacagggccagacaacggcacagaaggtcagcaaaaagacaggaccacgatgcagcactgctattgccactggactgaaaaatcagaagcccgttcctgcagtgccggttcagaagagcgggacctctggggtgccccctatggcgggaggaaagaaacccagtaaaagaccggcttgggacctgaaggggcaactttgcgaccttaacgctgaactgaaaaggtgccgggagagaacccagaccctagatcaggagaaccagcagctgcaggatcagcttagagatgcccagcagcaggtgaaggctctgggaaccgaacgaacaacactagagggccaccttgccaaggtgcaggcccaggcagagcaaggccagcaggagctcaagaacctcagagcttgcgttctggaactggaagaacgactctctacacaggaggggttggtgcaggagcttcagaagaagcaggtcgaactgcaggaggaaagacgcggtttgatgtctcagctggaagagaaggagcgcaggttgcagacttctgaagcagctctgagctcttctcaagcggaggtagcttcccttaggcaggaaacagtagcacaggccgctctgctgacagagagggaagagcgactgcacggactggaaatggaacgcaggcgactgcacaatcagcttcaggagctgaagggtaacattagagtgttttgtagggtcaggcccgtgcttccaggtgaacccactccaccaccgggtttactcttgttcccatcgggcccaggtggaccaagcgaccctcccacaagactctcactcagtcgctccgacgaaaggcgcggtacgctaagtggggcacccgctcccccaacgcgccatgacttcagcttcgaccgtgtcttcccacccggatccggacaggacgaagtgttcgaagagatagcgatgctggtacaatcagctctggacggttaccccgtctgcattttcgcttacggacagaccggtagcggtaagacctttaccatggaaggtggccctggcggagatcctcagctcgagggtttgattccacgcgcacttcgccatctgttttcagtagctcaggagctcagtggtcagggatggacatactccttcgtcgcttcttacgtggagatttataacgagacagtgcgggacctgctggccactgggactagaaaggggcagggaggcgaatgcgagataagacgggctggcccagggtcagaagaactcactgttacgaatgcaaggtacgttcccgtctcttgcgagaaagaagtggatgcccttctgcacctcgctaggcagaatagagcggttgcccgaacagctcaaaatgagcggtcctcccggtcccacagtgtgttccagttgcagatctctggcgagcactccagcagaggccttcagtgcggagctcctctgtcactggtggatttggctggatctgagaggctggatcctggcctggctctcggcccaggcgaaagagagcgtttaagagagactcaggccatcaatagctcactaagcacactaggcctggtgatcatggcacttagtaacaaggaatcacacgtgccataccggaattctaaacttacttacctactgcagaacagcctcggcggatctgcaaaaatgctgatgtttgtgaacatttcaccattggaagaaaatgtatccgaatctcttaactccctgcgcttcgcatccaaggtgaatcagtgcgtaatcgggacagcccaggccaatcgtaaatag

SEQ ID NO: 227902 - DNA, 2022 bp, synthetic construct
  misc_feature 1..2022: note = Description of Artificial Sequence: Synthetic coding sequence
  source 1..2022: mol_type = other DNA
atggatcctcagcggtcacctctgctagaggtgaaggggaatatcgagttaaagagacccctcataaaggctccgtcacagctgcctttgtcagggagcaggctcaagcggaggccagaccagatggaggacgggctcgaacctgagaaaaaaagaacccggggtttgggggctacaactaagatcacgacttcccacccaagggttccaagtctcaccactgtcccccagacccagggacagaccactgctcagaaagtaagtaagaagacagggccaaggtgcagtactgccatcgcgaccggactcaagaaccagaaacccgttcccgcagttccagtgcagaagagtggtaccagtggggtcccccctatggctggaggcaaaaagccttctaagcgaccagcctgggacctgaagggacagctgtgcgacctcaatgccgagcttaaacgttgtagagaaagaacccagacacttgaccaggaaaaccagcagctgcaagaccaacttcgcgatgctcaacagcaggttaaggcactaggcaccgaacggaccactttagaagggcatttggcaaaggttcaagctcaagccgaacagggccagcaggagctgaagaacttacgtgcttgcgttctagagctggaagagaggttatcaacccaggaagggcttgtgcaggagctgcagaagaagcaggtggagctgcaggaagaaaggaggggacttatgagccagcttgaagagaaagagcgaagactacagacaagtgaagccgctctctcgtccagtcaggctgaggtcgcgtctctgcggcaggagacagtggcccaggctgcgctgctaaccgagagggaagagcggttgcatggcctggagatggagaggcggagattgcacaaccagctgcaggagctgaagggcaatatccgggtgttctgccgggttagaccagtgctgcctggcgaaccaaccccacctccaggcctgctcctgtttccaagtgggccaggaggacctagtgacccccctaccaggctgtcactctcacggtcggacgagcggagaggcacactctctggggctcctgctcccccaaccaggcacgatttttcattcgacagagttttcccccctggctccgggcaggatgaggtctttgaggagattgcaatgcttgtacagtccgccttggatgggtatcccgtgtgtatcttcgcttatggacagacagggagtggtaaaacttttaccatggaaggaggtcccggaggagatccgcagctggaaggccttattccgcgtgccctgcgtcatcttttctcagtggctcaggagctctccggtcagggctggacgtatagctttgtcgcttcatacgtggagatctacaacgaaaccgtgagagacttactggctaccgggaccaggaagggacagggtggggagtgtgaaatcagacgggcaggacctggcagcgaggaactgacggtgaccaatgctagatacgtccctgtttcttgcgagaaagaagtggacgccttactccacctcgcaaggcagaatcgggctgttgctagaacggcacaaaatgagcgatcatcaagatcgcacagcgtttttcagcttcagatttcaggggaacactcatcccggggactgcagtgcggtgccccattgtctctagtagatctagccggatccgagcggcttgacccaggcctcgctcttggaccaggggaacgtgagaggttacgggagacacaggctattaattctagcctgtcaactctggggctggtgattatggcccttagtaacaaagagtcacatgtgccctacagaaactccaagttaacatacttgctccagaattctttgggtggttcagctaaaatgctgatgtttgtgaacatctctccgcttgaagagaacgtcagtgagtcactcaatagtctgcgttttgccagcaaagtcaatcagtgtgtgataggtactgcacaggctaatagaaagtag

SEQ ID NO: 227903 - DNA, 612 bp, synthetic construct
  misc_feature 1..612: note = Description of Artificial Sequence: Synthetic coding sequence
  source 1..612: mol_type = other DNA
atggaccctcagcggtcaccccttctcgaagttaagggcaacattgagctgaagcggccactgatcaaggcccctagtcagctcccattatccggttcacgccttaagcggcgacctgaccagatggaggacggcctagagccagagaagaagcgcacgcgagggctcggagcaaccacaaaaatcactactagtcacccgagggtgcccagtctcactacagtcccccagacgcagggccagacaaccggcccttccagtcatccattaccttggcaatgccaccaccagcccttcctagaaacagatcctgggggacgcagctggggacccggacagaagtggcataggctgcacctgtggtgtacctccgcccaaaaggtgtctaagaagactgggccaaggtgctctacagccatcgcgaccggactgaagaatcagaaaccggtgccggctgtgcccgtgcaaaaatccgggacgagtggagtgcccccaatggcagggggtaagaagccatctaagagacccgcatgggacctgaagggccagctgtgtgatctgaacgctgaactgaaacgatgtcgggaaagaacccagactctggatcagtag

SEQ ID NO: 227904 - DNA, 2502 bp, synthetic construct
  misc_feature 1..2502: note = Description of Artificial Sequence: Synthetic coding sequence
  source 1..2502: mol_type = other DNA
atggttccttcacgcaggacttggaatttgggtgccacccccagcttgcgcggactgtggagagtgggtagggcaccggaacccgaaccaggtatggccagacccgctccagcgcctgcctctcccgcagcccgtccatttccccataccggtccgggacggctgagaacaggccgtggcaaggatacccctgtgtgcggagacgaagacagctcggcgcgttctgccgctcgacctgccctggcacaatgtcgtgccctttctgtcgactgggcaggccctggaagcccccacggactgtacttaaccctgcaggtcgagcaccttaaagaaaaactaatatctcaggcccaggaggtaagccgtctacgatccgagttgggaggtacagatctggaaaaacacagagacttgctgatggtggagaacgagcggttgcgccaggaaatgcggagatgtgaagccgagctccaagagttgcggactaaaccagcgggtccgtgtccagggtgtgaacattcgcaagagtccgcccagctccgggacaagttaagtcaactccagctcgagatggcagagtccaagggcatgttgtctgagctaaacctcgaagtgcaacagaagaccgatagactggcagaggtcgagctcaggttgaaggactgtttagctgagaaagctcaagaagaagagcggctctctcgtcggctgcgtgatagccacgagacaatcgcctctctacgggcacagagcccacccgttaagtacgtgatcaaaaccgttgaggtcgagagctctaaaactaagcaggccctttctgagagccaggctcggaatcaacacttacaagaacaagtggccatgcaacgccaggtcctgaaggaaatggaacagcagcttcaaagctcacaccagctgacggccaggctgcgcgctcagattgccatgtatgaatctgagctggagcgcgctcatggacagatgctggaagagatgcagagcctggaagaagataagaatcgcgcaatcgaagaggcattcgcacgagcccaggtagaaatgaaggcagtacacgagaacctcgccggagtgcgtacgaacctattgactttgcagcctgctttgcgtaccctcaccaatgattacaacggtctcaagagacaagtacgtggtttccctctcctgctgcaggaagccctccggtctgttaaggccgagatagggcaggccattgaagaggtaaacagcaataaccaagagctactgcgcaaatacaggagggaacttcagttgcgtaagaagtgccacaacgagttggtccggctgaaagggaacattcgagtgatagcgcgagtgaggccagttacaaaggaggacggagagggacccgaagcaacaaatgctgtgacatttgacgcggatgatgattcaattatccatctgctgcataaggggaaaccagtaagcttcgagctcgacaaggtgttctcgccccaagccagccaacaggacgtgttccaggaggtgcaggcactggtgacctcgtgcatcgacggtttcaacgtgtgtatctttgcctacggccagacaggcgctgggaagacatacacgatggaaggcaccgcggaaaaccctggcatcaatcagcgcgcactccagcttcttttcagtgaagtccaggagaaagctagcgattgggaatacacaatcacggttagtgccgctgagatttataatgaggtgctgagagatctcctgggcaaagagccacaagaaaaacttgagatccggctgtgcccagacgggagtggccaactgtacgttcccggactgacagagtttcaagttcagtctgttgatgacatcaataaggtgttcgaatttggccacacaaatcgcaccaccgagttcacaaatctcaatgagcacagctctcggagccatgccctgctgatcgtgacggttcggggtgtcgactgtagcaccggattaaggaccacgggcaagctgaatctagtagatcttgccggaagcgaacgggtcggaaaaagtggggcagaaggttcccggctgagagaagcccaacatattaataaatctctctccgccctgggggatgtcatcgccgctctgagaagtagacaagggcacgtcccttttagaaattccaagctgacctacctgctgcaggactccctgagtggagactccaaaacattgatggtcgttcaagtgtctcctgtggagaaaaacacaagcgaaacattgtacagtctcaaattcgcagaacgggtgagatcagtggagttaggccctggtctgcgcagggccgagctcggatcttggagttcacaggagcaccttgagtgggagcccgcttgtcagacacctcagccaagcgctcgcgctcacagcgctccaagtagtggcacgtcttcccggccaggcagcatccgtcggaaattgcagccatctgggaaatctaggccactgccagtgtag

SEQ ID NO: 227905 - DNA, 2064 bp, synthetic construct
  misc_feature 1..2064: note = Description of Artificial Sequence: Synthetic coding sequence
  source 1..2064: mol_type = other DNA
atggtggagaatgaacgcctgcgccaagagatgcgtagatgtgaggctgaactgcaggaactgcgtacaaagccagccggaccatgcccaggctgtgagcattctcaggaatccgcccaactgagggacaagttatcccagctgcagttagaaatggccgagagcaagggaatgctgagcgaactgaacctcgaagtccaacagaaaaccgaccgactagccgaggtggagcttaggcttaaggactgcctggctgagaaagcccaagaggaggaaagattgtcccggagattacgggatagtcatgagacaatcgcctccctacgcgcacagagtccacccgttaagtatgttattaagaccgttgaagtcgagtcatccaagaccaagcaagccctgtcggagagtcaagcacgaaaccagcaccttcaagagcaggtggccatgcaacggcaagtcctgaaggaaatggagcagcagttgcaaagttcccatcagctgacggcaagactccgagcccagattgccatgtacgagtcggagttagagcgcgcacacggacagatgctggaggaaatgcagtctctggaggaggacaagaacagagcaatcgaagaggctttcgctagggctcaggtagagatgaaagccgtgcacgagaacttagcgggagttcggactaatcttttgacactgcaacccgctttgagaacactcaccaatgattataatggcctgaagcggcaggtacgaggcttcccactactcctgcaggaagccttaaggagcgttaaggctgaaatcgggcaggctattgaggaagtgaatagcaataatcaggaattacttagaaagtacagacgcgagctgcaactcagaaaaaagtgccataatgagctggtgaggttaaaaggcaacatcagggttatcgcccgtgttaggccagttacaaaagaagatggcgaaggacctgaggcaacgaacgctgtcacatttgacgccgatgatgatagcatcatacatctgctgcacaaaggaaagccagtgtcttttgaactggataaggtgttttcacctcaggcgtctcagcaggatgtgttccaggaggtgcaggcactggtgacaagctgtatcgacggctttaacgtttgcatattcgcatatggacaaacgggagccggaaagacttataccatggaaggcacggcggagaatcccggtatcaatcagagagctctgcaacttcttttctccgaggtgcaggaaaaggctagcgactgggaatacacaatcacggtttcagctgcagaaatctacaatgaagtactgagggatctgctggggaaggaaccacaggaaaaattggagatcagattgtgtcccgacggctccggacagttatacgtccctggtctgacagagtttcaagtgcagtccgtggacgacattaataaggtctttgagtttggacacacaaaccgaactacagaatttaccaacctcaacgagcattcaagtagatcacacgcgctattgatcgttaccgtcaggggcgtagactgcagcaccggcctgagaaccacaggcaaactcaatctcgtcgacctggcgggttctgaaagggtaggaaaaagcggggctgagggttcgagactccgcgaggcccagcatatcaacaaaagcctctcagcactcggggatgtcattgccgcacttagatcacgacagggccacgtgccattccgcaactccaagttaacatatttactgcaggacagcctgagtggcgacagcaaaactctgatggtcgtacaggtgagtcccgtggagaaaaatacaagtgagacactatatagcctgaagttcgcagagcgggttcgcagcgtggagctcggtcctggcctgagaagggccgaactgggctcttggtcctcgcaggaacacctggaatgggaaccggcatgccaaaccccccaaccctcagccagggcccattctgcacctagttctggcacctctagtcgaccgggaagcattcgcagaaagctccagccctcggcctag

SEQ ID NO: 227906 - DNA, 2481 bp, synthetic construct
  misc_feature 1..2481: note = Description of Artificial Sequence: Synthetic coding sequence
  source 1..2481: mol_type = other DNA
atggtaccttcccggagaacctggaatctgggggctaccccaagcctgaggggattgtggcgggttggacgtgcccctgaacccgagcccggaatggcccgtccagctcctgctccagccagccctgcagctagacctttccctcacaccggccctggaaggctccgcaccggccgaggtaaagatactcctgtgtgcggcgatgaggattcaagcgcacgttccgctgccagaccagccctggctcagtgtcgggcactcagcgtcgactgggctggtcccggttctcctcacggcttgtatctaacactccaagtcgagcaccttaaggaaaagctgatcagccaagcacaggaagtctctaggctccggtccgaactaggagggactgatttagaaaaacaccgcgatctgttgatggttgagaatgaaagactgagacaggagatgagaagatgtgaggcagaactgcaggagctgcggaccaaacccgctggtccttgccccggatgtgaacactcacaagagtctgcccaactgcgggacaagctctcacagttgcaactggagatggccgagagcaaagggatgttgtccgagctgaacctggaggtgcaacaaaagacagatcgcctggctgaagtggagttgcggctaaaggattgtctcgccgaaaaggcccaggaggaagaacgattgtctaggcgcctgcgtgactcacatgaaacaatcgcatccctcagggctcagtcacctccagtgaaatacgtcatcaaaaccgtggaggtggaatccagcaaaaccaagcaggctctgagcgaaagccaggcgagaaatcaacatctgcaagagcaggtggcaatgcaaaggcaggtattaaaggaaatggagcagcaacttcaaagttcccaccagctgacggccaggctgagagcgcagatcgcaatgtacgaaagtgaattggagcgagctcatggccagatgctggaagagatgcagagcctggaggaggacaagaatagagccattgaagaagcgttcgctagggcccaggtagagatgaaagcagtccatgagaacctcgccggagtccgaactaacctcctcacacttcaacctgctttgcgaaccctgaccaatgactataatggcctgaagcgccaggtgcgcggtttccctctgcttctgcaggaagccttgcgcagtgttaaagctgaaatcggccaggccatcgaggaggtgaactccaacaaccaggagctgctcagaaagtaccgcagggaattacagttacgcaagaagtgccacaatgaactggtgagactgaagggtaatatcagggtgatcgctagagtgcgccctgtaacgaaggaagatggggagggaccagaggcaactaatgctgtcacattcgatgccgatgacgactccatcatccatctgttgcacaaggggaagcctgtgtccttcgagctggacaaggttttcagcccccaggcaagccagcaggatgtattccaggaggtgcaggccctggtcacaagctgcatcgacgggtttaacgtgtgtatattcgcctacgggcaaactggcgctggaaaaacatatactatggaaggtactgccgaaaaccctggaataaaccaaagagcgctgcagctactgttttccgaggtgcaggaaaaggcaagtgattgggaatacaccattacggtgtcagcagcagagatatataatgaggtgctgcgggatctgcttggaaaggaaccgcaggaaaaactcgaaattcggttgtgtcccgacggcagcggtcaattatatgtgccgggactgacagaattccaggtccagagcgtggatgacataaacaaagtatttgagtttggtcataccaaccgtacaacagaatttactaaccttaatgagcactcatcccggtcacacgccttgcttatcgtgacagttagaggtgtggactgcagtaccgggctacggactacgggaaaattaaacctggtggatctcgccggatcagagcgcgtgggaaagtctggtgccgagggatcccggctcagagaggctcagcacataaataaatccctttcagccctgggagacgtgattgccgcactccgatctcggcaagggcacgtgccctttagaaacagtaaactcacgtacctcctccaggacagcctctctggagatagtaagaccctcatggtggtccaagtgagtcctgtggagaagaatacctccgagacgctctacagtttgaagtttgccgagcgggtgagatccgtcgaactggggcctggcctgaggcgagctgagctgggaagctggtcatctcaggaacacctggagtgggaacccgcttgccagaccccacagccctctgcaagagctcactctgccccatccagcgggacatccagccggccagggtcaattcgcagaaaactgcaaccatctgcctag

SEQ ID NO: 227907 - DNA, 2307 bp, synthetic construct
  misc_feature 1..2307: note = Description of Artificial Sequence: Synthetic coding sequence
  source 1..2307: mol_type = other DNA
atggttctgcggatggtggaggctatgtctcaactgcaggatgaaaagacacagttacaggaggaacttgttgttctgcaggagcgtcttgctctgcgagactccgatcagcaagccacctcaactcagttgcagaatcaggtggagcatctgaaggagaagctgatctcacaggcacaggaagtgtcacggttgaggagcgagctgggcggaacagacttagagaaacatcgggacctcttaatggttgagaacgaaagactgcgccaagagatgaggaggtgcgaggcggagctgcaggagctgcgaacaaagccggcaggaccctgtccaggatgtgagcactcccaggagagtgcccagttgagggataaactgtctcaactgcagctcgagatggctgagagcaaggggatgctgtcagagttgaacctggaggttcaacaaaaaaccgatagactggcagaagttgaactcagactgaaggattgcctcgcagaaaaggcccaggaggaagagcggctgtcccgtaggctcagggactcgcacgagactattgcctccctgagggcccagagccctccagtgaagtacgtgattaaaacagtggaggttgaatcatcaaagaccaaacaagcactgtccgagtcccaggccagaaaccagcacctacaggaacaggtggctatgcagcgtcaggtactgaaggagatggaacagcaactgcagtctagccaccagctgactgctcggttacgggcacaaatcgccatgtacgagtcagagctggagcgggcacacgggcagatgctcgaagaaatgcagtccctcgaggaggacaagaacagagcaatagaagaggccttcgctcgagcccaggttgagatgaaagctgtgcatgaaaacctcgctggagtcagaaccaacctgcttaccctgcagccagcgctgcgaacccttacaaacgactataacggacttaaaaggcaagttcgaggttttcctctattgttgcaggaggcactcaggtctgttaaggcagagattggtcaagcgatcgaagaagtaaactctaacaaccaggaattgctgagaaaatatcgacgtgaactgcagctgcggaagaagtgccacaacgaactggtaagattaaaaggaaatattagggtaattgcccgagtgcggccagttacaaaggaggacggtgagggacctgaggccactaatgcagtgacttttgacgccgacgacgattctataattcacctgctgcacaaagggaagccggtttctttcgagctggataaggtgttctcaccccaagccagtcaacaggatgtttttcaggaggtgcaagcactggtgacatcttgcattgacgggttcaacgtttgtatcttcgcgtatggccagactggggctggaaagacgtatacaatggagggcactgccgagaatccaggaattaaccagcgggcactgcagctactgttcagtgaggtgcaggaaaaagccagcgactgggagtacacgattacagtatccgcagctgagatctacaatgaagtgctgcgggatctactgggaaaggaaccacaggaaaaactagagatccggctgtgccccgacgggtccggccagttatacgtcccagggctgacggagttccaagtgcagtcggtggacgacataaacaaggtcttcgagttcggacacactaatcggactacagaattcaccaatctcaacgaacatagctcacggtctcatgccttgctgatcgtcaccgtcagaggcgtagactgcagcaccggattgcgcaccacgggaaaactcaacctggtggatttagccggttcggagcgggtgggaaagtctggcgctgagggctctcgactgagagaagcgcaacacattaataaaagtctcagcgcactcggcgatgtgatcgcagctctccgctcacgccagggccatgtaccgttccgcaacagtaaacttacgtatcttttgcaagacagcctgtccggcgactccaaaaccctgatggttgtgcaggtgagcccagtagagaaaaacacttcagagacattatactctctgaaatttgccgagagagttaggtccgtggagctcggtccaggactgcggagggcggagctggggagttggtccagtcaggagcacctcgagtgggagcctgcgtgccagacaccacagccttccgctagagctcacagcgccccatcctccggaacctcatccaggcccggaagcatcaggagaaagttgcagcccagcgcttag

SEQ ID NO: 227908 - DNA, 2175 bp, synthetic construct
  misc_feature 1..2175: note = Description of Artificial Sequence: Synthetic coding sequence
  source 1..2175: mol_type = other DNA
atgatcaaagttgagcatctgaaagaaaagctaataagtcaggcccaggaagtctctcgccttaggtcagaactgggaggaactgatctggagaagcatagggacctcctcatggtagaaaacgaaagattacggcaagaaatgagacgatgtgaagccgaactacaggaactgcgaacgaagccggctggtccctgccctgggtgtgaacactcgcaagaatcagctcaactccgggacaagctatcccagctgcaattggaaatggccgagagcaaggggatgctgtctgagttgaacctagaagttcagcagaaaacagaccgtctcgccgaggtggagttgcgcctgaaggattgtttggcggaaaaagcccaggaggaggaacggctaagtaggaggttgcgggactcacatgagacaatagcatcacttcgtgcccagtccccacctgtgaaatatgtgatcaagactgtggaagtggaaagctcaaaaacgaagcaggcgctgtcggagtctcaggcaaggaatcagcacttacaagagcaggtagccatgcagcgacaagtgctgaaagagatggagcagcagctacaatcctcccaccagcttaccgccaggcttagagcgcagattgcaatgtatgagagcgagctggagagagcccatgggcagatgctggaggaaatgcagtccctggaggaggacaagaaccgagcgatcgaagaggcattcgccagagcccaggtggagatgaaggctgtacatgaaaatcttgcaggcgtgagaaccaacctcctgactctgcagccggctctgcgcacactaaccaacgattacaatggcctgaagcgccaggtgcggggattcccattacttcttcaagaagccctccggtcagtgaaagccgaaattggacaggctatagaagaagtgaatagcaataatcaggaactgctccggaagtatcgccgagagctgcagctcaggaaaaagtgtcataatgaactcgtaagactgaaagggaatattcgcgtcatcgccagggtgcgccctgtcactaaggaggacggtgagggccctgaagccactaatgccgtgacgttcgatgccgacgatgattcaataatccatctcctgcataagggcaaaccagtatctttcgagcttgacaaagtgttcagcccacaggcttcccagcaggatgtatttcaggaggtccaggcattagttacctcgtgtattgatggctttaacgtttgtatcttcgcatatggtcaaaccggtgccggtaagacctacacaatggaggggacagcggaaaatcctggtatcaatcagcgcgctctacagttgttgttctccgaggtccaggagaaggcttccgattgggagtatactataaccgttagcgccgcagagatctataacgaggtgctacgcgaccttctggggaaggaaccacaggaaaaattggaaattaggctttgtcccgacggatcagggcagctctatgtccctggattaacagaatttcaggtgcaatctgtggatgacattaataaagtgttcgagtttggccacacgaaccgcacaactgaattcactaatttaaacgagcactccagccgctctcatgccctgctgatagtgacagttcgcggagtggactgttctacaggccttagaacgactggcaagctgaacctggtggacctagctggaagtgagcgggtgggcaaaagcggggcagagggatccagactccgggaagcacagcacatcaacaagagtctgagcgccctcggcgatgtcattgctgcattgcgctcgcgccaagggcacgttccatttaggaacagcaaactcacatatctgttgcaggactccttgtcaggtgattccaaaacgctcatggtggtgcaggtgtcccctgttgaaaagaacaccagcgagaccctctatagtctaaagttcgccgaacgagtcagatctgtggaactgggacccggactaagaagagcagaacttggaagctggagtagtcaagagcaccttgaatgggaaccagcgtgccagactcctcaaccaagcgccagggcccacagtgctccatcgtctggaacatcatcccggcctggaagtattcggcgaaaacttcagccctccgcctag

SEQ ID NO: 227909 - DNA, 2547 bp, synthetic construct
  misc_feature 1..2547: note = Description of Artificial Sequence: Synthetic coding sequence
  source 1..2547: mol_type = other DNA
atgtgtgcgtccgcgtgcaaagacactgcagcttggtgtcccgaggaagctgctgagccacaggccatggttccgtcccgccgaacctggaacctgggggctacaccatccctgaggggcttatggagagttgggagagctcccgaacccgaacctggaatggccagacctgcccctgccccagcaagccccgctgctcgccctttccctcatacaggccctggacggttgagaaccgggcgtgggaaggatactccagtgtgtggagacgaagacagttcggccagatcagcagccagaccagccctagctcaatgtagggccctgtcagtggattgggcaggacccggatcaccgcacggactctatctaactctccaggtggaacatctgaaagaaaaattaataagccaagcgcaggaagtcagcagactccgttccgagctaggagggacagatctcgagaaacatagagacttactgatggtggaaaatgagcgcctgcggcaagagatgcggcgttgtgaagccgaattgcaggagctgcgaacgaaacccgctgggccttgcccgggatgcgagcattcccaggagagcgcacagctgcgtgacaagttgagtcagctacagctggagatggcggagtccaaaggcatgctgtccgaactcaatctggaagttcagcagaaaaccgatcggctggcagaagtggaacttcggttgaaggactgtttagctgaaaaagcgcaggaagaggaacggctgagccgtcggctgcgggacagtcacgagacgatcgcctctctgagggctcagagcccgccagttaaatacgtgatcaagacggtggaggtggaatcgtctaaaacaaagcaggcgttgtctgagagtcaagcgcgaaatcagcacctgcaggaacaggttgctatgcagcggcaggtgctgaaggaaatggagcaacaactgcagtctagccatcagctcacggcacgactgcgtgctcagatcgccatgtatgaaagtgaactggagcgagcccatggtcagatgcttgaagaaatgcaatctcttgaggaggataaaaatagagccattgaagaagcgtttgccagagctcaggtggagatgaaggcggtacatgagaatctggctggtgtacggacgaacctattgactctccagccggctctcagaacccttacgaacgactacaatggcctgaaaaggcaggttcgcggtttcccactgctgctccaagaagcattaaggtcagtcaaagccgaaataggacaagccatagaagaagtgaattccaataaccaggagttgctccgaaagtacagacgcgagctgcagctgcgcaagaagtgccacaacgaattggtacggctgaaaggtaacatccgggtgatagctcgcgtgcggccagtcaccaaagaggatggagagggtccggaagccaccaacgctgtcacattcgacgcggacgatgacagcattatccacctacttcataaggggaaacctgtgagctttgagctggataaggtgttcagccctcaggcgtctcaacaggacgtattccaggaagttcaggcactcgtcacctcctgtatcgatggctttaacgtgtgcatttttgcctatggacagacaggcgcaggtaagacctatactatggaaggcaccgccgagaaccccggaatcaatcaaagagctctgcagctcttgttttcagaagtgcaggagaaagcatcagattgggagtatacaattacagtgtccgcggctgagatctacaatgaggtgctacgcgacctgctcggcaaggaacctcaggaaaagcttgagatacgcctctgtccagatggctccggccaactctacgtgccaggtctcaccgagtttcaggtgcagagcgttgatgatatcaataaagtgttcgaattcggacatacgaataggacgacagagtttactaacttgaatgaacacagctcccggtctcacgctctgctgattgttaccgtccgcggtgtcgactgctccaccggcctgaggaccacagggaagctgaatctggtggacctagccggaagcgagcgagtgggcaagtcaggcgcagaaggctcacgcctacgtgaggcgcaacacatcaataagagcctgagcgcgctcggcgacgtcatcgccgcactccgttccaggcagggtcatgtaccctttcggaattctaagcttacctatcttctgcaggactctttgtctggagactctaaaacccttatggtggtccaggtgtcccctgttgagaaaaacacatcagagacactgtatagtctgaagtttgcagaaagggtccgatcggtggaattgggccctggcctgcgaagggccgagcttggtagctggtctagccaggagcacctagagtgggagcccgcatgccagacaccgcagccatctgccagggctcatagcgctccttcatctggcacgtcctccagaccaggctcaatccggaggaaacttcaacccagcgcctag

SEQ ID NO: 227910 - DNA, 2055 bp, synthetic construct
  misc_feature 1..2055: note = Description of Artificial Sequence: Synthetic coding sequence
  source 1..2055: mol_type = other DNA
atggtcgaaaacgagcgcttgagacaagagatgcggaggtgcgaggcagaactgcaagagcttcggacaaaacctgcaggaccctgccctgggtgtgagcactcacaggaatctgcccagcttagagataagttatctcagttgcagctggaaatggccgagtcgaaagggatgctgtccgaactgaatcttgaggtccagcaaaagactgacagattggcagaagtggaattaaggctgaaagattgccttgcagagaaggctcaggaggaagaaaggctttcccgcaggttgcgagatagccatgaaacaatcgcctctctgcgggctcagagtccccctgtcaagtatgtcatcaaaacggtggaggtcgaaagtagcaagacaaaacaagcattatccgaaagccaagccagaaatcagcatttgcaggagcaggtggccatgcagcggcaggtgctcaaagagatggagcaacagttgcagtccagccaccagctgacggcgaggcttcgagcacagatcgcaatgtacgagtccgagcttgagagggcacatggccagatgctcgaggaaatgcagagtttagaggaagacaaaaaccgcgcaattgaggaagcatttgccagggcccaggtggagatgaaggccgtccacgaaaacctggccggtgtgcggacaaatctgctgacattgcagccagcattgaggaccttaacaaacgactataatggtcttaagcggcaagtgcgtggcttccccctacttctccaagaggccctgcgatcagttaaggctgagattggccaggcaatcgaagaagtgaactccaataatcaggagctgctgcgaaagtatcgcagagagttgcagctgaggaaaaagtgtcataacgagcttgtgcgcctgaagggcaacataagagtgatagccagggtgagacctgtcacgaaggaagacggcgaagggccagaggctacgaacgcagtgacgtttgatgccgatgatgattccattatccatctgttgcacaaaggtaaaccagtcagcttcgaactggataaagtctttagccctcaagcctcccagcaggatgaggtccaggcactggttacgtcctgtattgatgggttcaacgtgtgtatttttgcgtacggccagactggagcgggaaaaacctacacgatggaagggaccgcggagaacccaggcatcaaccagcgagcactccaactcctcttctccgaggtccaggaaaaggcaagtgactgggaatacaccataacagtctctgcagccgaaatctacaacgaggttctcagggacctgctgggaaaagagccacaggaaaagctggagatccgactttgcccggacggttccgggcagctctacgtgccaggtctgactgagtttcaggtacagtcagttgacgatatcaataaggtgttcgagtttggacacacaaaccgcacaacagagtttaccaacctgaacgagcattcgagtcgttcccacgccttactcatcgtcactgtgcgcggagtggactgctctactggactgcggacgaccggcaagctgaatctcgtggacctcgccggttcagaacgtgtgggcaagtccggagccgagggttcccgcctgcgggaagctcaacacatcaataagagccttagcgccctgggcgacgtgatcgctgctctcagatcacgacagggccacgtacctttcagaaacagtaagctcacttatctgttgcaagacagtctctctggagactctaaaacactcatggtcgtccaggtgtcccccgtggagaagaacacctctgagacgctctattcgctgaagtttgctgagcgggtgcgaagcgtggagcttggccctgggctacgcagggcggaactcggctcctggagcagccaagagcacctggaatgggagccggcatgtcaaacgccacaaccttccgcaagggcacactccgcgccttccagcggaacttcttcacggcctgggtccatccgaagaaagctacagccttccgcttag

SEQ ID NO: 227911 - DNA, 1914 bp, synthetic construct
  misc_feature 1..1914: note = Description of Artificial Sequence: Synthetic coding sequence
  source 1..1914: mol_type = other DNA
atgtatgacaacatgtccaccatggtgtatatcaaggaagacaagctcgagaaactcactcaggacgaaattatcagtaaaacaaaacaggtgattcagggactcgaagccctaaaaaacgaacataatagcatcctgcagagtctgctggaaacacttaaatgtctgaaaaaagacgacgaatcaaacttggtagaggagaagtcgaacatgattcgcaagtcattggaaatgctggagcttggactgagcgaagctcaggtgatgatggccctgtctaaccatctaaacgcagtcgagtcagagaagcagaaattgcgagctcaggtaagaagattatgccaagagaatcagtggctgagggacgagctggctaatacccagcagaagctccagaagtctgagcagagcgtcgcccagctggaggaggagaagaaacacttggaattcatgaaccagctgaaaaaatacgatgacgacatttctccctctgaggacaaagacactgacagtactaaggagcccctggatgatctctttccgaacgacgaagatgaccccggacagggaatccagcagcagcattcgtctgcagccgcagccgctcaacaggggggttatgagatccccgcaagacttcgcacactgcataatctggttatccagtacgcaagtcaagggagatatgaagttgctgtgcctctgtgcaagcaagcactggaggatctcgagaagacatcaggtcacgatcacccagacgttgccacaatgttgaacatcctggccttagtgtatagagatcaaaataaatacaaagatgctgccaatctgctcaatgatgccctagccattcgggaaaagacactgggcaaggatcatcccgcagtagcagccaccttgaacaacttagcggtcctgtacggcaaaagggggaagtacaaagaggctgagcccctttgcaagagagcgctcgaaattcgcgaaaaggtgctggggaaagaccaccccgatgttgcaaagcaactgaacaatttggctttactatgccagaatcagggcaagtatgaggaagttgaatactactaccagagggcccttgagatctaccagaccaagctggggcctgatgaccccaacgtcgctaagaccaaaaataacctggcatcgtgttacttgaagcagggcaaatttaagcaggcagagaccctatataaggaaatcctgactcgggctcacgaacgcgagtttgggagcgtggacgacgagaacaaaccaatatggatgcatgcagaggagagagaagagtgcaagggtaagcaaaaagatggtacttccttcggcgaatatgggggttggtacaaggcctgtaaggtggactcccctacagtgactacgacacttaaaaacctcggggcactgtatcgcaggcagggcaagttcgaggctgccgaaaccctggaggaggccgctatgcgcagcagaaagcagggcctagacaacgtccacaagcagagggtcgccgaggtactgaacgaccccgaaaatatggagaagcgtcgcagccgtgagagcctgaacgttgacgttgtgaaatacgagtctggccctgatgggggagaggaagtgagtatgtccgtagagtggaacggcgatgggactggaagcctgaagcggagtgggtcgttcagcaaactgagagcttctatccgacgcagtagcgagaaattagttcgcaagctcaaagggggttctagccgggaaagtgagcccaagaatcctggtatgaaacgggcttccagcctcaacgtccttaacgtgggcggaaaggccgctgaggataggtttcaagaaagaaataactgcctggccgacagtagagcactgtccgccagccataccgatctcgcgcattag

SEQ ID NO: 227912 - DNA, 1920 bp, synthetic construct
  misc_feature 1..1920: note = Description of Artificial Sequence: Synthetic coding sequence
  source 1..1920: mol_type = other DNA
atgtatgataacatgagcaccatggtctatattaaagaagataagctggagaaactgactcaggacgaaattattagcaagacaaagcaggtaatccaggggttagaggctctgaaaaacgagcacaatagtattctgcagtccctgctggaaactctgaaatgtcttaagaaagacgacgagagcaacttggtcgaagaaaaatcaaacatgatccgcaagtcacttgagatgcttgagctgggtctatccgaagcccaagtcatgatggctctgtctaaccacctgaatgctgttgaatccgaaaagcagaaactgagggcccaggttcgtaggctctgccaggaaaaccagtggttgcgtgacgagctggcaaatacgcagcaaaagttacagaaatccgagcaaagtgtggctcaactcgaggaggaaaaaaaacacctggagttcatgaaccaattaaagaaatacgatgacgacatttcccctagcgaggacaaggatacagattccacaaaggaacccctggacgatctgttccccaacgacgaagacgatcccggtcagggtatccagcagcaacacagctcagccgcagcagccgcacagcagggaggctacgagattcccgctaggttgagaaccctgcataacctggtgattcaatacgcttctcaggggagatatgaggttgctgttcccttgtgtaagcaagctctggaggatctggaaaagaccagcggacacgatcaccccgatgttgccaccatgctcaacattctagccctggtgtaccgagatcagaataagtacaaggatgccgctaatcttctgaacgacgctctggcaattagagagaaaacacttggaaaggatcatccggctgttgcagctacccttaacaatctcgccgtcctgtacggaaaaagagggaagtacaaagaggccgaacctctctgcaaacgcgctttagaaatccgggagaaggtgctgggaaaagaccacccagatgtcgccaagcagcttaataacctggctttgctctgccagaatcagggaaagtatgaggaggtagaatactactatcagcgggctctggaaatttatcagaccaagttaggacccgacgacccaaacgtggccaagacaaaaaataatctggccagctgttacctcaaacaggggaagtttaagcaggccgagacactgtataaggaaatcttgacccgagctcacgagagagaatttggcagtgtggatgacgagaacaagccaatctggatgcacgccgaggagcgggaggagtgcaaaggaaagcaaaaggatggaacttcttttggcgagtacgggggttggtacaaggcatgcaaggtcgactctccaacggtaaccaccaccttaaagaacctgggggcactgtatcgacgacaagggaagtttgaggcagcagagactctcgaggaggccgctatgcgatcacgcaaacagggccttgacaatgtacacaagcagagggtcgcggaggtgcttaatgaccccgagaatatggagaaacgtaggtctagagaatcactcaatgtggacgtggtgaagtacgagtctgggcctgacgggggagaggaagtgtcaatgtccgtggagtggaacggcgacggaaccggaagtttgaagcgctcagggtccttttctaaacttagagcctccatacgcagatcttccgaaaaattggtgcgaaagctgaaagggggtagcagtcgggagtccgaaccaaaaaatccaggtatgaaaagggcctccagtctaaatgtgctgaacgtgggaggcaaagctgccgaggatcggtttcagggtgtgtccggacgcgcttcattttgcggaaagagacagcagcagcagtggcctgggcgacgacacagatag

SEQ ID NO: 227913 - DNA, 1887 bp, synthetic construct
  misc_feature 1..1887: note = Description of Artificial Sequence: Synthetic coding sequence
  source 1..1887: mol_type = other DNA
atgtacgataacatgagcaccatggtctacatcaaagaagataagttagaaaagctgacacaggatgaaataatcagtaagacaaaacaagtgattcagggtctggaagccctcaaaaatgagcataacagcattttgcagtctctgttggagaccctcaagtgtctgaagaaggacgacgagtcaaatctcgtcgaggagaaaagcaatatgatccgcaagtccctggagatgcttgagctcggtctcagtgaagcgcaggttatgatggcgctctctaaccacctgaatgcagtggaatctgagaagcagaagctacgagcccaggtgagaaggctgtgtcaagagaatcagtggctacgagatgagcttgcaaatacccagcaaaaacttcagaaaagtgaacagtcagtcgctcagctcgaagaggagaagaaacatctggagttcatgaaccagctcaagaagtacgacgacgatattagtccatcggaagataaggacaccgattctaccaaagaaccactagacgatttgttccccaacgatgaggatgaccctgggcaagggattcagcaacagcacagctctgcggctgcagctgcacagcaggggggttatgaaattcctgccaggctgagaacactgcacaatctggtcattcagtacgcctctcaaggtcggtacgaggtggcagtcccgctgtgtaagcaggcccttgaagacctggagaagacatctggtcatgaccatccggacgtcgccacaatgctgaacatcctggcattagtataccgcgaccagaacaaatacaaggacgccgcaaatttgctgaacgacgcactggcgatccgggaaaagaccctgggcaaagatcacccagccgttgcagctaccctgaacaatctagccgttctgtacggcaagcggggaaaatataaggaagctgaaccactgtgtaagcgcgcactggaaattagagagaaagttctggggaaggaccacccagatgttgccaaacaactcaacaatttggcgctgttatgccaaaatcagggaaagtacgaggaggtagagtattactaccagagagctctcgagatctatcagactaaactggggcctgatgacccgaacgtcgccaagaccaaaaacaacctcgcgagctgctacttgaagcagggcaaatttaaacaggccgaaacactgtacaaagagattctcacccgggcacacgagcgggaatttgggtccgtggacgatgagaataaaccaatctggatgcacgccgaagagcgggaagagtgtaagggaaaacagaaagacggcacctctttcggggagtacggcggttggtacaaagcctgtaaggtggactcccccactgtgacaacaacactgaagaacctgggcgctctgtataggcgccagggaaagttcgaggcagccgagactcttgaagaagcggcaatgcgctctcggaagcaaggtctggacaacgtgcacaaacagcgcgtcgcagaggttctgaacgatcccgagaacatggagaaacgacgttcccgtgagtcactgaatgtggatgtggttaagtacgaatcgggacccgatggcggagaagaggacgggaccggaagccttaagagatcaggatctttctccaagttgagagcgtccattagaaggtcctccgagaaactcgtgagaaagttaaagggcggatcgagtcgtgagtccgagcccaagaatcctggtatgaaacgcgctagcagtctgaatgtgcttaacgtggggggaaaagccgctgaggatagatttcaggaacggaataattgtcttgcggatagtcgagccctatcggccagccatacagacctcgctcattag

SEQ ID NO: 227914 - DNA, 1722 bp, synthetic construct
  misc_feature 1..1722: note = Description of Artificial Sequence: Synthetic coding sequence
  source 1..1722: mol_type = other DNA
atgtatgacaacatgtccacgatggtctacattaaggaggataagctggagaagttaacccaggatgagatcatatcaaagaccaagcaggtaatccaaggcctcgaggcactgaagaacgaacacaactccattctgcagtccttgttggaaactctcaagtgtttgaagaaggacgacgagtcaaatttggtagaagagaagagcaatatgattagaaagagcctcgagatgctggaactgggacttagcgaagcccaagtgatgatggcactgtcaaatcatctgaatgccgttgaatcagaaaaacagaagctgagggctcaagttcgcaggctgtgtcaggaaaatcagtggttacgggatgagcttgcgaatacacagcagaaactccaaaagtccgagcagtctgtggcccagttagaagaagagaagaagcacttagagtttatgaatcagctgaagaaatatgacgatgacatcagtccgagtgaggataaggataccgactcaaccaaggaaccattagatgacctctttcctaacgacgaggatgacccaggccagggcatccagcagcagcacagttcagccgctgccgcagcccaacaaggaggatacgagattcctgccaggctgcggaccctccacaatttggttatccagtacgcttcccagggccgatacgaggtcgctgttccactctgcaaacaggctttagaagatttggagaagaccagcggccacgatcaccccgatgtggctacgatgcttaacatcctggcccttgtttacagagaccagaataagtataaggacgctgccaacttgctgaacgatgcgcttgctattcgagaaaagaccttgggcaaggaccatcccgctgtcgcagcgactttgaacaatctggctgtcctgtacggcaaaagaggcaaatataaagaagccgaacccctgtgtaaacgggctctggaaatcagagaaaaggtgctaggaaaagaccacccagacgtcgctaaacaacttaacaacctggccctgttatgccagaatcagggaaagtatgaagaagtggaatattattaccagagggctcttgagatctaccagacaaaattaggcccagatgatccgaacgtggcgaagactaagaataacttggcctcatgttatctgaagcaaggcaagttcaagcaagccgaaactctgtataaagaaattttgactagggctcacgagcgagagttcgggtcagtggatgatgagaataagcccatatggatgcacgcggaggagcgagaggagtgtaaaggaaaacagaaggatggaaccagctttggcgagtatgggggttggtacaaagcctgtaaagtggactctcccacagtgaccaccaccctcaaaaatttaggcgctctgtatcggaggcagggaaagttcgaggccgctgagaccctggaggaggcggctatgcggagccgcaagcaggggttagacaacgttcacaagcagagggtcgccgaagtactgaatgaccctgagaatatggagaaacggcgatcacgcgaaagcctcaacgtagatgtcgttaagtatgaaagcggtccagatggcggagaggaagtgtctatgtctgttgaatggaacggcggagtaagcgggcgagccagtttttgcggcaagcgtcagcagcagcaatggcccggtcgacgacatagatag

SEQ ID NO: 227915 - DNA, 1731 bp, synthetic construct
  misc_feature 1..1731: note = Description of Artificial Sequence: Synthetic coding sequence
  source 1..1731: mol_type = other DNA
atgtacgacaacatgagcaccatggtgtacatcaaagaagacaagctggagaaattgacacaagatgagattattagtaaaacaaagcaggtcattcagggactggaggccttaaaaaacgagcacaactccatcttacagtccctgctcgagaccctcaagtgcctgaagaaggacgatgagtctaaccttgtggaagagaaaagcaacatgattcggaagtctcttgagatgctcgagctggggctgtcagaggctcaagtgatgatggcgttatccaatcacttgaatgcagtggagagtgagaagcagaagctgagagcccaggtccgacggctctgccaagaaaatcaatggctccgcgatgaattggctaatacccagcagaagttgcaaaagagcgagcagagcgtggcgcagttagaagaagagaagaaacacctggagttcatgaaccaactgaaaaaatacgacgacgatattagtccctctgaggataaagataccgactctaccaaggagcctctggatgacttatttccgaatgatgaagacgatcccggacaggggatccagcaacagcactcatcagcagccgctgccgctcaacaaggcggatatgagattcctgcaaggctgcggacactacacaatttggtgatccagtatgcatcccagggcaggtacgaagtggctgtccctttgtgcaaacaggcactggaagacctcgagaaaacatcgggtcacgatcacccggatgttgcaaccatgctgaatatcttggctctggtgtatcgcgatcagaacaaatacaaggatgccgctaatcttctcaacgatgccctcgcaattcgcgaaaagactttgggcaaagatcaccctgctgtcgctgctacgctgaacaacctcgccgtcctgtacggaaagaggggcaaatacaaagaggctgagccactctgtaagcgggctttggaaatcagagagaaagtgctgggcaaggatcatccagacgtcgcaaaacaactgaataatctggctctcttatgtcaaaaccagggcaaatatgaagaggtggaatactattaccagcgcgcactggagatttatcagacaaaattaggccctgacgatccgaacgttgcgaagaccaagaataacctcgcgtcatgctacctgaaacaaggtaagttcaaacaggccgagaccctatacaaggagatcctgactagagcacacgagcgggagttcggatctgttgacgacgaaaacaagccaatctggatgcatgcagaggaaagggaagaatgtaagggcaagcaaaaggacggcacaagtttcggggaatacggcggttggtataaggcctgtaaagtggatagtcctactgtgaccactacactgaaaaatctgggggctctttacaggcggcagggaaaatttgaggcagccgagaccctggaagaggcggctatgagaagccgcaagcagaggagtatatccgagattccaaagaagatcctctcggcaaatgggagcaaccacttccctctgcctgggagccaaggtctagataacgttcacaaacagagagtagccgaggtcttaaatgacccggagaatatggaaaagcggaggtcccgggagtctttgaatgtcgatgtggtcaagtacgaaagcggtcctgatggtggagaagagatgcggaagatgaaactaggcctcgttaattag

SEQ ID NO: 227916 - DNA, 1683 bp, synthetic construct
  misc_feature 1..1683: note = Description of Artificial Sequence: Synthetic coding sequence
  source 1..1683: mol_type = other DNA
atgtatgacaacatgtccacgatggtctacataaaggaggataaactcgaaaagctgacacaggacgagattatatctaaaacaaagcaggtgatccaggggctggaggcactgaaaaacgaacataatagcatactgcagtctctgctagagacactgaagtgcttaaagaaagatgacgaatccaacttagtcgaagagaagtctaatatgatacgaaagtcactggaaatgctggagctggggttgagcgaagcccaagtcatgatggccctatctaatcacttgaatgcagtggaatctgagaagcaaaaactgcgcgcacaggtgcgacgactctgtcaagagaaccagtggctcagggacgaattggcaaacacccagcaaaagttgcagaagagcgaacaatccgttgcccaacttgaggaagaaaaaaagcatcttgagttcatgaatcagctgaagaagtatgatgacgatatttccccttcagaagacaaagacacggattctaccaaggaacccctggacgacctgtttcccaatgatgaggatgatcccggacaggggatccaacagcagcactcctcagccgctgccgcagcacagcaaggaggatatgaaataccagcccgtctgcgaaccctgcataatctggtgatacagtacgcctcccaaggtagatatgaggtggcagtgcccctttgcaaacaggcgctggaggatctggaaaaaacaagcgggcacgatcacccagatgtggccacaatgctgaatattcttgccttggtttaccgggaccaaaataagtacaaagatgctgcaaacttgctcaacgatgcactcgctataagagaaaagaccctggggaaagatcaccctgccgttgcagctacattgaataacctggccgtcctgtatggcaagagaggcaagtataaggaggcagagcctctgtgcaaaagagctctggaaatccgcgagaaggttcttgggaaggatcatccagacgtcgcaaagcagctgaacaatctggccctgttgtgccagaaccaaggaaaatatgaggaagtggagtattattatcagagggccctggagatataccagaccaagttaggtcccgacgacccaaacgtggctaagaccaagaacaacctggcgagctgctatctcaagcaagggaagtttaaacaggcggaaactctgtacaaggagatccttacacgagcacatgagcgcgagtttgggtcagtcgacgatgaaaacaaacctatctggatgcatgcagaggagagagaggagtgtaagggtaagcagaaggacgggactagcttcggtgagtacggcggttggtacaaagcctgcaaggtggactctccaacggttactacaaccttgaagaatctgggagcgctgtatagaagacagggcaaattcgaagctgctgagaccctcgaggaggctgcaatgcgctcacgaaagcaggggctcgacaatgtgcacaagcaacgagtggccgaagtacttaacgatcctgagaatatggagaagaggagatcaagagagtccctgaatgtggacgtagtgaagtatgagtctggtcccgacgggggtgaggaggtgtctatgtccgtggaatggaacgggatgaggaaaatgaagcttggcttggttaactag

SEQ ID NO: 227917 - DNA, 1755 bp, synthetic construct
  misc_feature 1..1755: note = Description of Artificial Sequence: Synthetic coding sequence
  source 1..1755: mol_type = other DNA
atgtacgataatatgagtaccatggtctacatcaaggaagacaagctggagaaactgactcaagatgaaattatttccaaaactaagcaagtgatccagggtctggaagctctgaaaaacgagcataacagcatcctgcaaagtctgttggaaacattaaagtgtcttaaaaaagatgatgagtccaacttagtggaggagaagagcaacatgattcgaaaatcactagagatgctcgaactggggttgagcgaagctcaggttatgatggcattaagcaaccacctgaacgcagtggaatccgagaaacagaagctgcgggctcaggtgcgccgactgtgtcaggagaatcaatggctcagggatgaactcgcaaacacccagcaaaagttgcagaaatctgaacagtcagtggcgcagttagaagaagaaaagaagcatctggagtttatgaaccagttgaagaagtacgacgatgatatctctccatccgaagataaagatacagacagtaccaaggaacccctcgacgatctctttccaaatgacgaagatgaccctggccaaggtattcagcagcagcattcttctgcggcagccgctgctcagcaaggaggctacgaaatcccggctcgcttacgaaccttacataatctagtgatccaatacgccagccaggggagatatgaggtcgcagtgccattatgcaagcaggcgctggaagacttagagaaaacatctggccacgatcatcccgatgtcgccaccatgttaaatatccttgcacttgtctaccgtgatcagaacaagtataaagacgctgccaatttgctgaatgatgccttagccatccgggaaaaaactttaggaaaggaccaccccgctgtggcagccaccttaaacaacctggctgtcctgtatggaaaacgcggtaagtacaaggaggccgagccactctgcaagcgagctctggaaatccgtgaaaaagtgctggggaaagatcaccctgatgtggccaagcagctcaacaatttagcattactctgtcagaatcaagggaaatacgaagaagtcgagtattactatcagcgcgcactggagatttaccaaaccaagctcgggcctgacgatccaaatgtggccaagactaaaaataacttggcatcttgctatctcaaacagggtaagtttaaacaagccgagaccctgtataaggaaatccttacaagggctcatgagcgcgagttcgggagcgtcgacgacgagaataagccgatttggatgcacgcagaggagagggaggaatgcaaaggtaagcaaaaagatggcacatcttttggagaatatggaggctggtataaggcctgcaaggtggattctcctactgtgacaaccaccctaaaaaatctgggtgccctgtaccggagacagggcaaatttgaggcagccgaaacactagaggaagcggcaatgcggagccgcaaacaggggctggataatgtccacaaacagcgtgtcgccgaggtcctcaatgacccagagaacatggagaaacgacggagccgggagtctctgaacgtggacgttgtcaagtacgagtccggtcctgacggtggggaggagatgaaaagggcatcctcgcttaatgtgctcaatgtgggcggaaaggcggctgaggacaggttccaagagcggaataactgtctcgcagacagccgcgcactgagcgcctcacataccgatcttgctcattag

SEQ ID NO: 227918 - DNA, 1857 bp, synthetic construct
  misc_feature 1..1857: note = Description of Artificial Sequence: Synthetic coding sequence
  source 1..1857: mol_type = other DNA
atgtacgataatatgtcaacgatggtatacattaaagaggataaactcgaaaagctgacacaagatgaaattatctctaagacaaagcaggtgatccaaggcttggaagccctgaagaacgagcacaattcaatactgcagagcctcctggaaacattaaagtgccttaagaaagatgacgaatccaatttggtagaggagaagtcaaatatgatcagaaagtcattggaaatgctcgaactgggcctttctgaggcccaggtgatgatggccctatccaaccaccttaatgcagtagaatcggaaaaacagaagttacgcgctcaggtcagacgactgtgtcaagagaatcagtggctgcgggatgaacttgccaacactcagcagaagctgcagaaaagtgagcagtccgtcgcccagttggaagaggaaaaaaaacacttggagtttatgaaccagctcaaaaagtatgatgatgatatttccccatccgaagacaaggacaccgacagcacaaaggaacccctggacgacttgtttccaaacgacgaggacgaccctgggcagggtattcagcagcagcactccagcgctgctgcagctgctcagcagggcggatacgaaatcccagcaaggctcagaactctgcacaatctcgttatccaatatgccagccaaggcagatacgaagtggccgttccactatgcaaacaggctctggaggatctcgaaaaaacttcaggacacgatcaccccgatgtggcgacgatgctcaatattttggcccttgtctacagagatcagaataagtacaaggatgcagccaacctcctcaacgacgcactggcaattcgcgagaaaactctaggaaaagatcaccctgctgtcgcagcaactctgaacaaccttgccgtgctttacggcaagcgcggtaagtacaaggaggcagagccactttgcaagcgagccctcgagatcagggaaaaggtgctgggtaaggaccaccctgacgtggctaaacagctgaacaatctagctctgttgtgccagaaccaggggaaatacgaggaagtggaatactactaccagagagccctcgaaatataccaaaccaagttgggtcctgatgacccgaatgtggccaagaccaaaaacaacctcgccagctgctatttgaaacaggggaaattcaaacaggccgaaaccctgtacaaagaaatattgacacgcgcacacgaaagagaattcggatcagtcgacgacgagaacaagccaatatggatgcacgccgaggagcgtgaggagtgtaaaggcaagcagaaggatggaacgagctttggcgagtacgggggttggtataaggcttgtaaggtcgattcccccaccgtcacgaccactctaaagaatctgggcgctctatacaggaggcagggtaaatttgaagcagcagagactcttgaagaggccgcaatgagaagccggaagcagggattagataatgtgcacaagcagcgagttgcagaggttctgaacgatcctgaaaacatggaaaaacggcgatcgcgtgaaagtctcaatgtggatgtagtgaagtacgagagcggacctgacggtggagaggaagtgtccatgagcgtggaatggaacggagacgggactggatccctcaagaggtctgggagcttctccaagctgcgtgcctcaatccggaggtcatctgagaaactggttagaaagctcaaaggagggtcaagccgggagtcagagcctaagaaccccggagcatcgctggcagaaccactcttcgtggaaaacgattcatcatcatccggtctggaagacgctaccgctaattag

SEQ ID NO: 227919 - DNA, 1683 bp, synthetic construct
  misc_feature 1..1683: note = Description of Artificial Sequence: Synthetic coding sequence
  source 1..1683: mol_type = other DNA
atgtacgacaatatgtccacgatggtgtacataaaggaagataagctcgagaagctgacacaggatgagattatatcaaagactaaacaggtgatccagggtctggaggctcttaagaacgaacataatagcatcttacagtcactgctggaaaccctgaaatgcctgaaaaaagatgacgaaagcaacctggtggaagaaaagtccaatatgatacgaaaatctctggaaatgctagaactgggcctgtctgaggcccaggtgatgatggcactttcgaatcacttgaacgcggtcgagagtgaaaagcagaaacttcgcgctcaggtaaggcgactgtgccaggaaaaccagtggctccgagatgaactcgcaaacacccagcaaaagcttcagaaatctgagcaaagtgtggcccagctcgaggaagagaaaaagcacttagagttcatgaatcaactcaaaaaatacgatgatgatatctccccctccgaggacaaggacactgattctacgaaagagccattggacgatctgttccccaacgatgaggacgatcccggacagggcatccaacaacagcacagttctgccgctgcagctgcacaacagggagggtacgaaattccagctcgcctccggaccctgcacaatttggtcatccagtatgcatctcaaggccgatacgaagtggctgtgccactctgtaagcaagccttggaagacctggagaagacttctgggcacgaccacccagatgtcgccacgatgctgaacattctggccctggtctatagggatcagaataagtacaaggatgccgctaacttgctgaacgatgcactggccattcgcgagaaaactttggggaaagatcacccagcggtggccgctaccctgaacaatcttgccgtgctttatggcaagaggggaaagtacaaggaggccgaacccctgtgtaagagggccctcgagatacgtgagaaagtcctcggaaaggaccatcccgatgtggccaagcagctgaacaatctggcccttctctgccagaaccagggcaaatatgaggaagtggaatactattatcagagagcgcttgagatctaccaaaccaagctgggcccagacgacccgaacgtggctaaaacgaagaacaacctagcgagttgttatctgaaacaaggcaaatttaagcaggccgagacactgtacaaggagatccttactagggcacacgaaagggagttcgggtccgtggatgacgagaataaaccaatttggatgcatgccgaggaaagggaggagtgcaaggggaaacagaaagatggtacctcttttggcgagtatggtggatggtacaaggcttgtaaggtggactcaccaacggtgacaacaactctgaagaaccttggcgcactatacaggcggcagggcaagttcgaagcggcagagacactggaagaagccgctatgcgtagtcgcaagcagggactggataacgtgcacaaacagagagttgcggaggtgttgaacgatcccgaaaacatggagaagaggcgctcacgagagagtctcaatgtggatgtggtcaagtacgaaagcggtcctgacggtggcgaagaagtttccatgtctgttgaatggaacggcatgagaaagatgaaactgggtctcgtcaattag

SEQ ID NO: 227920 - DNA, 396 bp, synthetic construct
  misc_feature 1..396: note = Description of Artificial Sequence: Synthetic coding sequence
  source 1..396: mol_type = other DNA
taggagaataaaccgatctggatgcacgcagaagagagagaagaatgtaaagggaaacagaaggacgggacatcatttggagagtatgggggatggtataaagcgtgtaaagtggactctccaactgttacaaccacccttaagaaccttggtgccctgtatagaaggcaggggaaattcgaggcggctgagacattagaggaagcggcaatgcggtcccggaaacagggtctggataatgtgcacaagcagcgggtggctgaggttcttaatgatccagagaatatggagaagcgaaggtctagggaatctctgaacgttgacgtggtgaagtacgaatcgggaccggacggcggtgaggaaatgagaaagatgaagttgggtcttgtcaattag

SEQ ID NO: 227921 - DNA, 1893 bp, synthetic construct
  misc_feature 1..1893: note = Description of Artificial Sequence: Synthetic coding sequence
  source 1..1893: mol_type = other DNA
atgtatgataatatgagcacaatggtgtacattaaggaagataagctggaaaaactgacccaagatgagatcattagcaagacaaagcaggtcatccaggggttagaggctttaaaaaacgagcataatagcattcttcagagccttctggagacccttaaatgtctgaaaaaagatgatgagagcaacctggtcgaggaaaagtcgaacatgatacggaaaagccttgaaatgctggagctgggcttatctgaagctcaggtgatgatggcactgagcaatcacttgaatgccgttgaaagcgagaaacagaagctgcgcgcacaggttagaaggctatgtcaggagaatcagtggctccgcgacgagctcgccaacacccagcagaagttacagaaatctgaacagtccgttgcacagcttgaggaagaaaaaaaacacctagagtttatgaaccagctgaagaaatatgatgatgacatctctcccagtgaggacaaagataccgattcaaccaaggaacccctggacgatctgtttcctaacgacgaagatgacccagggcagggcatccaacagcaacatagcagcgccgcagcagctgctcagcagggcggatatgagatcccagccaggcttcgaactcttcacaatctggtgatacagtatgcttcccagggcaggtacgaagtggcggtgcccctttgtaaacaggcactcgaggatctggaaaaaacgagcggacacgatcaccccgatgtggccactatgctcaatatcctggcccttgtgtaccgggaccagaataagtataaggatgccgctaatcttctgaacgatgccctcgcaattcgggagaagacactgggtaaggatcacccagccgtagccgctactctgaacaacctggccgttctttacggaaagagaggaaaatataaggaggctgaacctctgtgcaagagagcactggaaatcagggaaaaagtccttggtaaagaccatcctgacgttgccaaacagctgaacaatctggctttactgtgtcagaaccagggcaagtacgaggaggtcgagtattactaccaacgagctcttgagatatatcaaaccaagctgggccctgatgaccctaatgtagctaagaccaagaacaatcttgcaagctgttaccttaagcaaggcaagtttaagcaagccgagactttatataaggagatccttacaagagcacatgagcgggagtttgggtcagtggatgatgagaacaaaccgatttggatgcacgcagaagagagggaggagtgcaagggcaaacaaaaagacgggacaagcttcggagagtatgggggttggtacaaggcctgcaaggtcgactcacccacggtgacgaccaccctgaagaatctgggcgcattgtataggagacagggcaaatttgaggctgcagagaccctcgaagaagccgctatgcgcagcaggaagcaggggctcgataacgtgcacaaacagagagtcgccgaggtgcttaatgatccggaaaacatggaaaaaagaaggtcccgcgagagcctgaatgtcgatgtggtgaagtatgagagtggacctgatggaggtgaagaagatggcactggcagcttgaaacgttccgggtccttctcaaaacttcgggcatccattcgaagatcttcagaaaagcttgtcaggaagttaaaaggcggtagctcaagggaaagcgagccaaagaatcccggaatgaagagagcgtcatccttaaatgtcctgaacgtagggggaaaagccgcagaagatcgattccaaggtgtctcaggacgggcatctttttgtggcaaaaggcaacagcagcaatggcccggtagaagacacaggtag

SEQ ID NO: 227922 - DNA, 453 bp, synthetic construct
  misc_feature 1..453: note = Description of Artificial Sequence: Synthetic coding sequence
  source 1..453: mol_type = other DNA
atgtatgataacatgagtactatggtctacatcaaggaagataagttggaaaaactgacccaggatgagatcattagcaagaccaagcaagttatccagggtttagaagctttaaaaaatgagcataattccattttgcaatcactcttggagactttgaaatgtctcaaaaaagatgatgagtctaatttggtggaggaaaaatcaaatatgatccgcaaatcattggagatgttggagctgggtttgagcgaagcacaggtcatgatggcacttagtaatcacttgaatgcggttgagagcgagaaacagaaactgagagcccaagtgaggaggctgtgtcaggaaaaccaatggctccgggatgagctggccaatactcagcagaaattacagaagtcagaacagtccgtagcccaattggaggaggagaagaagcatttggaattctag

SEQ ID NO: 227923 - DNA, 1695 bp, synthetic construct
  misc_feature 1..1695: note = Description of Artificial Sequence: Synthetic coding sequence
  source 1..1695: mol_type = other DNA
atgtatgataatatgagtactatggtttatatcaaggaggataaactggagaagctaacacaggacgagattatctccaaaaccaaacaagtgatccaaggtcttgaggcactcaaaaacgagcataactcaattcttcagagcttactggagaccctcaaatgcctcaagaaggacgacgaatccaacctagtggaggagaagtccaacatgattagaaaaagtctggagatgttagagttaggccttagtgaagcacaagtgatgatggcactgtcaaaccatttaaacgcggtggagtcagagaagcaaaaactcagggcacaggtgagacgattatgtcaggaaaaccagtggctgagagacgaattggcaaacacgcagcagaagctccagaaatccgaacagtccgtcgcccagctcgaggaagagaagaagcatctggagtttatgaaccagcttaagaagtacgacgatgacataagcccttcggaggacaaagatactgacagcaccaaagaacctttggacgacttgttcccaaatgatgaggacgatcccggacagggcatccagcagcaacacagcagtgcggcagcagccgctcagcaaggtggctacgagatccctgcgaggctgcgcaccctccacaacctggttatacagtatgctagccagggcaggtatgaagtggcagtgcccctgtgtaaacaggccctcgaggatttggaaaagacttctggacacgatcatcctgacgtcgctacaatgttaaatattctcgcgttggtctaccgggatcagaataagtacaaagatgccgcaaacctgcttaacgatgcccttgctatcagagagaaaactctgggtaaggaccatcccgctgtggctgccacgttgaataacctcgccgtattgtatgggaagaggggaaaatacaaggaggcggaacctctatgcaagcgcgcattagagatcagggaaaaggtcctaggtaaggaccaccccgatgtcgcaaaacagctcaataacctcgcattgctctgccaaaatcagggaaaatatgaggaagtggagtattattatcagagggccctggagatttatcagaccaaactgggccctgatgaccccaacgtggccaagacaaaaaataatcttgcctcttgctatctcaaacagggtaagtttaaacaagctgagaccctgtacaaggaaatcctgactcgcgcacatgaacgggaattcggttcagtagatgatgagaataagcccatatggatgcatgcagaggagcgtgaagagtgcaagggaaagcagaaggatggcactagtttcggcgagtatggcggttggtacaaggcttgcaaagtggattcaccgactgttacaacaacccttaaaaaccttggagccttatatcgaaggcaggggaaatttgaggcagctgagactcttgaagaagcagctatgcgatctagaaagcaaggccttgataacgtacataaacagagggttgcagaggtactcaacgaccctgaaaatatggaaaagagacgttcgcgggagtcgctgaatgtggatgtcgtcaagtatgagagcgggcctgacggaggagaagagggtgtaagcggccgtgcaagcttctgtggcaagcggcagcaacagcagtggccgggacgtcgccatagatag

SEQ ID NO: 227924 - DNA, 1869 bp, synthetic construct
  misc_feature 1..1869: note = Description of Artificial Sequence: Synthetic coding sequence
  source 1..1869: mol_type = other DNA
atggccatgatggtgtttcccagggaggagaaactgagccaagacgaaatcgttttgggaaccaaggcagttatccagggtttagaaacactgcgcggagaacaccgggcactcctggccccactcgtggcccctgaggcaggcgaggctgagccaggaagtcaggaaaggtgcattctgctgagacgctccctggaagctatcgaattgggcctcggggaggcacaggtgatccttgccctgagcagccatttaggagccgtggaatctgaaaaacagaagctccgcgctcaagtacggcgtcttgtgcaggaaaatcaatggctgcgagaagagctggccggtactcaacagaagcttcaaaggtctgaacaagctgtggcccagctcgaggaggagaaacagcaccttctatttatgtcacagatcagaaagctggacgaggatgccagcccaaacgaagaaaagggagacgtgcccaaggacacactcgatgatttatttccaaatgaagatgaacagagcccagccccaagcccaggtggcggagatgtgagtggtcagcatggcggttatgaaatccccgcacgactaaggactctgcataacttggtgattcaatacgcttctcaaggacgctacgaagtggccgtgcccctgtgcaaacaggctctggaggacttggaaaagacgtccggtcatgatcacccagacgtggctaccatgcttaatattctcgctttggtgtatagagatcaaaacaagtataaggaagcggctcacctccttaacgatgccttagcaattagagaaaagacactgggaaaggatcatccagcagtcgccgctacgctgaacaatctggctgttttatacggtaaaagagggaagtataaagaggcggagcccttgtgcaagcgcgctttggaaattagagaaaaagtacttggaaagttccaccctgacgtggcgaaacagctttccaatctcgcgttgctgtgtcagaaccaggggaaagcagaggaggtagagtattactaccgacgggctctggagatatatgccactcgcttgggacccgatgatccaaacgtcgctaaaactaagaataatctagccagttgctatctgaaacagggcaaatatcaggacgcagaaacattgtataaggagattctgacacgcgcacatgaaaaggaatttgggagcgtgaacggggataacaagccgatttggatgcacgctgaggaaagggaggaaagcaaggataagcgaagagatagtgctccttatggcgagtacggtagttggtataaagcttgtaaagtggactctcctacagtgaataccacattacggtcactcggtgcgctataccgtcggcagggaaagctcgaggcagcccacactctggaggattgcgcttctaggaacaggaagcaggggctagacccggcttcccagacaaaggtggtcgagctcctcaaggatggcagcggcagacgcggtgataggagaagtagcagagatatggctggcggagctggcccacgctcagagtctgatctcgaagatgttgggccaacggccgaatggaacggagatgggtctgggagcttgcgacgctctgggtcgtttggaaaactaagagatgctcttagaaggagttcggagatgttagttaagaaattgcaggggggtacgccccaggaaccaccaaaccccaggatgaagagagccagctcgttgaacttcttaaacaagtctgttgaggaacccactcagccgggtgggacaggtttgagtgattcccgtaccctgtccagtagttccatggatctgagccggagaagtagtctggtggggtag

SEQ ID NO: 227925 - DNA, 1638 bp, synthetic construct
  misc_feature 1..1638: note = Description of Artificial Sequence: Synthetic coding sequence
  source 1..1638: mol_type = other DNA
atggctatgatggtttttcccagagaggagaagctctcccaggacgaaatagttctcggaaccaaagccgtgatacaagggctcgagactctgcgcggtgaacatagagctctgttggctcccctcgtggctcccgaggccggtgaggccgagccaggttcccaggagcgctgtatcctgctgcggagatctctggaggccatagagctcgggttaggggaggcccaggaggagaagggcgatgtgcctaaagatacactcgacgatctctttcctaatgaggacgagcagtccccggcaccaagccctggaggaggagacgtatcaggacaacatggcggttacgaaatacctgcccgtcttaggactcttcacaacctggtcattcagtacgcgtcccaaggtagatatgaggttgccgttccactgtgcaagcaagcgctagaggacttagaaaaaacatcaggacacgatcacccggacgtggctaccatgctgaatatccttgcactggtttaccgagatcagaataaatacaaggaggccgcacaccttcttaatgatgcgctagccatacgcgaaaagactttgggtaaggaccacccagccgtggctgcaacattaaataacctggcggtcttgtacggcaagcgcggtaagtataaagaagccgaaccactgtgcaagcgggcactggagattcgggaaaaggtcttagggaaattccaccccgatgtggcaaaacagctgagtaatctggctctgctatgccaaaatcaaggcaaggccgaggaggttgagtattattatcgacgagccttagaaatttacgccaccagactgggtcccgatgatccgaacgtggcaaagacaaagaacaaccttgcatcatgctacctaaagcaagggaaataccaagatgctgagacgctatataaagaaatcctgaccagagcacacgagaaggaatttggctctgtgaacggcgataataagcccatctggatgcatgctgaggagcgcgaggagagcaaggataaaaggcgggatagcgctccgtacggagagtacggctcatggtataaagcttgtaaggtggattcgcctaccgtgaatacaacactacgttccctgggggctctataccgccgtcagggtaaactagaggcggcacacacgctggaagattgtgcttcccgtaaccgcaagcagggactggacccagcttcccagaccaaagttgtggagctcctcaaggatggttcaggcaggaggggggatcgccgttcctccagggacatggcaggcggagccggaccacgtagcgaatctgatctcgaggacgtgggccctacggccgagtggaacggtgatggtagtggctcgctgaggaggagcggcagcttcgggaaactaagagacgccttgcggcgatccagcgagatgctggtcaagaaacttcaaggaggtacaccacaggagcctcctaaccccagaatgaaaagggcctcatcacttaactttttaaataaaagcgttgaggagcccacccagcccggtggtactggattaagcgattcgaggaccctcagttcatcgtctatggacctaagtcgcaggagctcgttagtggggtag

SEQ ID NO: 227926 - DNA, 1869 bp, synthetic construct
  misc_feature 1..1869: note = Description of Artificial Sequence: Synthetic coding sequence
  source 1..1869: mol_type = other DNA
atggccatgatggtgtttccccgtgaggaaaagttatcacaagacgagatcgttctgggaaccaaggcagtcatacagggtttagaaacccttcgcggtgagcatagagcgctactggcgcctttagtagccccagaggcaggcgaggcggaacctggcagccaggagcgctgtattctcctccgacgctcactcgaggcaatcgagctcggcctcggggaagcacaggtcatccttgcactaagctctcacctgggggctgtcgagtctgagaaacagaaactgagagcccaggttcggagactcgtgcaggagaaccagtggctgagagaggagttggccggtacccagcagaagctccaaagaagtgagcaagcagtggcccagttggaagaagaaaaacaacatctgctttttatgtctcagattcgcaagctcgacgaggacgcctcgccgaatgaggaaaagggtgatgtccccaaagatacactggacgacctgttcccaaatgaagacgaacagtccccagcaccatcaccagggggaggggacgtgtccggccagcatggcggatacgagattccagcccgtttgcgtaccctgcataatttagtgatacagtacgcttcccagggaagatatgaggtcgctgtccccttgtgcaagcaggccctggaggacctcgaaaagaccagcggacacgaccatccggatgtggctactatgctgaatatcttagccctggtttaccgcgatcagaataaatataaggaagcagctcatctgttaaacgatgctctggctattcgagagaagactctcggtaaagaccaccctgcggtcgccgctacattaaataatctagcagttctgtatggcaagcgcggaaaatataaagaggccgagcctttgtgtaaaagagcccttgaaattcgagagaaggtgctcggcaaattccaccccgatgtcgctaagcagttgtccaacctggcccttctttgccaaaatcagggcaaggcggaggaagtggagtattattataggagggcccttgagatttacgccacccgcctggggccagatgaccccaacgtggcgaagacgaagaataacctggctagttgttatctgaagcagggaaagtaccaagacgctgagacactatataaagagatcctgacccgcgctcacgagaaagaatttggcagcgtgaatggagataataagccaatttggatgcacgccgaagaacgcgaagagagtaaggataagaggcgagattcggcaccctacggagagtacggaagttggtataaagcctgcaaggtcgatagccctaccgtaaatactacgttaaggtccctgggtgcgctttaccgccgtcagggtaagctggaggcagctcataccctggaagactgtgcttcaaggaatcggaagcagggattggatccggcatcccagacaaaggtggtggaactcctgaaggacgggagtggccgtcgcggagaccgcaggagcagtcgcgatatggcagggggtgccggtcccagatccgagtccgacctggaggacgtaggacccactgcagagtggaacggtgatggttctggtagtctgcggagatcagggtctttcgggaaactcagagatgccctgcggaggtcttctgagatgctcgtgaaaaagctccaggggggaactccacaggagcctcctaaccccaggatgaagagggccagctctttgaacttcctaaataagagcgttgaggaaccgactcaacctggagggacgggtctgtcagactcccgcaccctgtcatccagcagcatggatctttccagaagatctagcctggttgggtag

SEQ ID NO: 227927 - DNA, 1869 bp, synthetic construct
  misc_feature 1..1869: note = Description of Artificial Sequence: Synthetic coding sequence
  source 1..1869: mol_type = other DNA
atggcgatgatggtgttcccaagagaggagaaactgtctcaagacgagattgtgctgggcacaaaagcagtcatccagggattggagactctgcgcggagagcacagggctctgttggcacctctggttgctccggaggccggtgaagcagagcccggaagtcaagagcggtgtattcttctgagaaggagcctggaagcaatcgaactgggactgggcgaggctcaggtaattctagcccttagttcccatctaggggcagtagaatccgagaaacagaagctcagagcacaggtgagaaggctggtccaagaaaatcagtggttaagggaggaactcgccggaacacagcagaagctccagaggtcagagcaggcagtcgcccaactcgaagaggagaagcagcacctgctgttcatgtcacagattcgaaagctcgacgaagatgcgagcccaaatgaagagaagggagacgtcccaaaggacaccctggacgacctgttccctaatgaggacgagcagtctcctgcgccatcccctggcggtggggacgtctctggacagcacgggggatacgagatccccgcaagactcagaaccctgcacaatctagttatacagtacgccagccaagggaggtacgaggtggctgtacccctgtgcaaacaggcgctcgaggatctagagaaaacaagtgggcatgatcatccagacgtcgctaccatgctgaatatcttggccttggtctaccgcgatcaaaataaatacaaggaggcagcacacctgctgaatgatgctctcgccattagagaaaaaacactaggtaaggatcatccggctgtggctgccactctaaataatcttgccgtactgtacggtaagcggggtaagtataaggaggcagaacccctctgcaaaagggctttagagatacgcgagaaggtgcttggaaagtttcaccctgacgttgccaaacaactttccaatttagcactgctgtgccaaaaccaggggaaggcagaagaggttgaatactattatcgacgtgcacttgaaatctacgcaacaaggctcggtcccgacgacccaaatgtagccaaaactaaaaacaatctggccagctgctatctgaaacagggaaagtatcaggacgcggagacactgtacaaggaaattctcacgcgcgcacacgaaaaagaattcggatccgtcaatggtgataacaaacccatctggatgcacgctgaggagagagaagaaagcaaggacaagcgacgggacagtgcaccctatggcgagtacgggtcgtggtacaaggcctgtaaagtggattcaccaacggtgaatacgactttaagatccctgggcgcactgtaccgccgacagggaaaattggaagctgcacacaccctcgaggattgcgcaagtaggaacaggaagcagggcctggaccccgcttcccagacaaaagtagtagagcttctgaaggatgggtcgggacgaagaggcgatcggcgatcctcgcgtgacatggctgggggagccggacccaggtcggaatctgacctggaagatgtgggacccacagcagagtggaatggggacggatccggcagtcttcgccgttctggatcattcggtaagctccgtgacgcattaaggagaagcagcgagatgctggtgaagaaattgcaggggggaacaccccaagagcctcctaaccctcggatgaagcgcgctagtagcctcaactttctgaacaagagcgttgaggaacccactcaaccaggcggaacaggactgtcagactccaggacactttcaagcagctccatggacctgtctagacgaagtagcctggtcggctag

SEQ ID NO: 227928 - DNA, 1638 bp, synthetic construct
  misc_feature 1..1638: note = Description of Artificial Sequence: Synthetic coding sequence
  source 1..1638: mol_type = other DNA
atggccatgatggtgttcccaagggaggagaagttgtcacaggacgaaattgtactagggactaaggcagtgatccaaggcctggagactctgaggggtgaacacagagcgctgcttgcccctcttgttgccccagaggccggtgaagctgagccgggatcgcaggagagatgtatattgctgagaaggtccctggaagccatagagctcgggctgggggaggcgcaggaggagaagggcgacgtgcctaaagacacgctggatgacttgttccctaacgaagatgagcagagtccagccccttcacctgggggaggcgacgtcagcggccagcacggcggatatgaaatccctgcccgacttagaacactccataatctggttattcagtacgcctctcaggggcgatacgaggtggcggtgccactgtgcaaacaggccctggaagacctggagaagacatcagggcatgatcaccctgatgtcgccaccatgctgaacatactggccttagtgtaccgggatcagaacaagtacaaggaagccgctcacctcctgaatgatgcactcgccattcgggagaagacactgggaaaggatcaccctgcagtggctgcaacactgaacaatctagccgtgctttatggcaagcggggaaaatacaaggaggccgaacccctgtgcaaacgcgctctggagatccgggaaaaagtcctaggcaagtttcacccagacgttgcaaaacagttgagtaacttggccctcctttgtcagaatcagggcaaggcggaagaagttgaatactactacaggcgcgctctggagatatatgccacgcgtctgggtcccgacgatccaaacgtggctaaaaccaaaaataatcttgctagctgctatttaaagcagggaaaataccaggatgctgagaccttgtacaaagagatcttaacaagagcccatgagaaagaatttggcagcgtcaacggagacaacaaacctatttggatgcatgccgaagagcgcgaggaatctaaagacaagcgaagagacagcgctccttacggcgagtacggcagttggtacaaggcttgcaaggtcgattctccgaccgtgaacacgacactgcggtcccttggcgctctgtaccggaggcaagggaaactggaggcggctcatacactggaggattgcgctagcagaaacaggaagcaggggctggatccggcttctcagacaaaggtagtcgagcttctaaaggacggctcgggcagaagaggcgacaggcgaagttccagggatatggcgggaggcgctgggcctcgttccgagagtgatctcgaagacgtaggccctaccgccgagtggaatggtgatggatctggatccctgcgcagaagcggctcatttggaaagctgcgcgatgctctgagacggtcctctgagatgctagtgaagaaactgcagggcggtaccccccaggaacccccaaacccaagaatgaagcgagcttctagcctcaattttctcaacaaatccgttgaggagcctacgcaacccggtggtaccgggctgagcgacagtcgaacactttcttcgtcgtccatggatctttcccgcaggtctagcctggttggctag

SEQ ID NO: 227929 - DNA, 501 bp, synthetic construct
  misc_feature 1..501: note = Description of Artificial Sequence: Synthetic coding sequence
  source 1..501: mol_type = other DNA
atggcaatgatggtgttcccacgcgaggagaagctaagtcaggatgagatcgtgctagggaccaaggccgtaatccaaggccttgaaacacttaggggcgagcaccgtgctctgctcgcacctctcgtggcacctgaagctggggaagctgaacccggaagtcaggagagatgcatccttttgagaagatctttagaggccatcgaactcggcttgggagaagcacaggtgattctggctctgagcagccatcttggagctgttgagtcagagaagcagaagttgcgggctcaggtccgacgactcgtacaggaaaaccagtggctgcgcgaggagcttgccggaactcagcagaagttgcaacggagcgaacaggccgtggcgcagctggaagaggagaagcagcacctgctgtttatgtcacagatcagaaaactagatgaggatgcatctcccaatgaggagaagggcgatgtccccaaagacacattggacgattag

SEQ ID NO: 227930 - DNA, 570 bp, synthetic construct
  misc_feature 1..570: note = Description of Artificial Sequence: Synthetic coding sequence
  source 1..570: mol_type = other DNA
atggccatgatggtgtttcccagggaggaaaaactctcacaggatgaaattgtcctcggtactaaagctgtcatccaaggtttagagaccctgaggggggagcacagggctctcctggcccctcttgtggcacctgaagccggagaagcagagccaggttctcaagagcgatgcatccttctacggcgttcactggaagcaatcgagctcggccttggtgaagctcaggaggagaagggagatgtgcctaaggacacattggatgacctgttcccgaatgaagacgagcagagcccggcaccctctcctgggggtggggatgtcagcggtcagcacggtggttacgagattccggctaggttgcgaactttgcacaatctggtgattcagtatgcttcccaggggcgttacgaggtggctgtcccactctgcaagcaagccttagaggatctcgaaaaaacatctggtcatgaccatcctgacgtggcgacaatgctgaatattctggctctggtgtatcgggatcagaataaatataaggaggccgctcatctgctcaatgacgcttag

SEQ ID NO: 227931 - DNA, 516 bp, synthetic construct
  misc_feature 1..516: note = Description of Artificial Sequence: Synthetic coding sequence
  source 1..516: mol_type = other DNA
atggccatgatggtcttccccagagaagagaagctctcccaagacgagatagttctgggaacgaaggccgtgatacagggtctggagactctccgcggtgaacatagggcactcttggctcccctggtggccccagaagcaggggaggccgaaccaggctcccaagagcgctgtattctgctccggcgtagtcttgaagcaatcgagctcggactgggtgaagcccaggtgatcttagctctgtcttcgcatcttggcgctgtggaaagcgaaaaacagaagctgcgtgcccaggtgcgaagactcgtgcaagaaaaccaatggctcagggaggaattggccggaacgcaacaaaaactacagcggtccgaacaagctgttgcacagctagaagaggagaagcagcacctgctcttcatgagccagatcagaaaacttgatgaggacgcctcaccaaacgaagaaaaaggggatgtacccaaggacactctggacgatctattccctaatgaatag

SEQ ID NO: 227932 - DNA, 438 bp, synthetic construct
  misc_feature 1..438: note = Description of Artificial Sequence: Synthetic coding sequence
  source 1..438: mol_type = other DNA
atggcaatgatggtttttccacgtgaggagaagctaagccaggatgagatcgtgctcgggaccaaggcggtcattcagggcttggaaacactccgcggagaacacagggccctcctcgctccgctagtggctcctgaggctggagaggccgagcctggctctcaggagaggtgcattctgctccggaggagtctggaagctatagaactgggcctcggggaggcacaggtcatcctggcactgtccagccacctgggtgccgtcgaaagcgaaaaacagaaactcagagcccaggtgcggcgactggtacaagagaatcagtggctccgggaggaactggccggaactcagcagaaactgcagaggtccgagcaggcagtcgctcagctcgaggaagaaaagcagcatctgctgtttatgtcacagatacgaaagtag

SEQ ID NO: 227933 - DNA, 318 bp, synthetic construct
  misc_feature 1..318: note = Description of Artificial Sequence: Synthetic coding sequence
  source 1..318: mol_type = other DNA
atggcgatgatggtcttccctcgcgaggagaaactgtctcaggatgaaattgtgttagggaccaaggccgtaatccaggggttggagaccctccgtggcgagcatcgggctctccttgctccattagtagccccagaggccggtgaagctgagcccggttctcaagagcgctgtattttactgagaagatcacttgaagccatcgaactgggacttggagaagcccaggtgatcttggccctcagctctcacctaggcgctgtggaatccgagaagcagaaactgcgcgctcaggtgcggagattagtccaagaatag

SEQ ID NO: 227934 - DNA, 1515 bp, synthetic construct
  misc_feature 1..1515: note = Description of Artificial Sequence: Synthetic coding sequence
  source 1..1515: mol_type = other DNA
atgagcgtgcaggttgccgcacccggatcagccggtctgggccctgaaagactttcccccgaggagctggtgaggcagacaagacaggtcgtacagggcctcgaagcgctccgcgctgagcaccatgggctggccggacatttagccgaggccctcgcgggacagggcccagccgctggtctcgagatgcttgaggagaagcagcaggtcgtatctcacagtttagaagccatcgagctgggccttggggaggcacaggtacttcttgctctcagcgctcacgtgggggctctggaggcagaaaagcagcgcctcagatctcaggcccgtagactcgcccaggagaacgtgtggctccgggaggagttggaggagacccaacgccgtctgagggctagcgaagagtcggtcgctcaactggaagaggaaaagcggcatcttgaatttctgggacagctgagacagtacgatccccctgctgagtcacagcagtccgaatcgccccctcgacgcgactccctcgctagcttgttccccagcgaggaggaggagcggaaaggccctgaggcagccggagcggcagccgcacagcaaggcggttatgaaattccagctcgactgagaaccctgcataacttagttattcaatacgctggtcagggccgttacgaggtagctgtgcccttgtgtagacaggcccttgaggatcttgagcggtcttccggtcattgtcatccggatgtggccactatgttgaatattctggccctcgtgtatagagaccagaataagtacaaagaagccaccgatctgttgcatgacgcattgcagatcagggagcaaacccttggccctgagcatcctgccgtggcagccacccttaacaatttggctgtgctctatggcaagagaggaagatatagggaagctgagcctctatgccaacgagccctcgagatacgggagaaggtgctcggagccgatcatccagatgtggctaagcagctcaataatttagcactgctgtgtcagaaccagggtaagttcgaggatgtggaacgacactacgcaagggcactctcaatttatgaggcattaggcggaccccatgaccctaatgtagccaaaactaagaataatttagcttccgcatacctgaaacagaacaaataccaacaggctgaagagctttacaaggagatacttcataaggaggaccttcccgctccactcggagcccctaacacgggtaccgcaggagacgctgagcaggccctcaggagaagttcttccttgtctaaaatcagagaatcgatcagacggggtagcgagaagttggtttcccggcttcgaggggaggctgccgcaggcgctgccggaatgaagcgtgcaatgagcctgaacaccctgaatgttgacgcccctcgcgcacccggtacacagttcccaagctggcacctcgacaaggctccaagaacattgtctgccagcacccaagatctgagtccacattag

SEQ ID NO: 227935 - DNA, 1557 bp, synthetic construct
  misc_feature 1..1557: note = Description of Artificial Sequence: Synthetic coding sequence
  source 1..1557: mol_type = other DNA
atgatcccccagacaccccaccactgttctcccggtgctgcgatgagcgtgcaagtggccgctccaggcagcgccggtctgggcccagagagactatctcctgaggaactggtcagacagacaaggcaggtcgtgcagggtctcgaggcactccgggcagaacaccacggcctcgccggacatctagcggaggccctcgccggacagggccctgctgccggactggaaatgctggaggagaaacaacaggttgtgagtcacagccttgaggcaattgaactcggcttaggtgaagcccaggttctgctagccctgtccgcgcacgtgggagcgctcgaggctgagaagcaaagactgagaagccaggcgagaaggcttgcacaggaaaacgtgtggctccgtgaagaattggaggaaacacagaggagacttagggcctccgaggaatccgtggcgcaactcgaggaggagaagcgccatctggaattcttgggccagctcagacagtatgaccctccagcggagtcccagcagagcgagtcccctcccagacgtgactcactggcgagcctgttcccatccgaagaggaggaaaggaaaggacctgaagccgcaggagcagcggcagcgcagcaggggggttacgagatccctgctaggctgagaactctgcataaccttgtgattcagtatgcgggtcagggccgttacgaggttgcggtgcccttgtgtcggcaggcactcgaggacctggaaagaagtagtggccattgccatcccgacgtggctactatgttaaatattctcgctctcgtctacagagatcaaaataagtacaaggaggccactgacctactccacgatgccctccagatccgcgaacagacgctggggccagagcatcccgctgttgcagcaaccctgaataatctcgcggtcctgtacggaaaaagaggacgttaccgcgaagccgagcccctttgccaaagggctctagaaattcgggagaaagttctcggcgctgaccatccagatgtggctaagcaactgaacaatctcgcgctcttgtgccagaaccaggggaagtttgaagacgttgagagacattatgccagggccctgtccatctatgaagcccttggcggacctcatgatccaaatgtggcaaagacaaagaacaacttagcaagcgcctacttgaaacagaacaagtaccagcaagccgaagagctctacaaagagattctgcacaaagaagatttgccagcgcctctaggagcccctaacacaggcactgccggtgatgcggaacaggccttacgacgaagcagctctctatcaaagattcgggagagcattaggcgcggatctgaaaagttagtgtctcgccttagaggtgaagcagcagccggtgctgcagggatgaagcgagccatgtctcttaatactctgaacgtggatgctccccgtgcccctggcacgcaatttccaagctggcatctcgataaagcccctaggaccctgagcgcgtcgacgcaagatcttagcccacattag

SEQ ID NO: 227936 - DNA, 2379 bp, synthetic construct
  misc_feature 1..2379: note = Description of Artificial Sequence: Synthetic coding sequence
  source 1..2379: mol_type = other DNA
atgcaaggggaggatgccaggtatttgaaaaggaaagtgaaaggcggtaacatagacgttcacccctctgagaaggcactgatcgtgcattatgaagtagaagccaccatcctgggagaaatgggggacccaatgctgggtgagaggaaggagtgtcagaagatcatcaggctcaagagcttgaacgctaatacagatatcacatctttagcccgaaaggtcgtggaagaatgcaagctcatccatccatctaagcttaacgaggtcgagcagctactatactacctccagaaccgtcgcgattcccttagtggcaaagagaagaaggagaagtcttcaaaaccgaaagacccgccaccattcgaggggatggaaatcgatgaggtggctaacattaacgacatggatgaatatatcgaacttctgtacgaagacatccctgacaaggtcagaggtagcgcattgatactccagctcgcacggaaccctgataatctggaagaactgcttctcaatgagacagccctgggggctcttgctcgtgtgctaagggaggattggaagcagagcgtggagctggccacaaatatcatttatatatttttctgcttctcctcgtttagccagttccatgggttaattacacactacaagatcggtgctctttgtatgaacatcatcgaccacgagttgaagcgccacgaactgtggcaggaagagctgagcaaaaagaagaaagctgtggacgaggaccccgagaatcagaccctgagaaaggattatgagaaaacattcaaaaagtatcagggtctggtggtgaaacaggaacaactattacgggtcgcactttacctcctactcaacctggccgaggatacacgcacggagctgaagatgcgcaacaagaacatcgttcacatgcttgtgaaagcattagatcgtgataactttgagttgttaattctggttgtcagcttcttgaaaaagctgtctatctttatggaaaataagaatgacatggttgagatggacattgttgaaaaactcgtgaagatgattccctgtgaacatgaggatctgcttaacatcacattacgcctcctactaaatctgtcatttgatactgggttgcgaaacaagatggtgcaggtcggacttctgcctaaacttacagccctcctgggtaatgacaattacaagcagatcgctatgtgtgtgctttaccacatctcaatggacgacagattcaagagcatgtttgcatatacagactgtataccgcaactgatgaagatgctgtttgaatgtagcgacgaacgtattgatctggagctgataagcttttgtatcaacctggcggctaataaacgaaacgttcaactgatttgcgagggtaacggactgaaaatgctgatgaagagggctctgaaattcaaggatcctctacttatgaaaatgattaggaacattagccaacatgatggcccaaccaaaaatctctttatagattacgtgggggatctcgccgcacaaatcagtaacgatgaagaggaagagttcgtaatcgagtgcttggggaccttagccaatctgaccatccctgatctagactgggaattagtccttaaagagtataagctggttccctatttgaaggacaagctcaaaccaggcgctgccgaagatgatttagtgctggaagtcgttatcatgattgggaccgtatcgatggatgactcttgcgccgcattactggcaaaatctgggatcattcccgctctgatcgaactactgaatgcgcaacaggaagatgacgagttcgtgtgccagatcatttacgtgttttaccaaatggtttttcaccaggcaacgcgggacgtcatcatcaaggagacccaggctcccgcatacctaattgatttaatgcacgataagaataatgagatacgcaaagtgtgcgacaacacgcttgacatcatagctgaatacgacgaggaatgggccaaaaagatccagagcgaaaagtttaggtggcacaatagtcagtggctggaaatggtggagtctcgacagatggacgaatcagaacaatacctctatggcgacgatcgaattgagccatacattcacgaaggagacatcctcgaacgtcccgacctcttttataatagtgatggtctgatcgccagtgaaggagccatttctcccgatttctttaatgattaccatctgcaaaatggagacgttgtcgggcagcacagctttcctgggtctctaggcatggatggcttcggacagcccgtcggaatactggggcgaccggcaaccgcttacggattccgacccgacgaaccctattactacggctacggctcatag

SEQ ID NO: 227937 - DNA, 2259 bp, synthetic construct
  misc_feature 1..2259: note = Description of Artificial Sequence: Synthetic coding sequence
  source 1..2259: mol_type = other DNA
atgggggacccaatgcttggcgagcgtaaagaatgtcaaaaaatcattaggctaaaatcgttaaacgccaacacagacatcacatccttggctaggaaggtcgtggaagaatgtaaactcatccacccttctaagctcaatgaggtcgaacagctcctatattatctccagaaccgacgcgactctctctcaggaaaagagaagaaggagaagtcctccaagccaaaggaccctcctccttttgaaggcatggagatcgacgaagtagccaacattaacgacatggatgaatatatcgaactcttgtatgaggatataccagacaaagtgaggggtagcgccctgatcctccagctggctcgaaatccggacaatttggaggagctgctgctcaacgagactgccctgggtgccctcgctcgagtacttcgggaggactggaagcaatcagtggagctggccacaaacatcatctacatatttttctgttttagcagcttctcccagtttcacggactgatcacgcattacaaaatcggggctctgtgtatgaatatcatagaccatgagttaaagcggcatgagctctggcaagaggagctatctaagaagaagaaagcagttgatgaagaccctgagaatcaaacacttcgcaaagattatgagaaaacttttaagaaataccagggcctggtggtgaagcaggaacagctgctgagggtggctctgtaccttttgctgaacctagcagaggatactcgcactgaactcaaaatgaggaataaaaatatcgtgcacatgttagtgaaagcgctggaccgagataatttcgagctcctgatcctcgtggtctctttcctaaaaaagctttccatttttatggaaaacaaaaacgacatggtggaaatggatatagtcgagaagctggtcaagatgattccctgcgaacacgaggaccttcttaacattactctgcgcctgttattgaatctttcattcgacactgggcttagaaataagatggtgcaggttggtctgttgccgaagctcaccgccctgctaggaaacgataattataaacagattgcgatgtgcgtgctgtatcatattagtatggacgacaggttcaaaagtatgttcgcctacaccgattgcatccctcaactgatgaaaatgttattcgaatgttccgatgagaggattgacttggagctgatctccttttgtatcaacctggcggctaacaaacggaacgtgcaactgatctgtgaaggcaatggactaaagatgctgatgaagcgagccctgaaattcaaggacccactgctcatgaagatgattcgcaatatatctcagcatgatggcccaacaaaaaatctgttcatagattacgtgggcgacctcgcagcacagatctccaacgacgaagaggaagaatttgtcatagaatgtttgggaacattagccaatctgacaatccccgacttagattgggagctcgtcctgaaagaatataagctggtgccatacttaaaagacaaactaaagccgggagcggctgaggacgatttggtgcttgaagtggttataatgatcggtactgtgtcaatggatgactcctgcgcagccctgctcgcaaagtccggcatcatcccggctcttatcgagttgctgaatgcacagcaggaagacgacgagttcgtatgccaaattatctatgtgttctatcagatggtgtttcaccaggccacaagagatgtgatcataaaggaaacccaggcgccagcttatcttatagacctgatgcacgacaaaaataacgagatccggaaagtatgcgacaacactctggatataatcgccgagtacgacgaggagtgggctaagaaaattcagtccgagaagttcaggtggcacaactctcagtggcttgaaatggtggagtcaagacaaatggacgagtccgagcaatatctgtatggcgatgatcggatcgagccatatatacatgagggagacatcctcgagcgacccgacctcttttataatagcgacgggcttatcgcgtcagaaggtgccatctctcccgacttcttcaatgactaccatcttcagaacggggacgtcgtcggccagcactccttccctggcagccttgggatggatggcttcggccagcctgtgggcatcctgggacgccctgctacagcctatgggttcagacctgacgaaccatattattacgggtacggtagctag

SEQ ID NO: 227938 - DNA, 2247 bp, synthetic construct
  misc_feature 1..2247: note = Description of Artificial Sequence: Synthetic coding sequence
  source 1..2247: mol_type = other DNA
atgcaaggggaggatgcccgatacctgaaaagtattagactgaaatctttgaacgcaaataccgacatcacgagcctggcccgtaaggtggtggaagaatgtaagctgattcatccctccaagctgaacgaggttgaacagctcttatactatttgcagaatcgacgggacagtctctcaggaaaagagaagaaagagaagagctccaaaccaaaggatcctcccccttttgagggcatggaaattgacgaggtcgctaacatcaacgacatggacgagtacatcgagctgctctatgaagatattcctgacaaggtgcgcggtagcgcgctgatcttgcaactcgcaagaaacccagacaacttagaagaactgttgctgaatgagaccgcgttgggagcactggccagggtcctcagagaagactggaaacaatctgtcgagctcgctaccaacatcatttacatcttcttttgtttctcttcgttttcccagttccatggtttaataacgcactacaagatcggagcattatgcatgaatatcatagaccacgagttgaagcgtcatgagctgtggcaggaagaattgtctaaaaagaaaaaagccgttgatgaggaccctgaaaaccaaacacttcgtaaagattacgaaaagacattcaagaaatatcagggcctggtggtcaaacaggagcagttactgagggtggcattgtatctgctgttgaacttagccgaggacacacggacggaactgaagatgaggaataagaatatagttcacatgctcgtgaaggctctggaccgtgacaacttcgagctgctgattctggttgtgtcattccttaagaagttgagcatctttatggaaaataagaacgatatggtcgagatggacattgtggagaagctagtcaaaatgattccgtgcgaacatgaagatctgttgaatataaccctgagactcctgctgaacttgtccttcgacaccggactcaggaataagatggttcaggttggattgctgcctaagctcaccgccttgctggggaacgacaactacaagcaaatcgcaatgtgcgttctgtaccacatctcgatggatgaccgcttcaagagcatgtttgcttataccgactgcattcctcagctgatgaagatgttgttcgagtgttctgatgaaagaatcgatctagagctgatcagtttttgcatcaaccttgccgcaaacaagcggaacgttcagttgatctgtgagggcaacggcttgaaaatgcttatgaaaagggcgttgaaattcaaggacccccttttaatgaaaatgattagaaatattagtcagcacgatggtccaaccaaaaatctgtttatagactatgtgggagacttggcggctcaaatttcaaacgacgaggaagaggagttcgttatagagtgcttaggcacattggcgaacttgacaatacctgacctagattgggaactggtgctcaaggagtacaagctggtgccgtatctgaaggacaagctgaaacccggagcagccgaggatgacctggtgctcgaggtggtaattatgattggtaccgtttccatggacgatagctgcgctgcactgctggccaaatcaggcatcattccagccctcattgaactgctcaatgctcagcaggaagacgatgagttcgtatgccagataatctacgtcttctaccagatggtgttccatcaggctacacgggacgtgattattaaagagactcaggccccagcttatctcattgatctcatgcacgacaagaacaatgagattagaaaggtgtgtgacaatacacttgacatcatcgcggagtacgatgaggagtgggccaaaaaaatacagagcgagaagtttagatggcacaactcacagtggctggagatggtggagagtagacaaatggatgaaagcgaacaatatctgtacggagatgatcgaatcgaaccttacatacatgagggggacatccttgaaagaccggatctcttttacaacagtgacggcctcatcgcatctgagggcgcaatttctcccgatttcttcaatgattatcatcttcagaacggtgatgtagtcggccagcattctttcccaggctcactgggcatggacggctttggtcagcctgtggggattctcgggagaccagccaccgcatatgggtttcgtcccgatgagccttactattacggctacggatcctag

SEQ ID NO: 227939 - DNA, 2145 bp, synthetic construct
  misc_feature 1..2145: note = Description of Artificial Sequence: Synthetic coding sequence
  source 1..2145: mol_type = other DNA
atgtctatagctttgggaaacacttaccgcaggagtctcagcgactctgagacagtatctgtgctgcaggcatccctgtgcgaggagaaaaaagagaaatctagcaaacccaaggatcctcctccattcgaaggcatggagatcgacgaagtcgccaacattaacgacatggacgaatatatcgaactcctatatgaggatatccctgacaaggtacgcggttctgcattgattttgcaacttgccaggaatcccgacaatctggaggagcttttgctgaatgaaactgcactcggtgcactggctcgcgtgctccgcgaggattggaagcagtcggtagaactggcgactaacattatttacatttttttttgcttctcgagcttctcccagttccatgggctgatcacccactataaaatcggagctctctgtatgaatataattgatcatgaactgaaaagacacgagctatggcaggaggagctgtctaaaaaaaagaaggcagtggacgaagaccctgaaaatcagacactgcgcaaggactatgagaagacctttaaaaaataccagggtctcgtcgtgaagcaagaacagctccttagggtcgctttgtacctcctcctcaatctcgcagaggatacccgaaccgaactgaagatgcggaacaaaaacattgtgcatatgctggtgaaagctctggatcgtgacaacttcgagctgctgatcctggtcgtgtcctttttgaagaagctgagcatattcatggagaataagaatgacatggtggaaatggacattgtcgaaaagctcgtgaagatgataccgtgtgaacacgaagacctgttgaatatcacactgcgcttgctgctgaatctgtcctttgacacgggacttcgcaacaagatggtgcaggtcggactgcttcccaaactgaccgctctgctggggaatgataattacaagcagatcgcaatgtgcgtgctttatcatatttcaatggacgacaggttcaaatccatgttcgcatataccgattgtatcccgcaactcatgaaaatgctgtttgagtgttcagacgagcggatagatttagagcttatctctttttgcatcaatcttgccgctaataagaggaacgtgcagctgatctgtgaaggaaatggattgaagatgctgatgaagcgcgctctgaagtttaaggaccctttactcatgaagatgataaggaacatttcgcaacacgacggcccaactaaaaacttgtttatcgactatgtaggggatctggcagcccagatctcgaacgatgaagaagaggaatttgtcatcgagtgtttaggtacattagcaaatctcaccataccagacttagattgggaactggttctcaaggagtacaagttagtgccttatctgaaggacaagctaaaaccaggagcagctgaagatgatctggtactggaggtggtaatcatgattggcaccgttagtatggacgattcctgtgccgcactgctggctaaaagcggcatcatcccagcactgatagagctgctcaatgcccagcaagaggatgatgagttcgtctgccagatcatttacgtcttctaccaaatggtgttccaccaagccacccgggatgttataataaaagaaacccaggcccctgcctacctgatcgatctcatgcacgacaaaaacaatgagatacggaaggtgtgcgataacaccctggacattatcgctgagtacgatgaagagtgggccaagaagatacagtcagaaaaattcagatggcacaactcccaatggcttgaaatggtggagtcacgtcagatggatgagtcggagcaatacctctacggtgacgatagaattgaaccgtacatccacgagggagatatcctggagaggccagacctcttctacaacagtgacgggctgatcgctagcgaaggggcaatcagccctgacttctttaacgattaccacctgcagaatggggacgtggtcggccagcactccttccctggaagcttaggaatggacggttttggacagcccgttggaattctaggccgacccgcaaccgcttatggattccggcctgacgagccatactattatggctacggctcgtag

SEQ ID NO: 227940 - DNA, 1485 bp, synthetic construct
  misc_feature 1..1485: note = Description of Artificial Sequence: Synthetic coding sequence
  source 1..1485: mol_type = other DNA
atgcggaataagaatattgtccatatgctggttaaagccctcgacagggacaactttgagcttctaatcttagtcgtctctttcctgaagaagctctctatcttcatggaaaacaagaacgatatggttgagatggatatagtcgagaagctcgtcaagatgattccctgcgaacacgaggatttactgaacattacgctgagactcctgctcaatttatccttcgataccggtctcagaaacaagatggtgcaagtgggtctgctcccaaagctcaccgcacttttgggcaacgataattacaaacagattgctatgtgcgtgttgtaccatatttctatggatgatcggttcaagagcatgtttgcttatactgattgtataccacagcttatgaagatgctgtttgagtgttccgatgagcggatcgacttggagctaatcagcttctgcatcaatctggcagcaaataaacggaatgtgcaactgatatgtgagggcaatgggttgaagatgctgatgaaaagagcactgaagtttaaagatcccctgctgatgaaaatgattagaaatatttcgcagcatgacgggcctacaaagaacctgtttatagattacgtcggggacttggcagcccagatctccaatgatgaagaggaggagttcgtgatcgaatgcctcgggacgttggccaacttgactatccctgacctcgactgggaactagttctgaaagaatacaagcttgtgccctacctaaaagacaagctgaagcccggtgctgccgaggatgacctcgttctagaggtggtgatcatgataggaacagtgtccatggacgactcatgtgcggctctgttggccaagtctgggatcatccctgccctgattgagttattgaatgcccagcaggaagacgatgaatttgtctgtcagatcatttacgtattctatcagatggtttttcaccaggccactcgggacgtaattattaaggagacgcaggccccagcctaccttattgacttaatgcatgacaaaaacaacgagattcgtaaggtttgcgacaacacactcgacataatcgctgagtacgacgaggagtgggctaaaaagatacaatctgagaaatttcggtggcataatagtcaatggctcgaaatggtggagagcagacagatggacgagtcagagcagtacctttatggtgacgatcggatagaaccttatatccacgaaggagacatcttggaacgacccgacctgttctacaatagcgatggcttaatcgccagcgagggcgctatatcacctgattttttcaatgactaccatcttcagaatggggacgtcgtcggtcagcacagcttccctggctcccttgggatggacggctttgggcagccagtaggcatcctgggacggcctgctaccgcatatggcttcaggcccgacgaaccctattactacggatacggcagttag

SEQ ID NO: 227941 - DNA, 1935 bp, synthetic construct
  misc_feature 1..1935: note = Description of Artificial Sequence: Synthetic coding sequence
  source 1..1935: mol_type = other DNA
atgaagctgatcaccatactctttctgtgcagtcgcctgctgcttagcctcacgcaggagagccaatctgaagaaattgactgcaacgataaggacctttttaaggcagtcgatgccgctcttaaaaagtataattcgcagaatcagtccaataaccagtttgtcctatatagaattaccgaggccacaaagacggtcggatcagatacgttttactcattcaagtatgagattaaggaaggtgactgccctgtgcagtctggcaagacttggcaggactgcgagtacaaggacgccgcaaaggccgcaactggggaatgtaccgccaccgtggggaaacgatcctctacaaagtttagtgtggctactcagacctgtcagatcactccagccgagggacccgtggtgacagcccagtatgactgtcttggttgtgttcaccccatatccacccaaagcccagacctggaacccattctccgccacgggatacagtacttcaataataacactcaacattcctcactgtttatgttaaatgaagtcaagcgcgctcagagacaggtagttgctggattaaacttcagaatcacctattcaattgtgcagacaaattgctccaaagagaactttcttttcctcacgccagattgcaaatctctgtggaacggtgacaccggggagtgtactgataatgcatatatagatatccaactgcgaatcgccagcttcagccagaattgtgacatctaccccggaaaagacttcgttcagcctcctacgaaaatatgtgtgggctgtcctagagatattccaaccaactcccccgaactggaggaaacactgacccatacgattaccaagctcaacgctgaaaataacgccaccttctactttaagatcgataacgttaaaaaggctagagtgcaggtggttgccggtaagaaatactttatagattttgttgcaagagaaacaacttgctctaaagagtcaaatgaggagctgacagagagctgtgagaccaagaaactggggcagagccttgattgtaatgctgaagtgtacgtggtgccttgggagaagaaaatttacccaaccgtcaactgccagcctctgggaatgatttctctgatgaaaagaccaccaggtttctctccctttaggagctctcggataggggaaataaaagaagagaccaccgtcagtccacctcatacctcaatggcgccagcacaggacgaggaaagggactcaggcaaagagcagggccatacgcgaagacatgactgggggcacgaaaagcaacgtaaacacaatctggggcacgggcacaagcacgagcgggatcagggtcatggccaccagcgtgggcacggactgggacatggccatgaacagcagcatggtttgggacacggccacaagtttaagctagacgacgacctggagcatcaaggtggacatgtgctggatcatggtcacaagcacaagcatggtcatgggcatggtaagcacaagaataaggggaagaagaacggaaagcacaatgggtggaagaccgagcacctggcatcgtcctctgaagatagcacaactccttctgcacagacccaagaaaagaccgagggccctactcctatcccttcactcgcaaaaccgggtgttaccgtgacatttagcgatttccaggattccgacctgatcgccaccatgatgccgccaataagccctgctcccatccaatccgacgacgactggattcctgatatccaaattgaccccaatggtctgtcatttaatccaattagtgacttcccagatacgacgtcccccaagtgcccagggagaccatggaaatccgtgagcgaaatcaatcccactacacaaatgaaggagagctactattttgaccttaccgacggtctctcatag

SEQ ID NO: 227942 - DNA, 1284 bp, synthetic construct
  misc_feature 1..1284: note = Description of Artificial Sequence: Synthetic coding sequence
  source 1..1284: mol_type = other DNA
atgaaactgattactatcctgtttctatgttctcgtttattgttaagcttgactcaggagtcacagtccgaggaaattgattgtaacgataaagatctattcaaggcagttgacgccgcacttaagaaatataactcccagaaccaatccaataatcagttcgtgctgtatcggataaccgaggccacgaagaccgtcggctccgataccttctattcgtttaaatacgagattaaggagggcgactgcccagtacaaagtggaaagacgtggcaggactgtgaatataaagacgctgccaaagccgctaccggagaatgtaccgctactgtgggcaaacgttctagcacaaagttcagcgtcgccacacagacatgccagataacacccgctgaaggcccagtggtaacagcccagtacgactgcttgggctgtgtccaccctatcagcacacagtcgcccgatcttgagcccatactccgacacggaattcaatactttaataacaatactcagcacagctctctattcatgctcaatgaagtgaaaagagcccagcgacaggtagtggccggtcttaactttcgaataacttactctatcgtccagactaactgtagcaaagagaatttcctgttcttgacacccgattgcaaatcactatggaatggggacacgggggaatgcactgacaatgcatatatagacattcagttgaggatcgcctccttttctcagaactgcgacatatatccgggaaaagatttcgttcagcccccaacaaagatttgcgtcggatgcccgcgtgacatccccacaaactcccccgagttagaagagaccctgacccacacaattacgaaactgaatgcagaaaataatgccaccttttatttcaagatagacaatgtgaagaaagccagagtacaggttgttgccggtaagaaatacttcattgacttcgtggcgcgagagacaacatgctctaaggaatcaaacgaggagctgaccgagagctgtgagactaaaaaactcggacagagcctcgactgtaacgcggaagtctatgtggtgccttgggagaagaaaatatatcctacagtcaactgccagcctttgggcatgattagcctgatgaaaaggccacctgggttctcccccttccggtctagccgcatcggcgagatcaaggaggaaacgacgtctcatctgagaagctgtgagtataaaggacgccctccgaaggctggcgcagaaccagcttccgaacgcgaagtaagctag

SEQ ID NO: 227943 - DNA, 1248 bp, synthetic construct
  misc_feature 1..1248: note = Description of Artificial Sequence: Synthetic coding sequence
  source 1..1248: mol_type = other DNA
atgaaactgtcactgacccaagagtcacagtctgaggagattgattgtaacgataaagatctgtttaaagctgtcgatgccgcattgaagaagtataatagccagaaccagtcgaataatcagtttgtgttgtatcgcattacggaggccacaaagaccgttggcagcgacactttctacagcttcaaatatgaaatcaaagaaggcgactgccctgtacagtccggcaagacctggcaggattgcgaatacaaagacgctgccaaagcagccaccggagaatgcaccgcgaccgtgggtaagcggagctccactaagttctctgtggcgacacaaacatgccagattaccccagccgagggcccagtcgtgaccgcacagtacgattgtctcgggtgtgtccaccctataagtactcagagtccagacctggagcccatcctacgtcatggaatccaatacttcaataataatactcagcacagctctctctttatgctcaatgaagtaaagcgggcacaaaggcaggtggtggcagggcttaatttcagaatcacttattccattgtacaaactaattgcagtaaagaaaatttccttttcctcacaccagattgcaagagcctttggaatggcgataccggtgaatgtacagacaacgcctacattgacatccaacttcgtattgcatccttctcacaaaattgcgatatttatcccggaaaggatttcgtacagccaccaactaagatttgtgtggggtgcccaagggatattcctaccaattcaccagagctcgaagagaccctgacgcatactatcaccaagctgaacgctgagaataacgcgacgttctacttcaaaatcgacaacgttaaaaaagcgcgtgtccaggtggtggcgggaaagaagtactttatcgactttgtggcaagagaaacaacttgttccaaagaatctaatgaggaacttaccgagtcctgcgagactaagaagctcgggcaaagcttggattgcaatgcggaggtttacgtcgtgccctgggaaaaaaagatatatccgaccgtaaattgtcagcctttggggatgatttcactgatgaagcgacccccaggcttcagccctttccgatcttctaggattggcgagatcaaagaggagactacatctcatctacggagttgcgaatataaaggcaggccacccaaagcaggcgcagaacccgctagtgaacgggaggtatcctag

SEQ ID NO: 227944 - DNA, 1176 bp, synthetic construct
  misc_feature 1..1176: note = Description of Artificial Sequence: Synthetic coding sequence
  source 1..1176: mol_type = other DNA
atgaaactaattacaattttattcttatgtagtcgactcctcttgtcattgacccaggagagtcagtcagaagaaatcgattgtaacgacaaagatctgttcaaagcggtggacgcagccttaaagaagtacaattcccagaaccaatcaaacaaccagttcgtgctgtaccgaatcacagaggctactaaaacagtgggctcagacacattctactcatttaagtacgaaattaaggaaggcgattgccccgtccagagcgggaaaacatggcaggattgcgagtacaaagacgcagcaaaagctgccacgggggaatgtacagcgactgttggtaaacgctcaagtacaaaattttcagtagccacccagacttgtcagataacacctgcggagggacccgtggtgaccgcccagtacgactgcttgggctgcgtacatccgatctctactcagtcacccgacctcgaacctatactgcggcacggcatacagtacttcaataataatacccagcatagctccctgtttatgctcaatgaagtgaagagggcacagaggcaggacaccggcgagtgcactgataatgcttatattgatatccagctccgaatcgcttcattttcacagaactgtgacatttaccccggaaaagactttgtgcaaccaccaacaaaaatctgcgtgggatgtcctcgagatattcccacaaattcccccgaacttgaggagacattaacacatactatcactaagctcaacgctgagaataacgccaccttttatttcaagatcgataatgttaagaaagcacgtgtgcaggtggttgctggcaagaaatattttattgacttcgtggcacgggagacaacatgtagtaaagaatcaaatgaggagctgaccgagtcctgtgaaacaaagaagttgggtcagagtctcgactgcaacgccgaagtatacgtggtgccgtgggagaaaaagatttaccctaccgtcaattgccaacccctgggtatgatcagcctgatgaaacggccaccaggatttagccctttccgatcatctcggataggcgagatcaaggaagaaaccaccagccacctgcgcagctgtgagtataaagggaggccccctaaggccggagcggagccagcctcagaaagagaggtgtcctag

SEQ ID NO: 227945 - DNA, 306 bp, synthetic construct
  misc_feature 1..306: note = Description of Artificial Sequence: Synthetic coding sequence
  source 1..306: mol_type = other DNA
atggacattcccatctctagtcgagattttcgcggtctccagctggcctgtgtcgcactgggactggtcgccggtagtattatcatcggcatctctgtgtctaaagccgcagctgccatgggaggtgttttcataggcgctgcggtcctgggaagcctcaggatccatccccatccaggggcagaccatggcgagggcaggtcttcgactaatgggaataaggaaggcgcacgttcttctttgtctactgtttctagaaccctggagaaactgaagcctggtactcgcggagccgaagagtgttag

SEQ ID NO: 227946 - DNA, 375 bp, synthetic construct
  misc_feature 1..375: note = Description of Artificial Sequence: Synthetic coding sequence
  source 1..375: mol_type = other DNA
atggacatccctatctcgtccagggatttccgaggactgcaattagcatgtgtggctctgggcctagttgctggttcaataattattggaattagcgtatccaaagccgcagccgcaatgggaggcgtgtttattggtgccgcagtgttaggcttgctgattctcgcatatccctttctgaaagcccgatttaatctcgatcacattcttcccacgatcggaagcctgaggatacacccacacccgggtgccgaccatggggaaggtcggagtagcacaaacgggaataaggaaggcgcaagatccagcctctcaaccgtgtctagaaccttggagaagcttaaacccggtacccgtggcgctgaagagtgctag

SEQ ID NO: 227947 - DNA, 3135 bp, synthetic construct
  misc_feature 1..3135: note = Description of Artificial Sequence: Synthetic coding sequence
  source 1..3135: mol_type = other DNA
atgaagccgggatgtgccgcagggtcacccggaaatgagtggattttctttagtacggacgagataactacacgctaccgtaatacaatgtccaatggtggactacaacgtagcgtcatactgtccgccctgattctcttacgggctgttactggtttttccggggacgggcgagcaatttggagcaagaacccaaattttactcctgttaatgagtctcaacttttcctatacgacacattccccaaaaactttttctgggggataggcactggcgcactgcaagtggagggatcgtggaaaaaagacggtaagggtcctagtatctgggatcacttcatacatacacatctgaaaaacgtctcctccacaaacggatcaagtgactcctatatctttctagagaaggatctgagtgctcttgactttattggagtgtccttttaccagttcagtatttcatggcctcggcttttccctgacggaatagtcactgtggcaaacgctaaagggctccagtattacagtaccctgctggacgcactggtgcttagaaatatcgaaccaatcgtcaccttataccactgggacttacccctggccctgcaagaaaaatacggagggtggaagaacgacaccatcatagatatcttcaatgactacgcaacgtactgcttccagatgtttggagacagagtgaaatattggataaccatccacaacccctatctggtggcgtggcatggttacggaactgggatgcatgcgcctggcgaaaaagggaatctggccgctgtctataccgttggacataatctcattaaagcccatagtaaggtgtggcacaattacaacacacatttcaggccccaccagaagggctggctctccattaccctcggctcacattggattgagcctaatcggtctgaaaacactatggacatattcaagtgtcaacagagtatggtctcagtcctggggtggttcgctaatcccattcatggcgatggtgactacccagaaggtatgagaaagaagctgttctctgtactgccaatatttagtgaagccgagaaacacgaaatgcgtggtactgcagatttttttgcattctcatttgggcctaacaatttcaagcccctgaacacgatggccaagatgggtcagaatgtgtctctgaatttgcgagaagcccttaactggatcaaactggagtacaataatcctcggatactgatcgccgaaaacgggtggtttacggactcccgagttaaaactgaggatacaacggccatttacatgatgaagaactttctgagccaggtcctccaggcgattcgtcttgatgaaattagagtgtttgggtacaccgcatggagcctcctcgacggctttgaatggcaggacgcctacacgataaggcgtggactcttttatgtcgatttcaacagcaagcagaaagagcggaagccaaagagctctgctcactattataagcagatcattcgggaaaacggtttctccctcaaggagtctactcccgacgtccaaggacagtttccatgtgattttagctggggagtcaccgagagtgtcctgaaacctgagtccgtagcaagctcgccacagtttagcgatcctcacctatacgtgtggaacgccactggtaacaggctcttgcaccgggttgaaggcgtaagactcaagacacgacccgctcagtgcaccgactttgtcaatattaagaaacagctcgagatgctggcccgaatgaaagtgacacattaccgttttgccctcgactgggctagcgtgctgccaacaggaaacttgtcagccgtgaatcgacaggcattaaggtattatagatgtgtggtttccgaagggctgaagctcggaatctcagcgatggtgacactttattacccaactcacgcccacctcgggttacctgaacccctgctacacgcagacgggtggctcaatccctccaccgctgaagcctttcaggcctatgctggcctgtgtttccaggagttgggcgaccttgtgaaactctggatcaccattaatgaacccaaccgcctatccgacatctacaataggtctgggaatgatacatacggcgctgctcacaacctgttagttgcacacgcccttgcgtggcgcctgtacgacagacagttcagacccagtcagagaggggctgtgtcactttcccttcatgccgactgggcagaacccgctaacccatacgccgacagccattggcgcgctgcggagcgcttcctgcaattcgaaatcgcctggttcgcagagccccttttcaagaccggcgactatcccgcagcaatgagagagtatattgcctccaagcatcgtagaggcctttcatccagtgccctcccgaggctcactgaggcagaaagaaggttgctgaagggcaccgtagatttttgtgccctgaaccactttaccacacgcttcgtcatgcacgagcagttggcgggaagccgctatgactctgatagggatatacagttcctgcaggatattacaaggctcagctcaccgaccaggctggcagtcattccttggggagtcaggaagcttctacgctgggttcgccgaaattacggagatatggatatctacatcaccgcctcaggcattgacgaccaggcactggaagacgatcgcctcagaaagtattacctcggaaaatatctgcaggaagtccttaaggcctacctaatcgataaggtcagaatcaaagggtattacgccttcaagttagccgaagaaaagagcaaaccgagattcggtttcttcacttccgactttaaagccaaaagctctatacagttctacaacaaggttataagctcacggggttttcccttcgagaactcctccagtcggtgcagtcagacccaagaaaacactgaatgcaccgtgtgtctgttcctagtccagaagaagcctctgatcttcttgggctgctgtttcttttccactctcgtgctgctcctgtctattgctattttccagcgacagaagagaaggaagttttggaaagccaagaatttgcagcatatccccctgaaaaaggggaagcgagtggtatcatag

SEQ ID NO: 227948 - DNA, 1389 bp, synthetic construct
  misc_feature 1..1389: note = Description of Artificial Sequence: Synthetic coding sequence
  source 1..1389: mol_type = other DNA
atgggaacacaggcgctacagggttttctgttcctgcttttcctgccgctgctgcagcccaggggagcttccgcgggttccctgcattcacccggactgtcagagtgtttccaagtaaatggcgcagactacaggggtcaccagaaccgaacaggcccaagaggagctgggagaccttgcttgttctgggaccagacacagcagcatagttattcttccgcatccgaccctcacggccgttgggggctcggcgctcacaatttttgtagaaatcccgacggggatgtgcagccttggtgctacgttgcagaaacggaagaggggatctactggcgatactgcgacatccctagttgccacatgccgggttatttgggctgttttgtcgactctggagcccctccagcattgtccggaccttctggcactagcaccaaattaactgtgcaagtctgcttaagattttgcagaatgaagggataccagcttgcgggagtggaggccggttatgcctgcttctgcggatctgagagtgatctggctaggggcagactcgcccctgcaactgactgtgaccagatttgcttcggccacccagggcaactctgcggcggagatggtagactgggcgtctatgaagtgagcgtaggcagctgccagggcaactggactgcccctcaaggtgtgatctacagcccagacttccccgacgaatacggaccagatcgcaactgctcttgggcgctgggacctcctggagcagctctggagttaacattccgtctattcgaactagctgaccctcgcgatcgcctggagcttcgagatgctgccagcggcagtttgctcagggcctttgatggtgctaggcctcctccttcagggcctcttcggctcgggacagctgctctgctactgacgttccgaagcgacgcacggggtcacgcccaaggctttgcgctgacttatcggggtttgcaggacgcggctgaagatcccgaggcacccgaaggttcagctcagactccagcagccccactggacggcgctaatgtgtcatgctcacctagaccaggagctcctcctgccgcaataggtgcacgggtattcagcacggtgactgcagtatctgttctgctcctgttactgttagggctgctgcgcccactacgccgtcgctcttgccttctggccccaggaaaggggcctcccgctcttggagccagccgaggacccaggagaagctgggcggtctggtaccagcagccacggggagtcgccctgccgtgttccccaggtgaccctcaggcagaggggtcagctgcgggatacaggccactgtccgcaagctcccagagcagcctgaggtcactgattagcgccctctag

SEQ ID NO: 227949 - DNA, 1263 bp, synthetic construct
  misc_feature 1..1263: note = Description of Artificial Sequence: Synthetic coding sequence
  source 1..1263: mol_type = other DNA
atgggcacacaggcgctccagggttttttatttctgctgtttcttccactgctgcagccacgtggggcatcagcaggctccctgcatagtcccggacttagcgagtgttttcaggtgaatggagccgactacagagggcaccagaaccggaccggaccgaggggcgctggcagaccctgtctattctgggaccaaacccagcagcatagttattcatccgccagcgatccgcacggcaggtggggactgggcgcacacaatttctgccggaatccggacggagatgtccagccatggtgttacgtcgccgaaacggaggagggaatttactggaggtactgcgatatcccaagctgccatatgcccggatatctcgggtgtttcgtggactccggggctcctccggcactttcgggtcctagcgggacttctacgaagctcaccgtgcaggtctgtctgcgcttttgtagaatgaaaggctaccaactcgccggtgttgaggcaggctacgcctgcttctgtggctccgaaagtgacctggcccgagggcgacttgcccctgctaccgattgcgaccagatatgttttggacatccgggacaactctgtgggggagatgggaggctcggcgtgtacgaggttagtgtaggatcctgccagggcaactggactgccccacaaggagtcatttactctccagatttccccgatgaatatgggccagataggaattgttcctgggccctgggtccaccaggggcagccctggaacttacgttcaggttgttcgagctggctgacccacgagacagattagagctgagggacgcggctagcgggtcactgcttcgggcatttgacggagcacgacccccaccctcaggccctctgcgcctggggacagcagctctgctcttgacctttcgctccgacgctcgtggacatgctcaggggttcgctctgacgtacagaggtctgcaggacgcggcagaggacccagaggcccctgagggctccgctcagacgcccgctgcaccgctcgatggggcaaatgtgtcatgctcccctcgcccaggggctcccccagcagctattgggggagccgtctgctggctgagagagaagggccctagaaggtggggactgcctggggctcccggagaagccggtctctgcggaacaaactctccagaaggatggccatgtcctgcgcctccaggcacaccccgactaagagtcctccccagggcaacaggactctag

SEQ ID NO: 227950 - DNA, 1272 bp, synthetic construct
  misc_feature 1..1272: note = Description of Artificial Sequence: Synthetic coding sequence
  source 1..1272: mol_type = other DNA
atgggaactcaggcactgcaggggtttctgtttttgcttttcttgcccctgctgcagcccagaggggcttctgctggtagcctgcattccccagggttgagcgaatgctttcaggtgaatggggctgactacaggggccatcagaacagaaccggccctcggggtgcgggaaggccatgtctgttttgggatcaaacccaacagcattcctactcttccgctagcgacccacatggtcgttggggactgggcgcacataacttttgtcggaacccagacggtgacgtccaaccctggtgttatgtcgcagagaccgaagaaggaatttactggaggtactgcgatataccctcatgccacatgcccggatacctgggatgcttcgtcgacagcggcgcacctccggctctatccggtccttctggcactagtaccaaactcactgtgcaagtgtgtctcaggttctgtcgcatgaagggttatcaactgtgcggtggagacggtcgattgggtgtctatgaagtaagcgtaggctcatgccaaggaaactggaccgcacctcagggcgtgatatatagtcctgatttcccagacgaatatggtcccgatcgaaattgctcttgggccctgggaccccctggggcagcactggaacttacttttagactgttcgagttggcggaccctcgagatcgcctcgagttgcgcgacgctgcttccggttctttgcttcgggctttcgacggtgctagacctccaccttctgggcctctgagactgggcaccgccgctctgttgctgacctttcgctcggacgccagaggtcatgctcaagggttcgcactcacgtatagaggattgcaggacgcagctgaagaccccgaggcaccagaggggagcgctcaaacaccagccgctcctttagacggcgctaatgtttcctgctcacccaggccaggtgcacccccagcagccatcggagctcgggtgttctccaccgtgactgcggtttcagtgctgttgttgctgctcctgggtttgctccgtccgctgaggagacgatcctgcctcctagcacccggaaaaggtccccctgcacttggagcctctagagggcctaggcgctcctgggcagtctggtatcagcaacccaggggcgtagcgttgccatgcagcccgggagatccccaagcagagggcagcgcagccggatacaggccactgtccgcctccagtcagagctcattaagatcactgatatcagccttatag

SEQ ID NO: 227951 - DNA, 1146 bp, synthetic construct
  misc_feature 1..1146: note = Description of Artificial Sequence: Synthetic coding sequence
  source 1..1146: mol_type = other DNA
atggggacccaggccctccaaggatttctcttcctcctatttttgcccctcctgcaaccgcgtggggcttcagccggatcactacactctccgggactgagcgagtgttttcaggtcaatggcgctgactaccggggacaccagaaccggaccgggccacgcggagccggaagaccttgcctcttttgggaccagactcaacagcatagctactcatccgctagcgatccacacgggcgatggggtttaggcgctcacaacttttgtcgcaacccagatggtgacgtccagccttggtgctacgtggctgaaacagaggaaggaatctactggcgttattgcgatattcctagctgccacatgccgggatatttagggtgtttcgttgactctggagctccaccagccttgagtggaccaagcgggacatccactaagttaaccgtgcaggtttgtttgcgcttttgccggatgaagggataccagctatgtggaggagacggccgacttggggtttacgaggtttctgtcgggagctgccaaggaaactggactgctccccaaggcgtaatatactctcctgatttccctgacgaatatggtcccgataggaactgttcttgggccctgggtccaccaggtgctgccctggagcttacgtttagactgtttgagcttgctgacccaagggaccgtttagagctcagagatgccgcttctggctcacttttgcgggcttttgacggggctaggccgccacccagcggaccgttgcgcctcggcaccgccgctttgctattaacctttcgctcggacgccagagggcacgctcaaggttttgctctgacctacagagggctgcaggacgcagctgaggaccctgaggccccagaggggtccgcccagactcccgcagcccctctggatggggctaacgtgagctgcagccccagacctggggcaccaccggcagccataggaggggcagtgtgctggctcagagagaaaggccctaggagatggggcttgccaggcgcacctggggaggccggactctgtggaactaattcacccgagggctggccatgtccagcacctcccggaacgcctcggctgagagtcctgccccgtgctacagggctgtag

SEQ ID NO: 227952 - DNA, 2211 bp, synthetic construct
  misc_feature 1..2211: note = Description of Artificial Sequence: Synthetic coding sequence
  source 1..2211: mol_type = other DNA
atgggcaacccagagaatattgaggacgcttatgtggcggtcatcaggcctaagaacacagccagcctgaactccagagagtatcgcgcaaaaagttatgaaatcttgttgcacgaggttcctatcgagggtcagaaaaaaaaaaggaagaaagtgttgcttgagaccaaactgcaggggaactctgagatcacacaaggtatacttgactacgtggtagaaactaccaagccaatcagcccagcaaatcagggtattagaggaaagcgggtggtcctgatgaagaagtttccactcgacggagagaagatgggaagagaggcatccctgtttattgttccctccgtggtcaaggacaacacaaaatatacctatactcccggatgcccaatcttctattgcctccaggatatcatgagggtttgctctgagagttcaactcatttcgctaccctgactgcacgcatgttgattgcgctggacaagtggctcgatgagaggcacgctcagtcccactttatcccggctttatttagaccttctcctttggaaaggatcaagacaaacgttatcaatcccgcatacgctactgaatccggacagaccgaaaactccctacatatgggatacagtgcactggagattaaaagtaagatgctcgcactggagaaagctgatacctgcatatacaatcccctgtttgggtctgacctacaatatactaatcgggttgacaaagtcgtcatcaacccctacttcggcctgggagcgccagattacagtaagattcagatcccgaagcaggagaaatggcaaagatccatgtcttcagtgacagaagataaggagagacagtgggtggacgactttccactgcaccgctctgcttgtgagggggactccgaactgctcagtcggttattgagcgagcggttttcggtcaaccagctggattctgaccactgggcccctatccactacgcatgctggtacgggaaagtagaagccactagaatactgttagaaaagggaaaatgcaatccgaatctgttaaatggacagctctcctcgccattgcacttcgcagccggtggcggacatgcagaaatagtgcagatactcctcaatcacccagagacggatcggcacataaccgatcagcaggggcgaagccccctgaacatctgcgaggagaacaaacagaataattgggaggaagctgccaagctactaaaggaagcaatcaacaagccatatgaaaaagtgagaatttaccggatggacggtagctacaggtctgtagagctgaagcacggcaacaataccaccgtccagcagattatggagggcatgcgtctgtcacaggagacacagcagtattttactatctggatctgtagcgagaacttatcactgcagctcaaaccttatcacaagccgcttcagcacgtgagagactggccagagattctggccgagctcaccaacctggacccacagagggagacacctcagctattcctgcggagggatgtccgcctgcccctggaggtagagaaacaaattgaggatcccttagccatcctaatcctgttcgatgaggccagatataacctattaaagggattctacaccgcacccgacgccaagcttataacactggcgtctcttcttctgcaaattgtctatggtaactacgagagtaagaaacacaagcagggatttctgaacgaagagaatcttaaatccatagttccagtgaccaagctgaagagtaaggcaccccactggactaatcggatcctgcacgagtacaagaatctctctaccagcgagggcgtgtcaaaggagatgcatcacctgcagcggatgtttctgcaaaattgctgggaaattccaacgtacggcgcagccttctttacagggcagatattcaccaaagcctcacctagcaatcacaaggtgatccccgtctacgtgggtgtgaacatcaaaggactgcacctccttaatatggaaaccaaagcattgctcatatcactgaagtacgggtgcttcatgtggcagctcggggacactgatacatgttttcaaatacactcaatggagaacaagatgagctttatcgtccacacaaagcaggccggactggtggtgaaactcctgatgaagctgaacgggcagttaatgcctacggagcggaacagctag

SEQ ID NO: 227953 - DNA, 3624 bp, synthetic construct
  misc_feature 1..3624: note = Description of Artificial Sequence: Synthetic coding sequence
  source 1..3624: mol_type = other DNA
atggacctacacatgatgaactgcgagctgcttgccacatgcagcgcccttgggtatcttgagggagacacttaccacaaggagccagattgtctcgagtccgtgaaggacctgattcgatacttgcgccacgaggatgaaacccgggatgtgcgccagcagcttggcgctgcacagattctgcagtcagacctgctgccaatcctgactcagcaccaccaggataagcctctgtttgacgctgtgattcgactgatggtgaacctcactcaacccgctctactctgcttcgggaacttacccaaagagccaagctttcggcaccactttttgcaagtcctgacctacctgcaggcatataaggaagcattcgcctcagagaaggccttcggggtgcttagtgaaaccctgtacgagcttctacagctgggttgggaagagcggcaggaagaggacaacctgttgatcgagcggatcctgctgcttgtaaggaatatactgcatgttccagctgatctggatcaggagaagattgatgatgatgcaagtgcccacgaccagctgctctgggccatccatctgagcggtttggatgatctcttgttattcctggcaagcagcagcgcagaagagcagtggtccttacacgtgttagaaatagtttccttgatgtttagggatcagaatcccgaacaacttgcaggggtgggacagggccgactggcccaggaacgcagcgcagacttcgccgagctggaagttctgcggcaaagggagatggccgagaagaagacgcgagcacttcagcgaggtaataggcatagcagattcggagggtcctacattgtgcagggcctcaagtctatcggtgagagagacctgattttccataaaggactgcacaatctgcggaactattcttccgatctcgggaagcagcctaaaaaagtccccaaacgtcgacaggcggcacgcgaactgtctattcagagacgctcggcgctgaacgtgcgtctcttccttagggatttctgctctgagtttctggaaaattgctacaacaggctgatgggcagcgtgaaagatcatctactcagggaaaaggctcagcagcacgacgaaacgtattatatgtgggcattggccttcttcatggcgttcaatagagccgcatctttccgcccaggattagttagcgaaaccctgagcgtgcgaacttttcattttatcgagcagaatcttacaaattattacgaaatgatgttgacggacagaaaggaagccgctagttgggctcgcagaatgcatctagctctgaaggcgtaccaagagctgctcgcaacggtgaacgaaatggatattagtccagacgaagcagttcgtgagagttcaaggatcattaagaataatattttttatgtgatggagtaccgagaactattccttgcactgttcagaaagtttgatgagagatgtcaacctcgcagtttccttcgcgatctggtggagaccacccacctgttcctgaaaatgctggagagattctgtcggagccgcggtaatctcgtggtgcagaacaagcaaaaaaagcgtcgcaagaaaaagaaaaaggtacttgaccaggcgattgtttcgggaaatgtgccatccagccccgaggaggtggaagccgtgtggcctgccctggctgaacagctgcagtgctgtgcgcagaatagcgagctctcaatggattccgttgttccattcgatgccgcatccgaggttccggttgaagaacagagagcggaggccatggtgagaatccaggactgcctacttgccggacaggcaccccaagccctgacgctgctgcgttctgcccgagaggtttggccagaaggcgatgtctttggttcccaggacattagccccgaggaagagatacagctcctgaaacagatattaagcgcacccctgcctcgacagcagggtccagaagagcgaggcgcagaggaagaggaggaggaagaggaggaagaagaagaagagctccaggtggtacaggtgtcagaaaaagagttcaatttccttgactatctgaagagattcgcttgttctacagtggtgagagcttatgtgctgctcctgaggagctatcagcagaactctgctcacacgaatcactgcatagtaaaaatgctccacagactggctcatgacctcaaaatggaagccctattgtttcagctgtcagttttttgcttgttcaacagactgttgtctgaccctgccgctggggcttataaagaactggtgacattcgctaaatatattctaggaaagttctttgccctggccgcagtaaatcagaaggctttcgtggaactgctgttttggaaaaacaccgctgtggtaagggagatgaccgaaggatacggcagcttggacgatcgcagctcttctcggagggcccctacgtggagcccagaggaggaggcgcatttgcgcgaactgtacctcgcaaataaggacgtcgagggtcaagatgtggtggaggccattctggcccatctgaatacggtgcctcggaccagaaaacagattatccatcatttagtacagatgggattggctgacagtgttaaagattttcagcgtaaaggtacccatatcgtgctgtggaccggagaccaggagctggaattgcaaagactttttgaagagtttcgcgattcagatgacgtgttgggacatattatgaagaatattactgcaaaacgaagcagggctcgtatcgtagataaactgctggctttgggcctagtcgccgaaagacgcgaactgtataaaaaacggcagaaaaagctggcttcttccattctgcctaatggagctgaatctcttaaggatttttgtcaggaggacctagaggaagaggagaatctccccgaagaggatagtgaggaagaggaggagggcggatcggaagctgagcaagtgcagggctccctcgttctgagtaatgaaaacctggggcagtccctacatcaggaagggttcagcattccgctcctgtggttacaaaactgtctgatccgggctgcagatgatagagaggaggacgggtgctctcaggccgtcccattggtaccactgacagaagagaatgaagaagctatggaaaatgaacagttccagcagcttctaaggaaactaggggtccggcctccagcgagcggacaggaaacattctggcgcattccagcgaaattgagccccacgcagctgagacgcgcagcagcttcattaagtcaaccggaagaggaacaaaagcttcaacccgagttgcagcctaaggtgcctggcgaacagggcagcgatgaggagcattgtaaggagcatagggcccaggccttgcgagccttgctgttggcccataagaagaaggcaggacttgcctctcccgaagaggaggatgcagttggcaaagagccattaaaagccgctcctaagaaacggcagttattagattccgacgaggaacaagaagaagatgaaggacggaatcgagccccagaactcggggcaccaggaatccagaagaagaaaagataccaaattgaggacgatgaagatgactag

SEQ ID NO: 227954 - DNA, 1539 bp, synthetic construct
  misc_feature 1..1539: note = Description of Artificial Sequence: Synthetic coding sequence
  source 1..1539: mol_type = other DNA
atgcacacacctgatttcgctggtccggacgacgcccgtgccgtagatatcatggatatctgcgaatcaattctcgagcgcaaaaggcacgattctgagaggagtacgtgctccatactcgaacagaccgacatggaagccgtggaggcacttgtgtgcatgagctcctggggccagcgctcacagaaaggcgacttactaagaattcgcccattaacacccgtctcggacagtggtgatgtgactaccactgtccatatggatgctgccacccccgagctaccgaaggatttccactcactttccacactgtgtatcactcctccacagtccccggatctggtagagccgtctaccaggaccccagtctctcctcaggtgaccgatagcaaagcctgtactgctacggatgtgctgcagtcctccgctgtggtggcacgcgctctgtccgggggagctgagcgaggcttactcggcttggagccagtgcccagcagtccatgcagagctaagggcacaagtgtaatccgccacacgggcgaatcccccgcagcctgctttccaacaatacagactccggactgccgtttgtccgactccagggaaggggaagaacagctgttaggccattttgagacgctccaggacactcacctcactgactcacttctcagcactaacctggtgtcttgccagccttgtcttcacaagagcggaggactcctgttgacagataagggtcagcaggctggttggcctggggctgttcaaacatgttcccccaagaattacgagaacgatctgcctagaaagacaacaccgttgatatctgtgagcgttcccgctccccctgttctgtgccagatgattccagttaccggtcagtcctctatgctgcccgcttttctcaaaccccctcctcagctgtctgtgggcaccgtgagacccatcctcgctcaggcggcacctgctccccaacctgtgttcgtcgggccagcagttccacagggggctgtgatgttagtgctgcctcaaggcgcactcccccctcccgcaccatgtgccgcaaatgtgatggctgcgggaaataccaaactactccctttggcaccagcacctgtctttatcactagctcacagaactgtgtgccgcaagttgatttttcaaggagacgcaattacgtgtgttccttccccggttgtagaaagacctattttaagagttcccatttgaaggcacatctaagaactcacactggggagaagcccttcaactgttcatgggatggttgtgacaagaagttcgctcgatcggacgagctctctcgccaccgcaggacacacacaggcgagaaaaagttcgtttgtcccgtgtgcgatcgcaggttcatgcgttcggaccatttgacaaagcatgcccgaaggcacatgacaacaaagaagatcccgggttggcaggctgaagtgggaaagctaaacaggattgcaagcgccgaaagtcccggttcccccctggtgagtatgccagccagtgcttag

SEQ ID NO: 227955 - DNA, 1488 bp, synthetic construct
  misc_feature 1..1488: note = Description of Artificial Sequence: Synthetic coding sequence
  source 1..1488: mol_type = other DNA
atggacatctgcgaaagcatacttgagagaaaaagacatgattccgaaaggtctacttgctccatcctggaacagactgacatggaagcggtggaggcactggtttgcatgagctcatggggccagagatctcagaaaggtgacttgctgcggatcaggcccttgaccccggtttccgactccggagacgtcactaccactgtgcatatggacgcagctacacctgaactgcccaaggacttccatagccttagtactctatgtatcacgccccctcagtcccctgatttagtggagccatcaacaaggacaccagtgtcccctcaggtgaccgattccaaagcatgcaccgctacagacgtgttgcaaagctccgccgtagtagctcgggctctgagcggtggagcagaacgtggtctcctaggattggagcctgttcccagcagcccttgccgggcaaagggcacatcggtaataaggcacactggcgagtccccggctgcctgttttcctaccattcaaactcccgactgtcgccttagtgattctagagaaggtgaggaacagcttctagggcacttcgagaccctgcaggatactcacctgactgatagtctgctcagtaccaacctcgtgtcatgtcagccatgcttacacaagagtggcggactactgttaacagacaagggccagcaggcgggttggccaggagccgtgcagacctgcagccctaaaaactacgagaacgacctgcccagaaaaacaacaccacttatctccgtgtctgtgcctgcgccacccgtactgtgtcagatgattccagtgaccgggcaaagtagcatgctgccggctttcctcaagcccccacctcagttgagcgtgggtaccgtgcgacccatactggcccaggcagcacctgccccacagccagtcttcgtgggcccagccgtgccacagggagccgtgatgctggttctcccacagggcgcacttccaccacctgcaccctgcgccgctaatgttatggctgcagggaatacaaaactcctgcctctggcgcctgcgcctgtgtttatcacctcttctcaaaattgtgtccctcaggtggatttcagtcgacggaggaattacgtctgctccttcccagggtgccgcaagacctatttcaagagctcccacttgaaggcacatctgagaacacacactggagagaagccatttaattgttcttgggatggctgcgacaagaagttcgctagaagtgacgagttgtcccgccacagacgaactcacaccggggagaaaaagttcgtgtgccctgtatgcgatagaaggtttatgaggtctgatcatctaacaaaacacgcgagaaggcacatgaccacaaaaaaaatacctggctggcaggcggaagtaggtaaactgaatcgtatcgctagcgctgagagtccaggctcccccctcgtatccatgcccgctagcgcttag

SEQ ID NO: 227956 - DNA, 1488 bp, synthetic construct
  misc_feature 1..1488: note = Description of Artificial Sequence: Synthetic coding sequence
  source 1..1488: mol_type = other DNA
atggacatttgtgaaagcatcttggagcgcaaaaggcacgactctgagagatcgacttgtagcattctggaacagaccgacatggaggccgtggaagcacttgtgtgcatgagctcctggggccagcggtcacagaagggagatttattaagaattcgacctctgacccccgtcagtgactcaggcgatgttaccacaacagtacacatggatgccgcaacaccggagcttcccaaggattttcattctttatccaccctgtgtattaccccacctcagagtcctgatctggtggagcctagcactcggactcctgtgtctccgcaggtcacggactcaaaagcctgcacagcaacagatgtactgcagtcctccgccgttgtggctcgggcactttccggcggagcggagagaggcctcttgggattggaacctgtcccatcaagcccttgtagggccaaggggaccagcgttattagacacacaggcgagagtccggctgcctgcttccccacgatacaaacccccgactgcaggctgtccgattcccgggagggggaggagcagctgctgggacacttcgaaacccttcaagatacacatcttaccgattccctgttgtccacaaacctagtaagttgccaaccctgtcttcataaaagtggtggactcctcctaaccgataaggggcagcaggcgggatggccgggagctgttcagacatgcagtcctaagaattacgaaaatgatttgcctcgtaagaccactcccctcatttcagtgtccgtacctgcacctcccgtgctatgtcaaatgattccagtgacagggcaatccagtatgctcccggcattcctgaagccaccgccacagctgtcagtggggaccgtgcgtcccatcctggcacaggctgcacccgcaccccagcctgtatttgtcggcccagcagtgccgcagggggcagtaatgctggtcctacctcagggggcactgccccctccagctccttgtgctgccaacgtaatggctgctggcaacactaagctgctgccattagcccctgcgcctgtgtttataacaagctctcaaaattgtgtaccacaagtggattttagtcgcaggagaaattacgtgtgtagctttcctggctgccggaagacctactttaaaagtagtcacctgaaggcccatctccgcacccataccggcgaaaaaccgtttaattgtagctgggacggctgcgacaaaaaattcgccaggtcagatgagctatctaggcatcgacgtacacacactggcgagaagaaatttgtgtgccccgtgtgtgacaggcgcttcatgcgtagcgaccacctgacaaagcacgctcgcaggcacatgacaacaaaaaagattcctgggtggcaggcagaagtgggtaagctaaaccgcatcgcttcagccgagtcacctggctcgcctctagtgagtatgcctgcctctgcttag

SEQ ID NO: 227957 - DNA, 1209 bp, synthetic construct
  misc_feature 1..1209: note = Description of Artificial Sequence: Synthetic coding sequence
  source 1..1209: mol_type = other DNA
atttccgtgcatcttatgcgaaagcatgtgaaaaatattaacactttcgaaaaccgcatgttaatgctcgatggtatgcccgcagttcgagtcaaaacagagctgcttgaaagcgagcagggatcccccaatgtgcataactaccctgatatggaagccgttccactcctcttaaataatgtcaagggggagccccctgaggactcattgtccgtagaccatttccaaactcagaccgaacccgtggacttgagtatcaataaggcccgtactagcccaacagctgtatctagctccccagtcagcatgacagccagtgcctcttccccatccagcacaagcacctcttctagctcatcgagcaggttggccagctcgccaaccgttatcacatctgttagttctgcatcctcctcctccaccgttctgacgcctggacctctggtggctagcgcctccggtgtcgggggacagcaattcttgcacattattcacccagtgccaccctccagccctatgaacctgcagtctaacaagctctctcacgtccatcgaattccggtcgtagtgcaatctgtgcccgttgtgtacacggctgtgagatcacctggcaacgtgaacaatacaattgtcgtgccacttctggaggatggtcgcggacatggtaaggctcagatggacccgagaggtctgagccccaggcagtcaaagagcgattccgacgacgacgatttgccgaacgtcaccttagactctgtgaacgagacgggaagtaccgccctgtctatagccagggctgttcaggaggttcacccatcccccgtctctcgggtgcggggaaaccgaatgaataatcaaaagtttccttgtagtataagccccttctcgatcgagtctacacgtcggcagcgtaggtccgagtccccagacagcaggaagcggagaattcacagatgcgattttgagggatgtaataaagtctacacaaaatctagtcatctgaaggcacatcgtcgcactcacacgggtgagaaaccctacaaatgtacatgggaaggttgcacttggaagtttgctagatcagatgaactaactcgtcattaccgcaagcacaccggggtcaagccatttaaatgtgcagattgcgatcggagctttagcagatctgatcatcttgccctccatcgcagaagacatatgctggtttag

SEQ ID NO: 227958 - DNA, 1209 bp, synthetic construct
  misc_feature 1..1209: note = Description of Artificial Sequence: Synthetic coding sequence
  source 1..1209: mol_type = other DNA
atgaatatacacatgaagcggaaaacaattaaaaacatcaacacgttcgagaaccgtatgctgatgttagatggtatgcccgctgtgcgggtaaaaacggaattgctggaaagcgaacagggttctcccaacgttcataactaccccgacatggaagccgtgcctttgcttctcaacaatgtgaagggcgagcctccagaggacagcctgtctgttgatcatttccaaacacagacagaacccgtcgatctgagcatcaataaggcacgcacttcacccacagctgtctcctcttccccagtgtctatgacagcgtctgcttctagtcctagtagcacctcaacttcttccagctcctcgtcaagactggcatcaagcccaactgttatcacatctgtgtccagtgcatctagttcatccactgtcttgactccgggaccacttgtcgctagtgcctcgggggtgggaggtcagcaatttctgcacattatccaccccgtacccccaagcagcccaatgaatcttcagtcgaataagctgagtcacgtacaccggattcctgtagtggttcagtcagttcccgtcgtgtacaccgcggtacgttcaccaggtaacgttaataacacaattgtagtgccactgctggaggatggcaggggccacggaaaggcacaaatggaccccagaggactgagtcccagacagagtaagtccgattccgacgatgatgatctgcccaacgtgacccttgactccgtgaatgaaaccggaagtactgctctgtctatcgccagagcagtccaggaggtacacccatcaccagtgtcccgagtgcgcggaaatcgtatgaacaaccagaaatttccgtgctcgatatctcccttctcaatagagagtacgaggagacaacggcgaagcgaatctccagactcgcggaagagaaggattcatcgctgtgacttcgaagggtgcaacaaggtgtacaccaagtcgtcccacttgaaggctcacaggaggacacacacaggagagaaaccctacaagtgcacatgggaaggctgcacatggaagttcgcacgtagcgacgaactgaccaggcattacagaaagcacaccggggtcaagccattcaaatgcgctgactgcgacaggtctttttcgcggagtgatcatcttgctttgcacagacggcgacacatgctggtttag

SEQ ID NO: 227959 - DNA, 1209 bp, synthetic construct
  misc_feature 1..1209: note = Description of Artificial Sequence: Synthetic coding sequence
  source 1..1209: mol_type = other DNA
atgaacatccatatgaagaggaagacaatcaaaaatattaataccttcgaaaacagaatgctgatgctggatgggatgcctgccgtacgcgttaaaaccgagcttctggagagcgagcaggggagtccgaatgtccataattatcctgatatggaggctgtgccattgctactgaacaacgtcaaaggagagccgcctgaagactccctgtcagtggaccactttcaaacacagacagagccagtggacctgagcattaacaaggctaggaccagtccaactgcagtgtcctcctctccggtgagtatgaccgcatctgcttcttctccatcctcaactagcaccagctcctccagttcctccaggctcgctagttctccaaccgtcatcacatccgtatcttccgccagtagctccagcaccgtcttaactcccggaccgctggtcgcttcagcctctggcgtgggaggccagcagttcctgcatataattcatcctgtgccaccatcgtccccaatgaacctgcaatctaacaaacttagccacgtgcatcggatacccgtggtcgtgcagtctgtgccggtcgtgtatactgccgtacgatccccagggaacgtgaacaacaccatagttgttcctctcctcgaggatggcagaggccatggtaaagcacaaatggatcccagaggattgtctcctcggcaaagcaagtctgattccgatgatgacgatctacccaatgttactctggacagtgtcaatgagacgggtagtaccgccttgagtatcgcaagggccgtccaagaggtgcacccctcaccggtcagccgcgtgcggggaaatcggatgaacaaccagaagttcccctgttctatctctcccttttctatcgagtcaacgcgccgacagaggcgaagtgaatcacctgactcacgcaagagacgcattcatcgctgtgacttcgaaggctgcaataaggtgtatacaaagagcagtcacctgaaggcacatcgcagaacccacacgggcgaaaaaccctacaaatgtacctgggagggctgtacatggaagttcgcccgaagcgatgagctgaccagacactatcggaaacacactggcgtcaagccttttaagtgtgcagattgcgacagatccttctctcggagcgaccatctcgcattgcatagaagaagacacatgttggtatag

SEQ ID NO: 227960 - DNA, 867 bp, synthetic construct
  misc_feature 1..867: note = Description of Artificial Sequence: Synthetic coding sequence
  source 1..867: mol_type = other DNA
atggcggctgccgcatatgttgaccacttcgccgctgagtgcctggtctcgatgtcctcacgcgcagtagtccacggtcctcgggaaggaccggagtcaaggcctgagggcgcagcagtcgctgccactccgacacttcccagagtggaggaacggcgagatggcaaagatagcgctagcctgtttgtcgtcgcaagaatcttagccgacctcaatcagcaagccccagcccctgctcctgccgaacgacgggagggagctgccgcacgcaaagcccgaacaccttgtaggcttccaccgccagctccagaaccaacgtccccgggtgccgagggagctgcggctgcaccaccatccccggcatggagtgagcctgagccagaggccggactggagcctgaaagggagcctggtccagctggctcaggtgagcctgggctgcgacagcgcgtcaggcggggacgctctagagcggatctcgaatcccctcagcgaaagcataaatgtcattatgctggatgtgagaaagtctacggcaagtcatcccatctgaaagctcacctgcggacccacacaggagaacgcccttttgcatgcagctggcaggactgtaataagaaattcgctcgcagtgacgagttagcccgacattacagaactcacactggggaaaagaagttttcctgtcctatctgcgagaaacgatttatgcgttcagaccaccttaccaagcatgccagacggcatgcgaactttcaccctgggatgctgcaaagacgcggaggcggatcccggaccggaagtcttagtgattacagccggagcgatgcctcgagccccacaatatcgcctgcctcgagcccctag

SEQ ID NO: 227961 - DNA, 1251 bp, synthetic construct
  misc_feature 1..1251: note = Description of Artificial Sequence: Synthetic coding sequence
  source 1..1251: mol_type = other DNA
atggtagaccacctcctgcccgtggacgagaatttctcttctcctaaatgtcctgtggggtacttaggagaccggttagtggggagaagggcataccacatgctgccatcccccgtttcggaagatgacagcgacgcctcttctccttgcagttgttccagtccagattctcaggccctttgctcatgctatggcggtggactgggaaccgagtcgcaagattcgatcctggactttctgctgagccaggcgaccctgggaagcggtggaggatctgggtcatctatcggagcgtcaagcggaccagttgcttggggcccatggcggcgagccgcagcccctgttaagggggagcacttttgcctgcccgagtttccgctcggggaccctgatgacgtcccccgaccatttcagccgaccttggaggaaatcgaagagtttttggaagaaaacatggaacccggagtgaaggaggtgccggaaggaaattctaaggacttggatgcatgcagtcagctctcggctggtccacacaagtctcacctgcacccgggtagctctggacgggagcgctgcagccctcctccaggcggagctagcgcaggcggagcgcagggtccgggtggcggtcccacgcctgacggacctatacccgtactgcttcagatccagcccgtccctgtgaaacaagagagtggaacaggcccagcatctccgggacaagcacctgagaacgtgaaagttgctcaactcctggtgaacatacaaggtcaaacatttgccctggtgcctcaggttgttccaagctctaatttgaacctgcccagcaagtttgtacggattgctcccgtgcctatcgccgctaaaccggtaggatccggcccactaggccctggccctgcaggtctgcttatggggcagaagtttcctaaaaatcccgcagcggagttaatcaagatgcacaaatgtacattccctggctgttcaaaaatgtatacaaagagctcacatctgaaagcacacctccggcgtcacactggtgaaaagccatttgcttgcacctggccaggttgcggctggagattttcgagaagtgacgagctaagtcgccatcgacgctcccactcgggagtgaagccgtatcagtgcccggtctgtgaaaaaaaatttgctaggtcggaccacctctccaagcacatcaaagttcatcggttcccgcgttcgtcccgctcggtgagatccgtaaactag

SEQ ID NO: 227962 - DNA, 1068 bp, synthetic construct
  misc_feature 1..1068: note = Description of Artificial Sequence: Synthetic coding sequence
  source 1..1068: mol_type = other DNA
atggcgctctcagaacctattctgccttctttctctaccttcgcgtcaccttgtagggaacgtggtctccaagaaagatggcctagggcagagcctgagtcaggtgggactgatgacgaccttaactctgttttggacttcatcctctctatgggtctcgacggtctgggagccgaagctgccccagaaccccctcctcctcccccacctccagccttctattatcctgaaccaggagctccaccaccctactccgcccctgccggtggactcgtatccgagctgctgcgaccagaactggatgcaccactgggacccgcactacacggtagattcctcttagccccaccaggtcgccttgtgaaagctgagccaccagaagctgacggtgggggtggttacggttgtgcacctggtctcacccggggtccccgtggactcaaaagggagggtgcgccaggtccagcagcgagttgtatgcgcggaccaggtgggcgtccgccacctccacctgatactcctcctctgtcccccgacggtcccgcaagactccccgctcccggaccacgagcttctttcccccctccttttgggggaccaggctttggcgcacctggccctggtcttcactacgcaccccctgctcccccagccttcggacttttcgacgatgctgcggctgccgctgctgccctaggactcgccccaccggcagccagaggcttgcttactccccctgcctctccactagaattactagaggccaaaccaaagcggggacggaggtcctggcccaggaagcgtaccgccacccacacttgttcttatgctggatgcggtaaaacgtatactaagagtagccacctgaaagctcatctgaggacacacaccggagaaaagccttatcattgcaactgggatgggtgcggctggaaatttgccagatccgacgaattaaccagacactatcgtaaacataccggtcatagaccctttcagtgccacctttgcgaccgggctttttctaggtcagaccatcttgcccttcacatgaaacgccacatgtag

SEQ ID NO: 227963 - DNA, 234 bp, synthetic construct
  misc_feature 1..234: note = Description of Artificial Sequence: Synthetic coding sequence
  source 1..234: mol_type = other DNA
atggacgtgttgccaatgtgctccatttttcaagagctccagattgtgcacgaaaccggctactttagcgcgctgccatccttagaggagtattggcagcaaacatgcctggaactcgaacgatatcttcagtcagagccatgttacgtgagcgcaagcgagataaagtttgattcccaggagagcgttgatcagaaccattggttggggagaaaaaggagaaacccgaactag

SEQ ID NO: 227964 - DNA, 846 bp, synthetic construct
  misc_feature 1..846: note = Description of Artificial Sequence: Synthetic coding sequence
  source 1..846: mol_type = other DNA
atggacgttctgccaatgtgctctatattccaagaattacaaatcgtgcatgaaacaggctatttttcggcccttcccagtctggaagagtattggcaacagacctgcctggagctggaacgttatctccagtcagaaccgtgctatgtctctgctagcgaaatcaaattcgacagtcaagaagatctgtggaccaaaatcattctcgcgagggagaagaaggaggaaagcgaacttaaaataagttcttctccacctgaagatactctgatcagccccagcttctgttataacttagagacaaacagtttgaatagcgacgtgtccagtgagtctagtgattctagcgaagagctgtccccgacggctaaatttacttctgatcccataggagaagtgctggtgtcgtccggcaaactcagttcatccgtgacatccactccaccttcttcccctgaacttagtcgggagccttcacagttgtggggatgtgtgcctggagaactgccatctccaggaaaggtaaggtcaggaacaagcgggaaacccggagacaagggtaacggtgacgctagtcccgacgggcgaaggcgggtccaccggtgccatttcaatgggtgcaggaaagtatacacaaagtcctcccacttgaaggcacaccagcggacacatacaggccaatgcccgcgtgggccaagacgcgcagctgcagggggacgacactgcatagcaccagccctcgagggagccggacccggatgcacaggatgcggacagggtcggcaaattctgacttccagcgatgtctttcatcagagcatacgcagcttttggagcagtgagtag

SEQ ID NO: 227965 - DNA, 852 bp, synthetic construct
  misc_feature 1..852: note = Description of Artificial Sequence: Synthetic coding sequence
  source 1..852: mol_type = other DNA
atggatgtgttgccaatgtgttccatcttccaggaactccaaattgtccacgaaactggctacttttcagcactgcctagtttagaggaatattggcagcaaacatgcctggagctagagcgctatcttcagagcgagccttgctacgtgtcggcctccgagattaagtttgactcacaagaggacctctggaccaaaataattttggcaagggagaaaaaggaggaatccgagttaaaaatcagctctagccctcccgaggatactttaatatccccaagtttctgctacaacctggagacgaactctctgaacagtgatgtttcatccgagtcatccgacagcagtgaggaactcagtcctactgccaaatttacctcagaccctataggcgaagtgctggtgagcagtgggaagctgtcttcctcggtgacctcaacccccccttcgtctcctgaactttctagggaaccctcacagctttggggttgcgtgcctggtgagctgccatcccctgggaaggtgcggtcggggacaagcggcaaaccaggtgacaagggcaatggagatgctagtcctgacggaaggagacgagtgcaccgctgccatttcaacggttgcagaaaagtctataccaagagtagtcacctgaaggcacatcagcggacccacaccggtgaaaagccttacaggtgtagttgggaaggatgcgagtggcggtttgcaaggtccgacgaattgaccaggcacttccgcaagcatacgggagcaaagccttttaagtgttcccactgcgaccgctgcttctccagatctgaccaccttgccctgcacatgaagaggcacttgtag

SEQ ID NO: 227966 - DNA, 714 bp, synthetic construct
  misc_feature 1..714: note = Description of Artificial Sequence: Synthetic coding sequence
  source 1..714: mol_type = other DNA
atggatgtccttcctatgtgcagcatattccaagaactgcagatcgtccatgaaacaggctatttctcggcgcttccctccctggaggagtactggcagcagacatgtctggaactggagcgctatctgcaaagtgagccctgctatgttagtgccagcgaaatcaagtttgattcccaagaggacctgtggacgaaaatcattctggccagggagaagaaagaggaatctgagttaaaaatcagttcttcaccacccgaggacacactgatctcccccagtttctgttataacttagagaccaactctctgaactccgacgtgtccagtgaatcatcagacagctctgaggaattgtccccgacggctaaatttaccagtgatccaatcggcgaagtgcttgtatcgtccgggaagctttcttcttccgtgacttctacaccaccttcttccccagagctgtcccgcgagccatctcagttgtggggatgtgtccccggagagctgccctcacccggtaaagtgagatccggaactagtggtaagccaggcgataaggggaacggggatgcaagcccagatggaaggaggcgcgtgcacaggtgccatttcaatggctgtcgcaaagtctacacgaagtcaagtcatctgaaagcccaccaaagaacgcatacgggagttttccccggtctgactacttggccctgcacttag

SEQ ID NO: 227967 - DNA, 909 bp, synthetic construct
  misc_feature 1..909: note = Description of Artificial Sequence: Synthetic coding sequence
  source 1..909: mol_type = other DNA
atggatgttttggcatcctactcgatttttcaggaacttcagctggtgcacgatactggctacttttctgcactgccctcattggaggagacatggcagcagacctgtttagagctggagcgttatttgcagaccgaaccgcgacgcatctcggagacgttcggagaggatcttgattgtttccttcacgcatcacctcccccatgcattgaagaaagctttagaagactggaccctttactgctccccgttgaggccgctatctgcgaaaaatcaagtgccgttgatattcttcttagtagggacaagctgctgagtgagacatgcctgtccctccaacctgccagttccagcctggacagttacacagcagtgaaccaggcacagttgaacgcggtaacctctctcactccgccatcttctccagagctgagccgtcacctcgtcaagactagccagactcttagtgcagtggacggaaccgtgacccttaagctcgtggccaagaaggcagcactttcaagtgtcaaggtcggcggagtggctacagctgccgctgctgtcactgccgcaggggcagtcaaaagcggccagtccgacagtgatcaggggggtctcggtgcagaggcctgtcctgagaacaagaaaagggttcatcgttgccagtttaatggctgtcgaaaggtgtacacaaagtcaagccacctgaaggcccaccaacggactcatactggagaaaagccctacaaatgcagctgggagggctgcgagtggcggttcgcacggtctgacgaactgacccgccattacaggaaacacaccggtgccaaaccatttaaatgcaaccattgcgatcgctgcttctcccggagcgatcaccttgccctccacatgaagcgccatatttag

SEQ ID NO: 227968 - DNA, 825 bp, synthetic construct
  misc_feature 1..825: note = Description of Artificial Sequence: Synthetic coding sequence
  source 1..825: mol_type = other DNA
atgttcccttcttggcccacatgtctggagctagaaagatacctacagaccgaaccgaggcggatcagcgagacattcggagaagacctagactgctttctacacgcctccccccctccgtgcatcgaggaatccttccgcaggctggatccgctattgcttccagtggaggctgcaatatgtgagaagtcaagcgccgtagatattcttctgagcagagacaagctactttcggagacctgcctgagtttgcaacctgcttcttccagcttggactcctacactgctgtgaatcaggctcaactgaatgcagtgactagtttaaccccgcctagtagccccgaactctcacgtcacttggtcaaaactagccaaactctaagtgcagtggacgggaccgtgacactcaaactcgtcgcaaagaaggccgctctcagtagcgtgaaagtcggcggagtcgccacggcagccgctgctgtgaccgccgctggggctgtgaaaagcggtcagagcgactccgatcagggcggtctaggcgcagaggcttgtccagaaaataagaagcgggtgcaccgctgccagtttaatggctgccgaaaagtgtataccaaatccagccatctcaaagcccaccaacgcacacacaccggtgagaaaccttacaaatgctcctgggaaggatgcgaatggagattcgccaggagcgatgagttgaccaggcactaccgcaagcataccggggctaaacctttcaagtgcaaccactgcgacaggtgtttttccagatccgatcacctggcgttgcatatgaaacgtcatatctag

SEQ ID NO: 227969 - DNA, 810 bp, synthetic construct
  misc_feature 1..810: note = Description of Artificial Sequence: Synthetic coding sequence
  source 1..810: mol_type = other DNA
atgacatgcctggaactcgaacggtacctgcaaactgagcccaggcgtattagcgagacatttggggaggacttagattgtttcctgcacgcctcgccaccaccgtgcattgaagaatccttcaggagactcgatccgctcctcctgcctgtggaagcagccatctgtgagaagtcctctgcagttgacatactgctttctcgagacaagctgttgagtgaaacttgcttgtctctgcagccagcctcctcctccctggactcgtataccgcagttaatcaagcgcagctcaacgcggtcactagtcttacgccgccatccagtcccgaactgtctagacatttagtcaaaacctcacagacgctttctgccgtcgacgggaccgtaaccctgaagctcgtcgcgaagaaagcagccctctcctctgtgaaagtgggcggagtggccacagccgcagctgctgtcaccgccgctggagctgtcaaaagtggtcaatcggactctgatcaggggggacttggggctgaggcatgccccgaaaacaagaagcgggtgcaccggtgccagtttaatgggtgccggaaggtgtacacaaaatcttcacatttaaaggcccaccaaagaacccacactggagagaagccatacaaatgcagctgggaggggtgcgaatggcggttcgcacgtagtgatgagctcacccgccactaccgcaagcatacaggagccaagccctttaagtgcaaccattgtgacaggtgcttctccagaagcgaccaccttgctctgcacatgaagagacatatatag

SEQ ID NO: 227970 - DNA, 339 bp, synthetic construct
  misc_feature 1..339: note = Description of Artificial Sequence: Synthetic coding sequence
  source 1..339: mol_type = other DNA
atggacgtcttagccagctatagcatattccaggaactgcaactggtgcatgacaccggatatttctctgctctcccgagtctggaagagacatggcagcagacatgtctggagctggagaggtatctgcagaccgagccccgaagaatcagcgaaacgtttggggaggacctggactgctttctccacgcctccccacccccatgcatcgaggaaagtttcagacggctagacccgttattgctcccggtcgaagccgctatttgcgaaaagagctctgctgtggacatacttctctcgcgggacaaactcttgtctgaaacatgtctgagcttatag

SEQ ID NO: 227971 - DNA, 183 bp, synthetic construct
  misc_feature 1..183: note = Description of Artificial Sequence: Synthetic coding sequence
  source 1..183: mol_type = other DNA
atggacgtactggcttcttattccatattccaggaacttcaattagttcatgatactggatattttagcgccctcccctctcttgaggaaacctggcagcagacttgtctcgagctcgagcgctacttacagactgaaccacggagaattagcgagacttttggcgaggacctcgattgttag

SEQ ID NO: 227972 - DNA, 339 bp, synthetic construct
  misc_feature 1..339: note = Description of Artificial Sequence: Synthetic coding sequence
  source 1..339: mol_type = other DNA
atggacgtgttggcgtcttattccatattccaggaacttcaactggtccacgacactggctatttttccgccctcccatcactcgaggagacctggcagcagacgtgcctagagttggaaagatacctgcagacagagcctcgaagaatctctgagacgtttggtgaaaaaccgtataagtgctcctgggaaggatgcgaatggcgttttgcgaggtccgacgaacttacacgacattaccggaaacacacaggcgctaaacccttcaagtgtaaccactgtgataggtgtttcagtaggagtgaccatctggcgctgcacatgaagaggcacatttag

SEQ ID NO: 227973 - DNA, 774 bp, synthetic construct
  misc_feature 1..774: note = Description of Artificial Sequence: Synthetic coding sequence
  source 1..774: mol_type = other DNA
atggtcgacatggataaattgattaacaaccttgaagttcagctcaatagcgagggcggatctatgcaggtctttaagcaggtgacagcctctgtgcggaaccgcgatcctccagaaatcgaatatagatctaatatgacctccccaacactactggatgcaaatccaatggaaaatccggcactcttcaatgatatcaagatcgagccaccagaggagctattggcgtccgattttagcctgccccaggtcgaaccagtagacctcagctttcataagccgaaagcccctcttcagccggcatcaatgctgcaggctcccattaggccaccaaagccacagtcatctccccagaccctcgtggtttccacttccacatcagatatgagcacctccgcaaatatccctaccgtgctgaccccaggcagcgtactgacttcttcgcagtccacgggctcccagcagatcctacacgtgatacacacaatcccctccgttagcctgcccaacaagatgggcggactgaaaaccattcctgtggtcgttcagtctctgcctatggtatacaccactttaccggcagatggaggaccggctgcaatcacagtgcctctgatcggcggagatggtaagaacgctggttctgtgaaggtcgaccctacgagcatgtcacctctagaaatcccctcggacagcgaggagtcgaccatcgagtcaggttcctccgctttgcaatccctccaggggcttcaacaggaaagggaagctttgtag

SEQ ID NO: 227974 - DNA, 1080 bp, synthetic construct
  misc_feature 1..1080: note = Description of Artificial Sequence: Synthetic coding sequence
  source 1..1080: mol_type = other DNA
atggtcgacatggacaaactaattaacaacctggaggtccagctgaacagcgagggcggtagcatgcaggtgttcaaacaggtcaccgcttcggtgaggaatagggatccacccgagatagaatacagatcaaatatgacgtctccaacactcctagatgccaatcccatggagaacccggctctgtttaacgacataaagatcgagccccctgaagagctgctggcatccgacttttcactgccccaggtcgagcctgtagatctctcttttcacaagccaaaggcccctctgcagccagccagcatgctgcaagctcctatccgtccccctaagccacagtcatcacctcagactttggtagtgagcacatccaccagtgatatgagcacctcagcaaatattccaacggtcttaactccaggctctgttctcaccagttctcaaagcaccgggtcccagcagattttacatgtcatccacaccattccctctgttagcctacctaataagatgggtggactcaagacaatccccgttgtggtgcagagcctgccaatggtatacacaacactcccagctgatggtggccctgccgcaattacggtacctttgataggtggtgatggaaagaatgccggatccgtgaaagtcgatccaaccagcatgagcccactcgagatcccttctgactccgaggaaagcacaatagaatccggcagtagtgcactccagagtttgcagggtcttcagcaggagcctgcagcaatggcacaaatgcaaggggaggagtcattggacctgaagcggagacggattcatcaatgtgacttcgcgggatgctccaaggtgtatacaaaaagtagtcacctgaaggcgcacaggcggatacacaccggggaaaaaccttacaagtgcacctgggacggttgttcatggaagttcgccaggtcagacgagctaacaagacactttcgcaagcatacaggaattaaaccttttcgttgcacggattgcaacaggtcattttcacggtcggaccacctgtcactgcatagaagaagacacgacaccatgtag

SEQ ID NO: 227975 - DNA, 771 bp, synthetic construct
  misc_feature 1..771: note = Description of Artificial Sequence: Synthetic coding sequence
  source 1..771: mol_type = other DNA
atgcagccagccaaggaagtgactaaggcttccgacggctctctgctgggcgaccttggacacactccgctcagcaagaaagaagggatcaaatggcaaagacccaggttatctagacaggcgctgatgcgctgttgcctggtgaagtggatactgagtagcaccgcccctcaagggtcagatagttcagatagcgagctggagttatcaacggtcagacaccagccagaaggtttggaccagctccaggcccaaactaagttcacaaaaaaggagctccagtccttgtatcgtggcttcaaaaatgaatgtccaactggcctggttgatgaagacacattcaaactcatttatgcccagttctttccgcagggtgatgccacaacttatgcccactttttatttaatgcgttcgacgctgatggaaacggagctattcacttcgaagacttcgtcgtgggactctccatcttgctcaggggaacagtccacgaaaagctgaagtgggccttcaatctgtatgacatcaacaaggacggctatatcacaaaggaggaaatgctggcaataatgaaaagcatctacgatatgatgggccgtcacacatacccaatcctaagggaggatgcaccggctgagcacgttgagcgtttttttgagaaaatggaccgcaatcaggacggagttgtgactattgaggaattccttgaggcatgccagaaggatgaaaacatcatgtcatccatgcagctttttgagaacgtcatctag

SEQ ID NO: 227976 - DNA, 705 bp, synthetic construct
  misc_feature 1..705: note = Description of Artificial Sequence: Synthetic coding sequence
  source 1..705: mol_type = other DNA
atgcaacccagaaaggaggttacgaaggccagcgatgggagcctgctcggggacctgggccacacccccctgtcaaaaaaagaggggattaagtggcagcgtccacgtttgagccgacaggccctaatgcgatgctgccttgtcaagtggatactctccagtaccgccccacaggggagtgactccagcgattctgagctcgaactttcaaccgtgaggcaccagcctgaaggcttggatcagctccaggctcagacaaaattcaccaagaaagagctccagtctctttatcgcggatttaaaaatggcgacgcgactacatatgcccattttctctttaacgcatttgacgcagatggaaatggagctatccactttgaggatttcgtggtgggtttgagtatcttactacgcggaaccgttcacgaaaagctgaagtgggcctttaatctgtatgatattaacaaagacggctatattacgaaagaagagatgctggccattatgaagtctatctacgatatgatgggtagacacacttaccccatcctgcgagaagatgctcctgcagaacacgtagagaggtttttcgagaaaatggacaggaaccaggacggcgtggtgactatcgaagaatttctggaagcgtgccagaaggacgaaaacattatgtcctccatgcagctgtttgagaatgtgatctag

SEQ ID NO: 227977 - DNA, 693 bp, synthetic construct
  misc_feature 1..693: note = Description of Artificial Sequence: Synthetic coding sequence
  source 1..693: mol_type = other DNA
atgggtattcaggggatggagctgtgcgccatggctgtggtcgtacttctgttcatagctgtgctcaaacagtttggaatcctggagccaattagtatggaagattctagtgactccgagctggagttgagtaccgtgagacaccagccggaaggcctcgatcagctccaagcccagacaaaattcaccaaaaaggaattgcagtccctgtatcgaggtttcaaaaacgaatgtccaacaggattggtggatgaggatacttttaaactgatttatgcacagttttttccgcagggggatgccaccacatacgcccacttcttgttcaacgccttcgatgcggacggcaatggtgccattcattttgaagatttcgtagttggcctgagcattctcctgcgcggaactgtccacgagaagttgaagtgggctttcaacctttacgatatcaataaggatggctacatcacaaaggaagaaatgctggctataatgaaaagcatatacgatatgatggggcgtcatacctatccgatattgcgagaagatgcccctgccgagcatgtggagagattttttgagaagatggacaggaatcaagacggtgtggtcaccatcgaagaattcctggaagcttgccagaaggacgagaacatcatgtcatccatgcagctctttgagaatgtcatctag

SEQ ID NO: 227978 - DNA, 567 bp, synthetic construct
  misc_feature 1..567: note = Description of Artificial Sequence: Synthetic coding sequence
  source 1..567: mol_type = other DNA
atggccacagttcgacacaggcccgaggctctggaactcctcgaagcgcaatctaagttcactaagaaagagctacaaattctgtaccgagggttcaaaaacgagtgcccttcaggcgtggttaacgaggagacatttaaggagatttactcccaattttttccgcagggcgatagcaccacgtatgcacacttcttattcaatgcattcgacacagaccacaatggggctgtgtctttcgaggactttattaaggggctaagcattctgctgcgaggaacggttcaggagaaactcaattgggcttttaacttatatgacattaataaagacggatacatcaccaaggaggaaatgctggacattatgaaagccatttacgatatgatgggcaagtgcacgtatccggttctgaaggaggatgctcctaggcagcatgtcgaaactttcttccagaagatggacaagaacaaagatggagtggtgacgatcgatgaattcatcgaatcttgccagaaggatgagaacataatgagatctatgcagctgtttgaaaatgtgatctag

SEQ ID NO: 227979 - DNA, 678 bp, synthetic construct
  misc_feature 1..678: note = Description of Artificial Sequence: Synthetic coding sequence
  source 1..678: mol_type = other DNA
atgtccgggtgccgaaaacgatgtaagagggagatcttgaagttcgcacagtaccttttgcgcctgctaacaggcagcctccacaccgacagtgttgaggatgagttagagatggctaccgtaaggcacaggccagaagctcttgagctcctggaagctcagtcaaaattcaccaagaaggaactacagatcctgtataggggttttaagaatgaatgtcctagcggcgtagtcaacgaggagaccttcaaagagatttactctcagtttttcccacaaggagacagtacgacatatgcccacttcctgttcaacgcattcgatacagatcacaatggagccgtcagtttcgaagatttcataaaggggcttagtatcctgctccgagggaccgtgcaggagaagctgaattgggcattcaatctgtacgacataaataaggacggctacatcacgaaggaggagatgctagacattatgaaagctatctatgacatgatgggcaaatgtacataccccgtgctgaaggaagatgcgcctaggcagcacgtcgagacgtttttccagaaaatggacaagaataaagacggtgtcgttactatcgacgagttcatcgaatcctgtcaaaaggacgagaacatcatgcgtagcatgcagctgttcgaaaacgttatatag

SEQ ID NO: 227980 - DNA, 690 bp, synthetic construct
  misc_feature 1..690: note = Description of Artificial Sequence: Synthetic coding sequence
  source 1..690: mol_type = other DNA
atgaatctagagggtttggaaatgatagccgtcctcatagttatcgtcctgttcgtgaagctgctggagcaatttggactgatcgaggctgggttagaagattccgtggaggacgagctggagatggctacggtgcggcatcgtccggaggctcttgagctgcttgaagcgcaaagcaagttcaccaaaaaggagctgcagattctgtaccggggtttcaagaacgagtgtcctagtggcgtggtcaacgaggaaacattcaaagagatttactcccagttcttcccccagggggatagtaccacgtacgcccattttctgttcaatgcttttgatactgatcataacggagccgtcagcttcgaagatttcatcaagggattatcaattttactaagggggacagttcaggagaagctgaactgggcctttaacttatatgacatcaacaaggacgggtacattaccaaggaagaaatgctggacatcatgaaagccatctatgatatgatgggtaagtgtacataccccgtactgaaggaggacgctccccgtcagcacgtcgagacgtttttccagaaaatggataaaaataaagatggcgttgtgactattgacgagttcatcgaatcttgtcagaaggacgagaatatcatgcgaagtatgcagctgttcgagaacgtgatatag

SEQ ID NO: 227981 - DNA, 753 bp, synthetic construct
  misc_feature 1..753: note = Description of Artificial Sequence: Synthetic coding sequence
  source 1..753: mol_type = other DNA
atgaatgtacggcgagtcgagagcattagcgctcagctcgaggaagctagttcaacaggtggctttttatatgcacaaaatagcaccaagcgctccattaaggaacgcttgatgaaactcttaccatgcagtgccgcaaagacttcaagtcccgctattcagaatagcgtagaagatgaactcgagatggccacagtgagacaccgccctgaggccctggaactacttgaggcccagtctaagtttaccaagaaggaacttcagatattgtatcgcggtttcaaaaacgagtgcccgtccggcgtggtgaatgaggagaccttcaaagaaatctactctcagttttttccccagggggacagtacaacctatgcccattttttgttcaatgccttcgacactgatcataacggcgctgtgagcttcgaagattttatcaaggggttgtccatattgcttcggggaaccgtgcaagaaaagctgaattgggccttcaacctgtatgacattaacaaggatggttatataactaaagaagagatgctggacattatgaaagccatttacgacatgatgggtaagtgtacctatcccgtcctaaaagaggatgcaccccgacagcatgtcgagaccttttttcagaagatggacaaaaataaggacggagttgtcacaatcgacgagttcatcgaaagctgccagaaggatgaaaacattatgcgcagtatgcaattgtttgagaacgtcatttag

SEQ ID NO: 227982 - DNA, 567 bp, synthetic construct
  misc_feature 1..567: note = Description of Artificial Sequence: Synthetic coding sequence
  source 1..567: mol_type = other DNA
atggccaccgtgcggcaccggcctgaagctttagaactgctggaggcacagtcgaagttcaccaaaaaggaacttcaaattctgtaccgcggtttcaagaacgagtgtcccagcggagtggtgaacgaagagaccttcaaggagatttactctcagttctttcctcagggagactccacaacttacgcacatttcctcttcaatgcctttgacactgaccataatggcgctgtttcctttgaggatttcattaagggcctgtcaattcttctgcgaggcacagttcaggagaagctgaactgggcctttaatctctacgacatcaacaaggacggctatattacaaaggaagagatgttagacataatgaaggccatttacgatatgatgggaaagtgtacttaccccgttcttaaagaggatgcacccaggcaacatgtggagacgtttttccagaaaatggacaagaacaaggacggtgtggtgacaattgatgagtttattgaatcttgccagaaggacgaaaatataatgcggtccatgcagctgtttgagaatgtgatctag

SEQ ID NO: 227983 - DNA, 651 bp, synthetic construct
  misc_feature 1..651: note = Description of Artificial Sequence: Synthetic coding sequence
  source 1..651: mol_type = other DNA
atgaacgtcaggcgcgtagaaagtatcagcgcccagttagaggaggccagctccacgggggacagcgtcgaggacgagctcgagatggccacagttaggcacaggccagaagccctcgagttactcgaggcacagtccaagtttaccaagaaggaactgcagatcctgtatagaggctttaaaaacgaatgccccagcggggtcgtaaatgaggagacgttcaaggaaatctattctcagtttttcccacagggtgattccaccacttatgcgcactttcttttcaacgcgttcgataccgaccacaatggggctgtctcttttgaggacttcattaagggactgtctatccttctgaggggcactgtccaggaaaagctcaactgggcttttaacctctacgacataaacaaggatggctatattactaaagaggaaatgctagacattatgaaggcgatctacgacatgatgggtaaatgtacctaccccgtgttaaaagaggatgccccacgtcagcatgtggagactttcttccagaagatggacaaaaataaagacggcgtggtgactatagatgagtttatcgagagttgccagaaggatgaaaatattatgaggagcatgcagctgtttgaaaatgtcatttag

SEQ ID NO: 227984 - DNA, 567 bp, synthetic construct
  misc_feature 1..567: note = Description of Artificial Sequence: Synthetic coding sequence
  source 1..567: mol_type = other DNA
atggcgacggtgcggcacaggccagaagccctggagttgcttgaagcacagtcgaagtttactaagaaagagctgcagattttataccgcggatttaaaaacgaatgcccgagcggtgtggttaacgaggagacctttaaggagatatactctcaattctttccccagggggattccacaacctatgctcacttcctctttaacgctttcgataccgaccacaacggcgctgtttctttcgaagatttcattaagggactgagcatcctgctccgtggcacggtgcaggagaagttaaattgggcgttcaacctatacgatataaacaaggatgggtatatcaccaaagaggagatgctcgatattatgaaggccatctatgatatgatggggaagtgtacataccccgtcctcaaggaggacgctccaaggcaacatgtagaaacctttttccagaagatggacaaaaataaggacggcgtggtgacaatcgatgagttcattgaaagttgtcaaaaggatgaaaacatcatgcgaagcatgcagctgttcgaaaatgttatctag

SEQ ID NO: 227985 - DNA, 549 bp, synthetic construct
  misc_feature 1..549: note = Description of Artificial Sequence: Synthetic coding sequence
  source 1..549: mol_type = other DNA
tagggaatgaacgcgggtttcgaggactgcctagtctttgacgagcttatggacaagttcagcaatgacctgagcctgtgtcttccggtgttcagtcgtctgcgcatacccgacgaccacgctatctcagacctttcaatgtataattatattgaaatgagggcccacgtcaatagctcatggttcatcttccagaaaaatatggagcgttttttacacgccatcatgccaagtacctttattccactgtacaccatggttacttttagtaggattagatatcatgaggccgtgcaaaggtggcattggcagaagaaggtcatcaacaagggtctcttctttctgggaagcctcatcgcgattagttctacgtatctgctgattcactatatgtctccccgttccttcctgcgcctgcgcagaccctggaactggattgcccacttccgcaacacaacctgtttccctgctaaggctgttgactccctggagcagatcagcaaccttatttcacgcttgcttagccattctgaaatcctgcagacctag

SEQ ID NO: 227986 - DNA, 1359 bp, synthetic construct
  misc_feature 1..1359: note = Description of Artificial Sequence: Synthetic coding sequence
  source 1..1359: mol_type = other DNA
atggattcctctgtgatccaacgaaagaaagttgccgtaatcggaggaggccttgttggctccctgcaggcatgttttctcgctaaaaggaatttccagattgatgtctacgaggctcgggaggatactagggtggccaccttcacacggggacgcagtattaacctggctttgtcccacaggggcaggcaggcacttaaggccgtgggtctggaggaccagatcgtttctcaggggattcccatgcgggctcgaatgattcatagcctcagtggcaagaaaagcgctattccctatggcacgaagagccaatacatcctgagcgtcagccgcgaaaaccttaataaggacctacttacggccgcagagaagtaccccaatgtcaaaatgcatttcaatcatcgtcttcttaagtgtaatccagaggaagggatgattactgtgctggggtccgacaaagtccccaaggacgtgacctgtgatctcattgtgggctgcgatggcgcatactccaccgtgagatcacacctgatgaagaagccgcgatttgattattcacagcagtatattcctcacggatacatggaattgactatccctcctaaaaatggggattacgccatggagccgaactatttgcacatatggccgcgtaacacattcatgatgattgcgcttcccaatatgaataaaagcttcacttgcaccctgtttatgccctttgaggagttcgaaaagctactcacgtcgaacgacgtcgtggacttttttcaaaagtacttccctgatgccataccactcattggggaaaagctgctggtccaggatttcttcctgctgccagcgcagccgatgatcagcgtgaagtgctccagtttccattttaagagccattgcgtgttgctgggcgatgcagcccacgctatcgtgccgttctttggacaaggcatgaacgccggtttcgaagactgcctcgtgtttgacgagctgatggataaatttagtaatgaccttagcttatgcctcccagtcttttccaggctcagaatccctgatgatcatgccatcagcgatctgtctatgtacaattacatcgaggtgaccttttccagaatccgctaccacgaggcagtgcagagatggcactggcagaagaaagttatcaataagggcctgttcttcttaggaagccttattgcgatttcttccacctacttactgatacattacatgtcgccacgttctttcctcagactcagacggccttggaattggattgcacatttcaggaacactacctgctttccagcaaaagccgtagacagtttagaacagatttccaatctgatatcacgatag

SEQ ID NO: 227987 - DNA, 1422 bp, synthetic construct
  misc_feature 1..1422: note = Description of Artificial Sequence: Synthetic coding sequence
  source 1..1422: mol_type = other DNA
atggactcttccgtgatccagaggaagaaagtggccgtcatcggcggaggacttgttggcagcctccaggcctgctttctggccaaacgaaatttccaaattgacgtgtatgaggcgagggaggataccagagtggcaacgtttacacgcggacgatccattaacctggcactgtcccaccgaggaaggcaggctctaaaggccgtgggactcgaggatcagatagtctcccagggaatcccaatgcgggctcgtatgattcatagtttgtccgggaagaaaagcgcgataccctacggcactaagagtcagtatatactgtccgtctcaagagagaacctcaacaaggacctcttgactgcagccgagaaatatcccaatgtgaagatgcactttaaccatcggctgctgaaatgtaatcctgaagaggggatgatcactgtgctcgggtcagacaaagtcccgaaggatgtcacctgcgacctcatagtaggatgtgatggtgcctatagcaccgtcagatcacacttaatgaagaagccacgatttgactacagccagcagtacattccacacgggtacatggaactgacgatacccccaaaaaacggtgactacgccatggaaccgaactacctccacatctggccaaggaatacctttatgatgatcgcactacctaacatgaataaatcctttacctgtacgctcttcatgcctttcgaggagtttgaaaagctgctcaccagcaacgacgtagtggactttttccagaagtacttcccggacgcgattccactcatcggagagaagttgctggtgcaggatttcttcctcctcccggctcaacctatgatcagtgtcaaatgctcctccttccactttaagtctcactgtgttttactgggagacgctgcccatgccattgtacccttcttcggacaggggatgaacgctggatttgaagactgcctggtgttcgacgagctgatggacaagttttcaaacgacctgagcctttgtttgccagtctttagccggctaagaatccccgatgaccacgcgattagcgacctaagtatgtacaattacatcgaaaaaaacatggagaggttcctgcatgccatcatgccatctacatttattccactgtacacgatggtcaccttttccaggatcagataccatgaagctgtgcagcgctggcactggcaaaagaaggtgataaacaagggattattcttcctgggctcactgatcgctattagctccacatatctgctcattcattacatgagcccccgtagcttcctcagactgagaagaccgtggaactggattgctcactttcgtaacactacttgtttcccagccaaagctgtggattccctcgagcagatatcgaatcttatctcacgttag

SEQ ID NO: 227988 - DNA, 1461 bp, synthetic construct
  misc_feature 1..1461: note = Description of Artificial Sequence: Synthetic coding sequence
  source 1..1461: mol_type = other DNA
atggactcctccgtcattcagcgaaaaaaggtggctgtgataggcggtgggctggttggcagtctgcaggcctgttttttggccaagcgcaacttccagattgacgtgtatgaggcgcgtgaagacacccgcgtggccacgtttacacgaggacgatcaatcaatctggccctgagccatagaggacggcaagcacttaaggcagtagggttggaagaccagatagtctcccagggtattccaatgcgcgctaggatgattcacagtctttccggtaagaaatctgccataccgtatggtactaaatcccagtatatcctttctgtgtccagagagaacctgaataaggacttgctgaccgcagccgaaaaatatcccaacgtgaaaatgcacttcaatcacaggctccttaaatgcaatcccgaagagggaatgatcacagtccttggatccgataaggttcccaaggacgtgacatgtgacctgattgttggttgcgacggggcatacagcactgtgcgcagccatctgatgaagaaacctcgctttgattactctcagcagtacattccacacggttacatggaactgaccatccccccaaagaacggcgactacgctatggaacccaactacctgcatatctggccacgcaacacgttcatgatgatcgccctgcccaacatgaataagtcttttacttgtacactcttcatgccatttgaggagttcgagaaactgctgacatctaacgatgtggtagatttttttcaaaagtattttcctgatgccatccctctgattggcgaaaagcttctcgtacaggacttcttcttgctgccagcccagccaatgatctctgtcaaatgttctagctttcactttaaaagccactgcgttctattgggtgacgccgcacacgccatcgtcccgtttttcgggcaaggaatgaatgcgggattcgaagattgccttgtatttgacgaacttatggacaaattcagcaatgacctaagcttatgtttgcctgtgttctcccgacttcgcattccagacgaccatgccatttcagatctctccatgtacaattacattgagatgagagcccacgtgaacagctcttggtttatcttccaaaaaaacatggaacgctttctgcatgctattatgcccagcacgtttatcccactatacacaatggtgacattttcccgaattagatatcacgaagccgtgcagcggtggcattggcaaaagaaggtgattaacaagggtcttttctttctaggctctcttattgctatatcatctacctacctcctaatccattacatgtcccctagatcattcctgaggctgcggaggccttggaattggatcgcccatttccgcaatactacttgtttcccggcaaaggccgtcgatagcttagaacaaatctccaatctaatctctcgctag

SEQ ID NO: 227989 - DNA, 1689 bp, synthetic construct
  misc_feature 1..1689: note = Description of Artificial Sequence: Synthetic coding sequence
  source 1..1689: mol_type = other DNA
atggagctcaagaaggacattaacgcagtgtctattgacatgctgttaattgtgcactcagagaagcgtagggctgctcaggggaccttgagcgaccagcaggcgaatccttcttctttactgcagcgaggcggaggttttcagggcgtcgggaatggcgtccggagatggcagaaattggagggcaatgattttcacgagaatctggtcgaaaaacagcacccgcagcagccccaagttatcacttcttacaacagtcaaggcacacagctcaccgttgaggtgcaccctagggacgcgatgccccagctcctgaaaaagtttagcttagccaaacggctgcagggggataaaaatggcaacacacgaccgagacaaccagggggaaaggacgcccacgcatacccctgggataggagtagcttgaagtcgatgtctttggatctacagcaatttgagaagttggacatctatgcctctcaggtgactgccaaatcgggcttagatgaactagtctcagacctgcttcaggaggcacacaccgatttggagagggtgcgcgcaatttggatatggatctgtcaccacattgagtacgacattgcggcagcccaagaaaaggacagacaagcatttaagcccactgacattctccgcactcagaagaccaattgtgacggctatgccggactgttcgaaaggatgtgtaggctcgctggcgtgcagtgtatgacagtgcctggatattccaaaggattcggctaccaaaccggccagtccttcagcggcgaattcgaccatgcttggaacgctgtctatctggaaggcaggtggcaccttgtagattcgacctggggtagcgggctcgtggacacaattacgtccaaatttaccttcctgtacaacgagttttacttcctaactcatcccgctttgttcattgaggaccactttcccgacaacaaaaattggcagctgctaaaacctcctcagagtcttaggcagttcgaaaataatatgtatcataaatcagagttctacaataaggggatgctgtccgctcacccagaaactagcatgattcggaccgtcaatgggaaggcgacagtgacaattgaatcatgtgcacccaccttgtttatgttcatgttaaatggaaaacaagaacatgggctcctcagcctgagaaagaatggcatgaagctcgaagtgtatcctcccaccatgggaacccacaagctccaaatttttgctaagggtaatagtgacatctactcaagtgtgctggagtatacactcaagtgcaattacgtcgatatgggtgtgcagctcccagccgagctgcaccagcctgtcgggcctagctggtttagcgagcagatgggtattatgaaaccatctcatccagacccaatcatacacactagcgacgggcgttgctcaatatcattttccgtcgaggaggggatcaacgtgctcgcaagtctccacggcgatgacggccctattactgaggagacacaaagaagatatattttccagttgcatagggagaagcagacagagctgaaggtgcaactgccgcacgccggtaagttcgcactgaaagaggtctatgtgatggttttggagaatgccaatcataacttttattcatatattttgaagtataaagtaaatgcgcagtag

SEQ ID NO: 227990 - DNA, 1986 bp, synthetic construct
  misc_feature 1..1986: note = Description of Artificial Sequence: Synthetic coding sequence
  source 1..1986: mol_type = other DNA
atggagctcaaaaaggacattaacgccgtgagcatcgacatgctccttattgtccattccgaaaagagacgggcagctcaaggaactctctccgaccagcaagcaaatcctagctcccttctccagcgcggaggtggctttcagggcgtggggaacggggtccgaaggtggcagaaattagaggggaacgacttccatgaaaacctggtggagaagcaacacccccagcagccgcaggtgatcacttcatacaactcccagggaacacaattgacagtagaggtacacccaagggatgccatgcctcaacttctcaaaaagttcagcctggccaaacgcctacagggagacaagaatggcaatactcggcctcgtcagcccggtggaaaagatgcacatgcatacccttgggaccgatcctccttaaaatccatgagccttgatctccagcagtttgagaagctggacatctatgcaagccaagtgacagcaaagtctgggctggatgagttggtttccgacctgctgcaggaggcccacacagacctggagagagttcgggctatctggatatggatttgtcatcacattgagtacgacatagccgctgcgcaggaaaaggatagacaggccttcaaaccaacagacatactgcgcactcaaaaaacaaactgtgatggatatgcaggtctcttcgagaggatgtgcagactggccggagttcagtgtatgactgtgcccggttactctaaaggctttggttaccagactggccagtcctttagtggtgagttcgatcacgcttggaatgcggtctatctcgagggacggtggcacctggttgatagtacctggggcagcggcttggtcgacaccataacatctaaattcaccttcctgtacaacgaattttactttctgactcaccccgcactctttattgaggaccactttccagataataagaattggcagctgctgaagccgcctcagtctctgagacaatttgagaataacatgtaccataagtctgagttttataataaagggatgttatcggcccaccccgagacaagcatgatccggacagtcaacggtaaggcgaccgttacgatcgaatcttgtgctcctacgttgtttatgtttatgttaaacggcaagcaagagcacggcttactgtcactgaggaagaacgggatgaagctggaagtttatcccccaacgatgggaactcacaaacttcagattttcgcaaaggggaattccgatatatactcttctgtccttgagtacactctgaagtgtaattatgtcgatatgggcgttcagctcccagccgagctgcatcaacctgtgggtccatcatggttttctgagcagatgggcattatgaaaccttcgcatccagatcctattatccatacttctgatggcagatgctccattagtttttccgtggaagagggtattaatgtgcttgcctccctccatggtgacgatgggccaataactgaggaaacccagaggagatatatcttccaactccaccgagaaaagcagacggagttgaaagtgcagctgccccacgcgggaaaatttgccctgaagatcttcgtcaaaaagcggcaggagcctggcaactacattttcgtgttcaactacctcgtgtgttgcgctaacactaaggtgaactggcccatgttccccgaatcctttgggaactgggggcaggacaacgaattactggaacctttatctggggtcctgcccgctaacaggaatgtcccgttcaagttaaaactgcatgggatcgcaaaggtgcttgtcaaagggcaggatacatggcccctgaccctgaatcacgaggggtactgggagggaagctgcagcacagctggctgccaggaggtctatgtgatggtactggagaatgctaatcataatttctattcttatatacttaagtacaaggtgaatgcccagtag

SEQ ID NO: 227991 - DNA, 1173 bp, synthetic construct
  misc_feature 1..1173: note = Description of Artificial Sequence: Synthetic coding sequence
  source 1..1173: mol_type = other DNA
atgaaattagaggcagtggacagaatgaatccatccctggtctgtgtggcaagcgtgacagacgtggtcgactctcgcttcctggtgcactttgataattgggacgatacctatgactattggtgcgatccatcatctccatacattcatcccgttgggtggtgtcagaagcaaggtaagcccttaactcccccacaggattacccggacccagacaatttctgttgggaaaaatacttggaggagaccggagcaagcgccgtacctacctgggcgtttaaagtgcggcctccacactctttcttggtgaatatgaaacttgaggcagtggaccgcaggaatccagctctcatacgggtggccagtgttgaagacgtggaagatcaccggatcaaaattcactttgacggatggtctcacggctacgatttctggatagacgcagatcatccagatatccatcccgcaggatggtgcagcaagactggacacccactgcagccccctctaggcccaagggagccatcatccgcctcaccagggggatgcccgccactgagctaccgaagtttgccccacaccagaacatcgaaatactcttttcaccatcggaaatgcccgacacccggatgcgacgggagtggacatgtgaccggcaagttcacagcccaccactgtttgagcggctgccctttagccgagcggaaccaaagtaggctgaaggctgagctttctgattcagaagcgtcagcacgaaaaaaaaacctgagcgggttcagccccagaaaaaagcctcgtcaccacggccgtatcggacgcccacctaaatacaggaagattccacaagaagactttcaaactcttacacccgacgtggtgcaccagtccctcttcatgtctgcattgtctgcacatccagaccgcagcctcagcgtgtgctgggagcaacattgtaaactgctgccaggggtcgcagggattagcgccagtaccgtcgctaagtggaccatcgatgaggtgttcggatttgttcagacgctgactggttgcgaagaccaggcaagactttttaaggatgaggttaggtgcaaatgtcgggttggagatagggctggcgtcaccgtgctcaaaacggctggaagtcggtgccccccacagcgacatttctgttag

SEQ ID NO: 227992 - DNA, 2232 bp, synthetic construct
  misc_feature 1..2232: note = Description of Artificial Sequence: Synthetic coding sequence
  source 1..2232: mol_type = other DNA
atgagacgtagggaagggcacgggaccgactccgagatgggccaagggccagtccgggaaagtcagtcctcagaccctcccgctttgcagtttaggattagtgaatacaaacctctgaatatggccggagtggagcagccacctagccccgagttgcgtcaggagggggtgacagagtacgaggatgggggtgcacctgcaggcgatggggaagctgggcctcagcaggcagaggaccatccgcaaaaccctccagaggatcctaaccaagaccctcctgaggacgatagtacatgccaatgtcaggcctgcgggccacaccaagcagcaggccctgatctcgggtccagcaacgatggctgtccacagctgttccaggaaagatctgtcatcgtcgagaactcatccgggtccacatccgcatcagaactgttaaaacctatgaagaaacgcaagaggagagaataccaatccccttcagaggaagaatccgagcctgaagcaatggaaaagcaagaagagggcaaggaccccgagggtcaaccgaccgcatcaacaccagaatcagaagagtggtcctcgagccagcccgctaccggggaaaagaaggaatgctggtcttgggaaagttaccttgaggagcagaaagccataacagccccagtgtccctgttccaggatagtcaggctgtcacacataacaaaaacggctttaagctaggaatgaaactcgaaggtatcgaccctcaacatccgagcatgtacttcatcttaactgtggcagaagtgtgtggataccggctgcgactccactttgatggatacagcgaatgccatgatttttgggtgaatgcaaactcccccgatatccatcccgctgggtggttcgagaaaaccggccataagttgcagccgcctaagggctataaagaggaagaattctcgtggagccagtacctaagatccacccgagcccaggccgctcctaagcacttgtttgtatcccagtcccactcgccaccacccctgggattccaggtgggaatgaaacttgaagccgttgataggatgaaccctagcttggtgtgcgtggcctccgtgaccgacgtggtggatagcagatttctggtgcacttcgataactgggatgacacgtatgactactggtgtgacccctctagtccctatatccaccctgtgggctggtgtcagaagcagggaaagcccctgactccaccccaggactatccagatccagataatttctgctgggagaagtacttagaagaaactggcgcttccgctgtgcccacctgggcttttaaagtacgccctccccattcatttctggtgaatatgaagttggaggctgtcgatcgcagaaacccagctctaatccgagtcgcctctgtggaagacgtggaggatcaccggattaaaatacattttgatgggtggagccatgggtatgatttctggatcgatgcagaccatcctgatatccatccagccggatggtgttccaagacaggccacccgctgcagccccctctgggacctcgggagccgtcatccgcctctccaggtggctgccccccactctcgtaccgctcattaccccacacccgcacctctaagtacagtttccaccaccggctgttcttcccaagaaaatgcccgaccccgggatgtgacgggtctggacacgtgaccggtaaattcacagctcatcactgcctgagtggctgtcctctggccgagagaaatcaaagtaggctgaaagccgagctttccgactccgaggccagtgcccgaaagaaaaatctctctggtttcagccccagaaaaaaacctcgacaccacgggaggataggaaggcccccaaaatacagaaagatcccccaggaggacttccagacactgacacctgatgtcgtccatcagtcactctttatgtctgccttatctgcgcatcccgaccgttcgttgagtgtttgctgggagcagcactgtaaactgctgccaggcgttgccggtatatcagcatccaccgttgcgaagtggactatagatgaggtattcgggtttgtgcagacgcttaccggttgcgaggaccaggccaggctattcaaagatgaggtacgatgcaagtgtcgcgtgggcgaccgagctggggtgaccgtgctgaaaacagcaggttcacgatgcccacctcagaggcatttctgctag

SEQ ID NO: 227993 - DNA, 2319 bp, synthetic construct
  misc_feature 1..2319: note = Description of Artificial Sequence: Synthetic coding sequence
  source 1..2319: mol_type = other DNA
atgaggagacgcgaaggccatggtaccgatagcgaaatggggcaaggcccagtccgcgaatctcagagcagcgaccctccggctcttcagtttagaatcagcgaatacaaacccctcaacatggcaggggtggaacaacccccttcaccagagctgcggcaggagggtgtcactgagtatgaggatggcggtgcccctgccggtgatggcgaggctggcccacagcaagccgaggaccaccctcagaatcccccagaggatccgaaccaagacccaccggaggacgattcgacctgtcagtgccaagcctgcgggccacaccaggcagcgggtcccgacctggggtcctctaacgacggttgtcctcaactattccaggagagaagtgtgattgtagagaacagctcaggctctacttccgcatccgaactcctaaagcccatgaaaaaaagaaagaggcgggagtaccagagcccatccgaagaggaatcagaaccggaagcaatggagaaacaagaggaggggaaagaccccgaggggcaacctaccgccagcacccctgagtccgaagaatggtcctccagccagcccgctactggcgagaaaaaagagtgctggtcctgggaaagctacctcgaagagcagaaggccatcacagccccagtgtccctgttccaggatagccaggccgtgactcataataagaacggtttcaagttgggaatgaagctggaaggaatcgacccacaacaccccagcatgtacttcattctgaccgttgccgaggtgtgcgggtacagactcagactgcacttcgatggatatagcgaatgtcacgacttctgggtgaatgccaatagtcctgatatccatccggcaggctggtttgagaagaccgggcacaagttgcagcccccaaagggctacaaagaggaagagttcagttggagccagtatctacgatctacgcgggctcaggccgcacctaagcacctgttcgtctcacagtcacattccccgccacctctcgggtttcaggtcggcatgaaacttgaggccgttgaccgtatgaaccccagcctagtgtgcgtcgcgagcgttacagatgtagtcgatagccgattcctggtccactttgacaactgggacgacacatatgactactggtgtgacccatcctctccctatatccaccctgtggggtggtgccagaaacaggggaagcctcttacacctccacaagattatccggatcctgataacttctgttgggagaaataccttgaggaaaccggggcaagtgcagtccctacctgggcattcaaggtgcggccacctcacagcttcctggtcaatatgaagctggaggctgtagatagacggaatcccgcacttattagggtggcctcagtggaggacgtcgaggaccatcggatcaagatacacttcgatgggtggtcccatgggtatgacttctggattgacgctgaccatccggacatacaccccgcaggatggtgctctaaaacaggccacccattgcagccgccacttggaccaagggaacccagttccgcttctcccggagggtgtccacccctgagctatagatccctgcctcatacccgcacaagtaagtacagctttcaccatcgcaaatgcccaacacccggttgtgacgggtcgggccacgtcacaggcaaattcaccgcccaccattgcctatccggctgccctctggctgagaggaaccagagcaggctcaaggccgagttaagtgatagcgaggcctccgcccgaaaaaaaaacctttctggcttttctcctcggaaaaagcccagacaccacggtaggattggaaggccgcctaagtatcgtaagatccctcaggaggatttccaaactcttactcccgatgtcgtgcaccagtctcttttcatgtctgccttgagcgcacaccctgacagatccctttccgtgtgctgggaacagcattgcaaactgttaccaggcgtggcgggaataagtgcctccaccgttgctaagtggacaattgacgaggtgttcgggtttgtccaaactcttaccggttgcgaggatcaggcccgactcttcaaagacgaagcccgtatagtgcgcgttacccacgtttcaggcaaaacactggtctggaccgttgcacaactgggtgatttggtttgctctgaccatctccaggagggtaagggaatcttagaaactggggttcactccctcctctgttcgctgccgacccacctgctggcaaagctttccttcgcctcggatagtcagtattag

SEQ ID NO: 227994 - DNA, 2523 bp, synthetic construct
  misc_feature 1..2523: note = Description of Artificial Sequence: Synthetic coding sequence
  source 1..2523: mol_type = other DNA
atgcacctcgtcgcgggagactctcccggtagcggtccccatctccctgctacagctttcataatcccagcttcatctgccacattgggccttccatcgtccgcgctggatgtttcttgctttccccgagagcccatccacgtcggcgcacccgagcaggtggctgggtgtgaaccagtgtccgccaccgtgctgccccagctttccgccggtcctgcttcttcctcaacctcgaccgtgcgcctattggaatggacagaagccgcagcacccccaccagggggaggcctgcggtttcggatatctgagtataagccactgaatatggccggagtggagcaacccccatcacccgagttgcggcaggagggcgttaccgaatatgaagacggaggcgctcctgccggtgacggagaagcaggaccacagcaagctgaggaccaccctcagaaccccccagaggatccaaaccaggaccctcctgaggatgattccacatgccagtgccaggcctgcggaccccatcaggccgcaggcccagatctgggatcttccaatgacgggtgcccacagctcttccaggaaaggtcggtaatcgtagaaaatagcagcggctccaccagcgcctcggagctgctcaaacctatgaaaaagcgtaagcgtcgcgagtaccagtcacccagtgaggaagagagtgagccagaggccatggagaaacaggaggagggcaaggacccagaaggccagcccaccgccagcactccggaatccgaagaatggagcagctctcaaccagccaccggggaaaagaaagaatgttggagctgggagtcctatctcgaagagcagaaggctattacagctcctgtatctctatttcaggacagccaggccgtcactcataacaagaacgggtttaagctcggcatgaaactagagggtatcgatcctcagcacccgtcaatgtactttatcttaactgtcgcggaagtgtgcggctataggctccggcttcactttgacgggtattctgaatgtcacgatttctgggtgaatgcgaatagccctgatatacatcctgccggttggttcgaaaaaaccggtcataagttacagccacccaaggggtataaggaggaagagttcagttggagccagtacctgcgctctacacgggcacaagctgctccaaaacacctgttcgtttctcagtcccactcacctcctcctttggggttccaagttggcatgaaactcgaggccgtggatcggatgaacccctctctcgtgtgtgtggcatcagtgacggacgttgtggattcaaggttcctggtccacttcgacaattgggacgacacatacgattattggtgcgatccctcctccccttatatccaccccgtcggctggtgccagaagcagggtaaacccttaaccccccctcaggactatcccgacccagacaacttctgttgggagaaatatctcgaggaaaccggagcctctgcagtcccaacctgggcgttcaaggtgcgccctccccattcttttcttgttaacatgaaactggaggccgtggacaggagaaacccggcactcatccgtgttgcaagtgttgaagacgtcgaagaccatagaatcaaaatccatttcgatggctggtcccacgggtacgacttctggatcgatgccgaccaccctgatatacacccagcgggttggtgttccaaaacaggccatcccctgcagccgccactgggacctcgcgaaccatctagcgcaagtcctgggggttgtcctcctctttcttacaggagcttaccccatacccggactagcaagtattcatttcaccaccgaaagtgccccactccaggatgcgatgggtcaggccatgttaccggaaagtttactgctcatcactgcctgagcggatgcccactggccgagaggaatcagtccagactgaaagctgagttgagcgattccgaggcttcagcccgaaagaagaacctgtctggtttctcgcctaggaagaagccccgtcatcatggtaggatcggccgtcccccaaaataccggaagatccctcaggaggatttccagacactgactccggacgtcgtccatcagagcctatttatgtccgccctgagtgcccacccagaccgctcactatctgtctgttgggagcagcattgcaaactgctgcctggcgtcgccggtatttccgccagcaccgtggctaagtggaccatcgacgaagtgtttggtttcgtgcagactctgaccgggtgtgaagatcaggccagactttttaaagatgaggcccgtatcgtccgggttacccacgtaagcggcaaaaccctggtttggaccgtggcccagctaggtgatctagtctgttctgaccatctccaggagggtaaaggaattctagaaaccggcgtgcacagtctcctttgctccctgcctacgcacttactcgctaagctgagcttcgccagtgactctcagtattag

SEQ ID NO: 227995 - DNA, 1617 bp, synthetic construct
  misc_feature 1..1617: note = Description of Artificial Sequence: Synthetic coding sequence
  source 1..1617: mol_type = other DNA
caaaaggctataacagctcctgtttcactttttcaggactcgcaggccgtgacgcacaataagaatggatttaagctgggaatgaaacttgagggaatcgacccacagcatccaagtatgtattttattctgaccgtcgcggaggtatgtggatacagactgcggttgcattttgatggatattccgagtgtcacgacttttgggtcaacgcaaatagtccagatattcacccggcaggatggtttgagaaaactggacacaaattgcaacctcccaagggatataaagaggaggagttttcctggtcccagtatctcagaagcacccgggctcaggcagcacccaagcatctgttcgtttcccaatcacattctcccccaccattggggtttcaggttgggatgaagcttgaagccgtcgacagaatgaacccgtcgttggtgtgcgtcgcttccgtcacagatgttgttgactcaagatttctggtacactttgacaactgggacgacacatatgattattggtgcgacccctctagcccatatatacaccccgttggatggtgccagaagcaaggaaaacctttaaccccaccacaggactaccccgatcccgacaacttctgttgggagaagtaccttgaagaaacaggggcatctgccgtgccaacttgggcattcaaggtgagaccacctcactcatttttggttaatatgaaattagaagccgtcgatcggagaaatcccgcattaattcgggtggcttccgtggaggatgtcgaggatcaccgaattaaaattcatttcgacggctggagccatggatacgatttttggatagacgccgaccatcccgatatccaccccgctggttggtgttcgaaaacaggtcacccactccagccgccactgggaccgagagaaccctcttcagccagtccaggagggtgcccgccactctcctaccggtctctgccccataccaggacctccaagtactctttccatcaccgtaagtgtcctactccagggtgtgacggatctgggcatgtgactggtaagtttactgctcatcattgtctgtctggctgccccctcgcggaaaggaatcaaagtcggctgaaagcagagctttccgactccgaggcctccgcccgaaagaagaatttgagtgggttcagtcctagaaaaaaacctagacatcacggccgtatcggacgcccaccaaagtacagaaaaattccacaggaggatttccaaactctcacacctgacgttgtgcatcagagtttattcatgagcgccctgagcgcccatccagacaggtcgctgtctgtgtgttgggagcagcactgcaaactgctccccggtgtggctggcatctctgcctctaccgttgccaagtggaccatcgacgaggtgttcgggttcgtccagacgctcacgggatgcgaagaccaagcccgattatttaaagatgagatgattgatggtgaggcttttcttttactaacccaggccgacattgtgaagatcatgagcgtcaagctggggcctgctctgaagatttacaatgcaattctgatgttcaagaatgccgacgacaccctgaagtag

SEQ ID NO: 227996 - DNA, 2523 bp, synthetic construct
  misc_feature 1..2523: note = Description of Artificial Sequence: Synthetic coding sequence
  source 1..2523: mol_type = other DNA
atgcacctcgttgccggagattccccaggctcgggaccccacctacccgcaaccgcattcattatacccgctagttccgcaaccctgggcttgccatctagcgctctggacgtgtcttgctttcccagagagcccattcacgttggggcacctgaacaggtggcgggatgtgaacctgtctcagcgactgtgctgcctcagctgtctgcgggacccgcatctagtagtacttcaacagtacgactgctggagtggaccgaggcggcagcgcctcccccaggcggaggattgaggttccgtatttccgaatacaagcctctgaacatggccggagtcgaacagcctccgtctccagagttaaggcaagagggtgtgactgaatacgaagacggtggagcaccggcaggcgacggggaggccggtcctcagcaagctgaggaccacccacaaaatccaccagaagaccccaaccaggatccacccgaggacgattccacctgccaatgccaggcctgtggtccccaccaggccgctggtcccgacctcggcagttccaatgatggatgcccccagctgtttcaggaacgctctgtaattgtggaaaattccagtggaagtacctccgccagtgaactgctgaagccgatgaagaaacgcaaacgacgggagtatcagtctccatccgaagaggagtccgagcccgaagccatggaaaagcaggaagaagggaaggaccccgagggccagccgaccgcttcaacaccagaatcagaagagtggagtagctcccagcctgccacaggcgaaaagaaggagtgttggtcttgggaatcctacctcgaggaacaaaaagccatcaccgccccagttagcctgttccaggatagtcaggccgtcacacacaacaagaatggttttaagctcggaatgaagctggaaggcatcgacccccagcacccaagtatgtattttattctcaccgtggcagaggtctgtggctatagactcaggcttcattttgatggctacagcgaatgtcacgacttctgggtaaacgcaaattctccagacattcatcctgcagggtggttcgaaaagaccggacacaaactgcaaccccctaaaggctacaaagaggaggaattcagctggtcgcagtacctacgcagtaccagggcccaagctgcgcctaagcacctgttcgtaagccagtcccactcacccccacctttaggtttccaggtgggaatgaaactggaggctgtagatcggatgaatccgtccctggtgtgcgtggccagtgtgaccgatgtggttgattcacgcttcctggttcactttgataattgggacgacacttatgattactggtgtgacccctccagtccatatatccaccctgtgggttggtgtcaaaaacaagggaaacccctgactcctccgcaggactatcctgacccagacaatttttgttgggagaagtaccttgaggaaaccggggcttcggcagtcccgacctgggcattcaaggttagaccaccacactccttcctcgtcaatatgaagctggaggccgtagaccgtagaaacccggctctaattcgggtcgcttccgtggaagatgtcgaggatcataggattaagattcacttcgacggctggtcccacgggtatgatttttggatagatgcagaccaccctgatatccacccagccggatggtgtagtaaaaccggccatccactacagcctcccctaggccctcgcgagcccagcagtgccagccccggaggctgcccccctttgtcctaccgcagcctcccacataccagaacttctaagtattcattccatcaccgcaaatgtcctactcccggatgcgacggcagtggccatgtaaccggcaagttcaccgcacaccactgtctctcggggtgtcccctcgcagaacggaatcaaagtcggttgaaagcagagttgtcagattctgaagcgtccgccagaaagaagaacctgtcgggattcagtcctcggaagaaaccaagacaccacggcaggatcggacgcccacctaaatatcggaaaatcccccaggaggactttcagaccctgacccccgacgtcgtgcatcagtctctttttatgagcgctttgtcggcccatcccgataggagtctgagtgtgtgttgggagcagcactgtaagctgctcccaggggtggccggaatctccgcaagtacagtcgccaaatggaccatcgacgaagtctttgggtttgtgcagacactgaccggatgcgaggaccaggcacgtctgttcaaggacgaagctcgcatcgttagagttacgcacgtttccggcaagactctcgtgtggacagtggcgcaattgggcgatttggtctgttccgaccacctccaggagggtaagggcatactcgaaaccggcgtccattcactcctgtgtagtctacctacgcacctgctggccaagctgtcttttgcatccgatagccagtattag

SEQ ID NO: 227997 - DNA, 255 bp, synthetic construct
  misc_feature 1..255: note = Description of Artificial Sequence: Synthetic coding sequence
  source 1..255: mol_type = other DNA
atggcgggtgtcgaacaaccaccttcaccagagctgagacaggaaggcgtgactgagtatgaagatggcggagctccagccggtgacggtgaggccggacctcagcaggccgaggaccacccgcaaaacccaccagaggatcccaaccaggatccaccagaagatgactcaacgtgccagtgccaggcatgcgggcctcatcaggcagccggtcccgacctgggatcgtcgaatgacggttgccctcagctatag

SEQ ID NO: 227998 - DNA, 417 bp, synthetic construct
  misc_feature 1..417: note = Description of Artificial Sequence: Synthetic coding sequence
  source 1..417: mol_type = other DNA
atgcatctggttgctggtgactctccagggtccggacctcatctccccgcaacagcattcatcattccggcaagcagtgcaaccctgggcctgcctagctctgcccttgacgtttcttgttttcccagagagcccatccatgttggggctcccgagcaagtggcaggctgcgagcctgtatccgccaccgttttaccgcagctgagcgccggtccagcaagcagcagtacctcgacagtcagacttcttgaatggactgaagctgcggctccccctccaggcggtggcctgcgctttcgcatctcagagtacaaacccctgaacatggctggggtggaacagccaccctcccccgagctgagacaggagggtgtcaccgagtacgaggacggaggggctcctgccggagacggatag

SEQ ID NO: 227999 - DNA, 2217 bp, synthetic construct
  misc_feature 1..2217: note = Description of Artificial Sequence: Synthetic coding sequence
  source 1..2217: mol_type = other DNA
atgcgacggcgtgaaggacatggtacagacagcgagatgggccagggtccagtccgggagagccaatcatccgaccctccagctttgcagtttagaattagtgaatataaaccattgaacatggccggagtagaacagcccccaagtcctgaactgcgtcaggagggcgtgaccgaatacgaggatggcggagcaccagcaggagacggagaggccggacctcagcaggccgaggaccaccctcaaaatcctccggaggatccgaatcaggatcctccagaggatgattccacgtgccagtgccaggcctgtgggccacatcaggcagccggtccggatctcggcagcagtaacgatggctgtccacagctgttccaagagcgcagcgtcattgtggagaacagctctggcagtacgagcgcatctgaactgctcaaacccatgaagaaaagaaaaagacgagaatatcagtcaccttctgaggaggagtctgaacctgaggctatggagaagcaggaggagggtaaagacccagaaggacagcccaccgctagcactcctgaaagcgaggaatggagtagcagccaaccagcaaccggcgaaaaaaaggagtgctggtcgtgggagagttatttggaggagcagaaggctataaccgcgccagtgagcctctttcaagatagtcaagccgtgactcacaataagaacggctttaaattgggcatgaagcttgaggggatcgacccacagcatccttcaatgtacttcattctgacagttgccgaagtatgcggatatcggctacgcctgcattttgatggctatagtgagtgtcatgatttttgggtaaacgcaaacagccctgacatacaccctgcaggctggttcgagaagacaggccataaattacagccacccaaagggtacaaagaggaggagttctcctggtctcagtatcttcggtcaactagggctcaggccgcaccaaagcatctctttgtgagtcagtctcacagtcctcccccactcgggtttcaggtggggatgaagctggaggcagtggacaggatgaacccctctctggtctgcgtcgctagtgtaaccgatgttgtggatagtaggtttctggtccacttcgataattgggacgatacctatgattattggtgcgacccttcttcaccatacatccatcctgtggggtggtgtcaaaagcagggaaagcccctgacccctccccaagactatccagaccctgacaacttttgctgggagaagtacctcgaggagactggggcttcagcggtgcctacctgggccttcaaagtccggccacctcactcttttctggtcaacatgaagttggaggcggtagacaggagaaatcctgccctgattagagtggctagcgtcgaagacgtggaggaccaccgtatcaagatccattttgacgggtggtcccatggatatgatttctggatcgacgccgatcaccccgatattcatcctgctggctggtgctcgaaaaccggccatccccttcaaccacccctcggaccgcgagagccttcctcagcttcacccggagggtgtcctcctctgtcctatcggtctctccctcacaccagaactagtaagtactcttttcaccacagaaagtgtcctactccaggatgcgacgggagtggccacgtgacaggcaagtttaccgcccatcattgcctatccgggtgtcctctagcagaacggaaccaatcccgattaaaagctgagctatcagacagcgaagcctcggctcggaagaagaaccttagtgggttcagcccccgaaaaaaacctagacaccacggaaggatcggaaggccacctaaatatagaaagatccctcaggaggacttccagaccctcacccccgatgtggtgcaccagtcattgtttatgtctgctctcagtgctcatccagatcggtcactgtccgtctgctgggaacagcattgtaaactgcttcctggggtggcgggaatcagtgcaagcaccgttgcaaagtggactattgatgaagtgtttgggttcgtgcagaccctgaccggctgtgaagatcaagctcggcttttcaaggatgaggtcaggtgcaagtgcagggtgggggatcgtgcaggagtaacagtgcttaagacagccggatccaggtgccccccacaaagacacttctgctag

SEQ ID NO: 228000 - DNA, 870 bp, synthetic construct
  misc_feature 1..870: note = Description of Artificial Sequence: Synthetic coding sequence
  source 1..870: mol_type = other DNA
tgaacgtctggtagtatgccaactccattgaccttcacactcttagccggtagcagacgacgtgccacctcatgctctctgcccaaatccccacctccactgggattccaggtaggcatgaagttggaggccgtagacaggatgaacccctctctggtctgtgtggccagtgtcaccgacgtagtagattcccgctttcttgttcactttgacaattgggatgacacctacgattactggtgcgacccgtcttcaccctacatacatcctgtcgggtggtgtcagaagcagggcaagccattgactcctcctcaagattacccagaccctgataatttctgttgggaaaaatatctggaggaaaccggagcaagcgccgtcccgacatgggcctttaaagtccgacctccacattcctttctcgttaacatgaaacttgaagcggttgatagaaggaaccctgccctaattagagttgcctcagttgaggacgtggaagaccacaggatcaagatccatttcgacggctggagccatgggtatgacttttggattgacgcagatcatcccgacatccatcctgccggatggtgcagtaagaccgggcaccccttgcagccgcctctcggcccaagagagccatcttccgcctccccagggggatgtccccctctctcataccggtctctgccacatactaggacaagcaagtacagctttcaccataggaagtgccccacacctggctgcgatggatctggccacgtgactggcaaattcactgcgcaccactgcctctcaggttgccccttggcagagaggaaccagagtagattgaaggcagagttgagcgactcagaggcttcctag

SEQ ID NO: 228001 - DNA, 327 bp, synthetic construct
  misc_feature 1..327: note = Description of Artificial Sequence: Synthetic coding sequence
  source 1..327: mol_type = other DNA
atggccgcagccatggatgtagatactccttctggcactaacagtggagccggaaaaaagcgttttgaagtgaaaaaatggaatgctgtggcactttgggcatgggacatcgtggtggataattgtgcaatctgcaggaaccatattatggacctctgtattgaatgtcaagccaaccaagcctccgccacaagcgaagaatgtactgtagcctggggtgtttgtaatcatgctttccattttcactgtataagccgatggctcaagacaaggcaggtgtgtcctctagataatagggagtgggagttccagaagtatggacattag

SEQ ID NO: 228002 - DNA, 867 bp, synthetic construct
  misc_feature 1..867: note = Description of Artificial Sequence: Synthetic coding sequence
  source 1..867: mol_type = other DNA
tgacggccacatctgcagaatcagtggcgcaaaaggaagatgaccacttggtcatgtctcgtagctatgattgtgagcggtgtcatcaccgccgtttgggcagtccgtgcggcaccaatttggcgcagccaggtcaaacagaagatgcggatcggaaaacaggggaattgtcggcctccacgatgcatctgttccgctctcggactgctcgcaccatggatggccgttgtcctgtcccaggggaagccccctactaagaaggctaaggtgctgcacaaggccgcttggagcgccaagatcggggctttcctgcacagtcagggcacagggcagctagctgacggaacccccacgggtcaggatgccctggttctaggcttcgactggggtaaattcttaaaggaccattcatacaaagccgcacccgtgtcttgttttaagcatgtcccgctgtacgaccagtgggaggacgtgatgaagggcatgaaggttgaagtactgaacagcgacgctgtgttaccatcccgcgtgtactggatagcatctgtcattcagaccgctgggtaccgggttctgctgaggtacgaaggctttgagaacgacgcttcccatgatttctggtgtaaccttggaacagtagacgtgcaccctattggctggtgcgccatcaattctaagattctcgtgccccctcgtactattcacgccaagtttacagactggaagggatatctgatgaaacggctggttggaagcagaactctgcccgtggattttcatataaaggtgggatccgaaccactaaccgacgtgccgccaagcgccctcccatttttctgcatcctgcacgccacacactggagctag

SEQ ID NO: 228003 - DNA, 3762 bp, synthetic construct
  misc_feature 1..3762: note = Description of Artificial Sequence: Synthetic coding sequence
  source 1..3762: mol_type = other DNA
atggtagtggcactaagatacgtgtggcccctgcttctatgctcaccctgcctacttattcagatccccgaagaatatgagggacatcatgtgatggaaccgcctgttatcacagagcaatcccccagaaggctcgtggtgttcccgacagacgatatcagcctgaagtgtgaggcctccggtaagcctgaagtccagttcagatggactcgagatggcgtgcattttaagcccaaagaagagctgggggttaccgtctaccagagcccccactccgggagctttactatcaccgggaataactccaatttcgctcagcggttccagggcatctaccgctgcttcgcttctaataagctggggaccgccatgtcacacgagatacgcctgatggcagagggcgctccaaagtggcccaaagagaccgtgaagcctgtggaagtcgaggagggcgaatcagtggttctgccctgcaaccctcccccaagtgccgaaccactgcgcatttactggatgaatagcaagatcttgcacatcaaacaagatgagcgggtcactatgggtcagaatggtaacctgtattttgctaatgtactgacctcagataaccactcggactacatttgtcacgcccatttcccgggtacccggaccatcatccagaaggaacccatcgacctgcgcgtgaaggccacaaactcaatgattgatcgaaagccacgtcttttgtttcctaccaatagtagttcccatctggtggctctccaggggcaacctctcgtactggaatgcatagccgagggctttccaacacccactatcaaatggctgcgaccatccggaccgatgccagctgatcgtgttacttaccagaaccataacaagacattgcaactccttaaggtgggagaggaggatgacggggagtaccggtgcttggccgaaaacagcctgggctcagcgaggcatgcctactacgtgacagtcgaagctgcaccatattggttacataaaccacagagtcacctgtatggaccaggggaaaccgcgagactggattgtcaggtgcagggccgacctcagcccgaggtaacctggcggatcaacggcattccagtcgaggagctcgcaaaggatcagaagtatagaattcagcggggagccctgatcctctcaaatgtacagccctctgatacaatggttacacagtgcgaagcgcgaaacagacacggtctgttactggccaacgcctatatttacgttgtgcagctgccagccaaaattctcaccgcagacaaccagacctatatggccgtgcagggaagcactgcttatctcttatgcaaagccttcggcgctcctgttccctcagtgcaatggctggatgaggatggaacaacagttctgcaggatgaaagattcttcccatatgccaatgggacgcttggcatccgggatctgcaagctaatgacacgggcagatacttctgcttggctgctaacgaccagaacaacgtaactattatggcgaacctcaaggtcaaggacgccactcagataactcagggcccacggtccacgatagagaaaaaaggctccagagtcacattcacgtgtcaggcctcctttgacccttccttacagcctagcattacctggcgcggtgatgggcgtgacctccaggaattaggagattctgacaagtatttcatagaggatgggagactggtgattcacagcctggactattccgaccaggggaactattcatgtgttgctagtactgagctggatgtcgtcgagagccgagcacagcttctggtggtagggtcacctggacccgtccctaggctcgtgttatcagacctgcatctgctcactcaatcccaggtgagagtttcctggtctcccgctgaggatcataatgcgccaatcgagaagtacgatatagaattcgaggacaaagagatggccccagaaaagtggtactcactggggaaagttcctggtaaccagactagtacaactcttaagctcagcccatacgtgcactataccttcagagtgacagctatcaataagtatggtccaggtgaacccagtccagtatccgagacggttgtgacacctgaagccgcaccagaaaagaatccggtggacgtgaaaggggaaggcaatgagaccaccaatatggtgataacctggaagccacttcggtggatggactggaacgctccccaggtgcagtatcgggtgcagtggcgtccccagggtacgcggggtccctggcaggagcagatcgtttccgacccatttctggtagtgtcaaatacaagcacttttgtcccctacgagatcaaggttcaggctgtaaatagccagggtaagggtcccgagccacaggtgaccattgggtattctggcgaagattacccacaggccattcctgaactcgaaggtattgagattcttaacagttccgccgtgctggtgaaatggcgaccagtcgacctggcccaggtcaagggccacctgaggggctataacgtcacttattggcgggagggttcacaacgtaaacatagtaaaagacatattcacaaggatcacgtggttgtgccagctaacacaactagcgtgatcctttcaggactgcggccatacagttcttatcacctggaagtgcaggcctttaacggcagagggagcgggccagcatctgagttcactttttccactcctgagggcgtccctggccaccccgaggcactccatttggagtgtcagtccaataccagtctgctgctgaggtggcagccccctcttagccacaatggggtgctgaccggttatgtgctgtcataccatcctctagacgagggcggtaagggccagctcagctttaacctcagagacccagaactccgaacccataatctgactgacctgtcccctcacctgcgctaccggttccagctccaggcaacgacaaaagagggtccaggagaagctattgtgcgagaggggggaaccatggccttaagcggcatttccgattttggcaatatctcagctactgcaggagagaattattccgtcgtttcttgggtcccaaaagaaggccagtgcaatttcagattccatatcctgttcaaggccctgggggaagaaaaggggggagcttccctgagcccacagtacgtctcatataatcagagtagctatacacagtgggacctccaacccgataccgattacgagatccatctgttcaaggaacgcatgtttagacatcaaatggccgtgaagacgaacgggaccggcagggtgcggttgcctcccgcaggattcgctacggaggggtggttcatcgggtttgtgagcgccatcatcctactgctcctggtgttgctgatcttgtgtttcatcaagcggtctaaaggcggaaagtacagcgtgaaggataaagaggacacccaggtggattccgaagcaagaccgatgaaggacgagacatttggagaatattctgacaacgaggagaaggcatttggatcctctcaaccatctctaaacggcgatatcaagccattgggcagcgatgactcactggcagactatggcggatcggtggatgtgcagtttaatgaagatgggagcttcataggtcagtactccggcaaaaaagaaaaagaagccgctggagggaacgactcatctggcgctaccagtccaatcaacccagctgtggcgttagagtag

SEQ ID NO: 228004 - DNA, 3747 bp, synthetic construct
  misc_feature 1..3747: note = Description of Artificial Sequence: Synthetic coding sequence
  source 1..3747: mol_type = other DNA
atggtggtggcactgagatatgtgtggcctctgttactgtgttctccatgtctacttattcagatcccggaggagctaatggaacccccagtgattactgagcagtccccgcgacgcctagtcgtcttccctaccgatgacataagcctgaagtgcgaggctagcggcaaacccgaagtacagttcagatggacaagagacggggtgcattttaaacccaaggaggaactcggtgtgaccgtgtaccagtccccccatagcggctccttcactatcacaggcaataattcaaactttgcacagcggtttcagggtatctacaggtgcttcgcgagcaataaattgggaactgcgatgagccacgaaatccgattaatggcagagggcgctccaaaatggcctaaagaaaccgtgaaaccagtcgaggttgaggaaggcgagtctgtggtgttaccatgcaacccccctccaagcgccgaaccccttcggatctactggatgaactccaaaatactccatattaagcaagacgaacgggttaccatgggccagaacgggaacctgtactttgcaaacgtcctcacttccgacaatcattccgactacatttgccacgcccactttcccggtaccagaactattatccagaaagagcccatcgatctcagggtaaaggcaacgaactccatgattgatcgcaagcccagacttttattccccacaaatagttcaagccatctggtcgctcttcaggggcaacccctggtactggagtgcatcgccgaaggcttccctacacccaccatcaagtggttacgcccaagtggccctatgcccgcagaccgtgtgacttaccagaaccataacaaaactctccagctgcttaaggtgggcgaggaggatgatggtgagtaccgctgcctcgctgagaactcactggggtctgctcgccatgcatactacgttacagtcgaagccgctccttattggctgcataaaccgcagagtcacctatacggccctggggagaccgccaggctggattgtcaggtccaaggccgaccccagcctgaagtgacctggcgcattaacggaataccagttgaggaacttgctaaggatcagaaatataggatacagaggggagctcttatcctgtccaacgttcagccctccgacaccatggtaactcagtgcgaggcccgtaacaggcatggcctgctgctcgcaaatgcatacatctacgtggtgcagctgcccgcaaaaattctaacagcagacaaccagacttacatggccgttcagggtagtacggcctaccttctctgcaaagcatttggcgcaccggtcccatccgtccagtggttagacgaagatgggacaaccgtcctccaggatgaacgcttcttcccctacgcaaatggcaccctcggcataagggatctgcaggcgaacgatacaggcagatatttctgtctggctgccaacgatcagaacaatgtcacaataatggctaacctgaaagtgaaggacgcgacacagatcacacaaggcccacgaagcacgatcgaaaaaaagggctcaagggtcaccttcacatgccaggcttcatttgacccaagcctccagccgagcatcacctggcgcggagacggccgtgatctgcaggaactgggcgactctgataaatactttattgaggatggtagacttgtgatccacagtttggactactcggaccagggaaattactcctgtgttgcatccacagagctggacgtggtcgagtcccgggctcagctgctggtggtgggatcccctggacccgtgccgcgtctggtgctttctgacctccacctcctcacccaatctcaagtgcgcgtgagttggtcacccgctgaagatcacaatgcccctatcgagaagtatgatatcgaatttgaggacaaagaaatggcccctgagaaatggtatagccttggcaaagtgcccggtaatcagacaagtaccaccctcaagttgtcgccttacgtacattacacttttcgggtgaccgccataaacaaatacgggccaggagagccgagtcctgtatccgaaaccgttgtgactcccgaggccgctccagagaagaatcccgtggatgttaaaggcgagggtaacgaaactaccaacatggttattacctggaagcctttacgttggatggactggaatgccccacaggtacagtatagggtgcagtggaggccacaaggcacgcggggaccatggcaggagcagattgtgagcgaccccttccttgtagtgtctaacacctcaacattcgtaccatacgagatcaaagtacaggcagttaactcacaaggcaagggccctgagccccaggtgacaatcgggtacagtggagaggattaccctcaggcgatcccagaattggagggaatagagatactcaactcatctgccgtgctggtcaaatggcgaccagtcgacctggcacaggttaagggtcacttgagggggtacaacgttacttattggcgggagggttcgcagcggaaacattcgaagcggcatatccataaggatcacgtagtagtcccagcaaatacgaccagtgtgatcctgtctggtctgcgcccatactcaagttatcatttggaggttcaggcttttaacggtagggggagcggccctgcatccgaattcaccttttctacacccgagggagtccccggacatcctgaggccctgcacctggagtgtcaaagtaacacttccctgctgcttcggtggcagccacctctctcccacaatggggtgcttaccggttacgtgttaagttaccaccccctggacgaggggggtaaggggcagctcagtttcaatctgcgggatccagaattgaggactcacaacctgactgacctttccccccacctgcgctaccgcttccagttgcaggctaccacaaaggagggccctggtgaagccattgttcgcgagggtgggactatggcactatcgggaatcagtgactttggcaacatcagcgcaaccgcaggagagaactactctgtggtcagttgggtgcctaaggagggtcagtgcaacttccgcttccacatacttttcaaagcactgggtgaggagaaaggaggagcttccctgtcaccacaatatgtgtcctataatcagtcatcttacacccaatgggatctgcagcccgacacggattatgagattcacctcttcaaggagaggatgtttcgacaccaaatggccgtgaaaacaaatgggactggacgtgtccgactgccacccgctggctttgcaaccgagggatggttcatcgggttcgtgagtgcaattatcctgttgctgctggttctgctgattctatgtttcatcaagagaagtaagggcggaaagtactctgtgaaagataaggaggacactcaagttgattccgaggctagaccaatgaaggatgaaacgtttggagagtactccgataatgaggagaaagcattcgggagcagccagccttcgctgaatggagatatcaaaccccttgggtccgacgactcactggctgactatggcggatcagttgatgtacagtttaatgaagatgggagcttcatcgggcaatactctgggaagaaggagaaggaggctgctggaggcaatgattcatcaggggctacctctcctattaatccagcggtcgccctggagtag

SEQ ID NO: 228005 - DNA, 3747 bp, synthetic construct
  misc_feature 1..3747: note = Description of Artificial Sequence: Synthetic coding sequence
  source 1..3747: mol_type = other DNA
atggtggtcgctttgagatacgtgtggcccctcctactctgctccccctgcttgctcattcagattcccgaggagctcatggaacccccagtaattacagagcaatcccctagacgcttggttgtattccctacagacgatattagtttgaagtgcgaagcctcggggaagccggaggtccagttccggtggaccagggatggggtccactttaagcccaaggaggagctcggggtgacagtataccagtctccacactccggctctttcactataaccggaaacaactccaacttcgcccagaggttccagggcatctatagatgttttgcgtctaacaagctcggtaccgctatgtctcacgaaattcgactcatggctgagggcgcacctaaatggccaaaagaaacggtgaaaccggttgaggtggaagagggcgagtccgtggtccttccctgtaacccacctccaagcgccgagccactgcggatatattggatgaattctaaaattttacacataaagcaggatgaacgggtgacaatggggcaaaacgggaacctgtactttgctaatgttctcacatccgacaaccactctgattacatctgccacgctcattttccaggtacccgtaccataatacagaaagaacccatcgatctgcgcgtgaaggccaccaatagtatgatagatagaaagccgagattgctctttcccacaaacagttcctcccacctggttgccctgcagggacagcctctagtgctggagtgtatcgctgagggattccctaccccaactatcaaatggttgagaccatcaggcccaatgcccgcagatcgtgtaacataccagaatcataacaagacactgcagctattgaaggttggcgaggaggatgatggcgaatacagatgtctggctgaaaattctctgggctcagccaggcatgcctattatgtgaccgtcgaagcagccccttactggttgcataaacctcagtcccatctgtacggccctggagaaaccgcccgactggattgtcaagtccagggcaggccacagcctgaggtcacatggcgaatcaatggaattcccgtggaagagctagccaaggaccagaagtaccgtattcagcgcggtgccctgatcttatccaatgtccaaccaagcgacactatggttactcagtgtgaggcgaggaaccggcacggcttgctgctggccaacgcttacatttacgtggttcagctccctgctaaaattctgactgccgataaccagacatatatggccgtccagggcagcactgcttatctcctgtgcaaagcttttggggcaccagtcccaagtgtccagtggctcgacgaagatggaactaccgtcctacaggacgaacgattttttccttatgcaaacggcactctggggatccgagacctgcaggcgaacgacacgggtcgctacttctgtctcgcagccaacgaccagaacaacgtgaccatcatggcaaatttgaaggtgaaagacgctactcaaatcacccaaggaccgaggtctacaatcgagaagaagggctccagggtgacctttacatgccaggcgtcatttgatccaagcctgcagccatcaatcacctggcggggagatggccgagacctgcaggaactcggggacagtgacaaatactttatcgaagatggcagactggtaattcattccctcgactactccgaccagggtaactactcctgcgtggcaagcaccgagctcgatgtagtggagtcccgggctcagcttctggtcgttggttctccagggcctgtgccaaggctggtcctaagcgacctgcatctactgacccaatcccaggttcgtgtaagttggtcaccagcagaagaccataacgctcctatcgagaagtatgatatcgaattcgaggataaagagatggccccagagaaatggtactcactgggtaaagtgcccggaaaccagacctctacgacactgaaattgtctccatatgtgcactataccttcagggtcacagcgattaacaagtacggtcctggcgaaccaagccccgtctcagaaactgtggtcacccccgaagctgcgcctgagaaaaatcccgtcgacgtgaaaggagaggggaacgagacaacaaacatggtcattacctggaaacccttgcggtggatggattggaacgcaccgcaggtccagtaccgggtgcagtggcgtccccagggtacaaggggcccttggcaggaacagattgttagtgacccatttctggtcgtaagtaacactagcacatttgtgccctacgaaataaaagtccaagcggtgaacagtcagggaaagggccctgaaccccaggtcactatcgggtattctggggaagactatcctcaagccattccagagctcgaaggaatagagatcctcaactctagtgcagttttggtgaaatggagacccgtggatctggctcaggttaaggggcatttaagaggctacaatgtgacatactggcgcgaagggtcccagcgtaagcatagcaaacgccatatccacaaggatcacgtcgttgtccccgcaaacactactagtgtcattctatccggacttcggccttactcttcctatcacctagaggtgcaggccttcaatggtcgcggatctggcccagcctcagagtttacgttctctactcccgaaggtgtgccgggtcatcccgaagctttgcacctcgaatgccaaagcaataccagcctcttactgcgctggcagccacctctgtcacacaacggcgtgctgacagggtatgtgctgtcgtaccacccgctagacgaaggcggaaaaggtcaattgtcctttaatttacgcgatccagagcttagaacgcacaatcttaccgatctgagccctcacctccgttatcgcttccaattgcaggcgaccaccaaagaaggcccaggagaggccatcgttagggaggggggaactatggcgctgagcggtattagtgattttgggaacatctcagccactgctggagagaattatagcgtggtgagctgggtgccaaaagagggccagtgcaacttccgttttcacattctctttaaagccctcggagaggaaaaaggcggagctagtctgtcaccacaatatgtcagttacaaccaatcttcctatacacagtgggatctgcagccggacacagactacgagatccacctgtttaaggagcggatgttccggcaccaaatggcagtcaaaaccaatgggacggggagagtgcggctccctcctgcagggtttgctactgagggatggttcataggattcgtgagtgcaatcatactccttctgctggttctgttgattctgtgttttattaaaaggtccaaaggcggaaagtacagcgtgaaagacaaagaggatacgcaagtagattccgaggctcgcccaatgaaagacgagaccttcggagaatactcggacaacgaggagaaggccttcggaagctcgcagcccagtttgaacggcgatatcaagcccctaggctccgacgactccttggcagattatggcggatccgttgacgtgcaatttaacgaagatggatcattcataggccagtactccggcaaaaaagagaaggaggcagctgggggtaacgactcatccggggctacatccccaatcaatcctgctgtcgcgctcgagtag

SEQ ID NO: 228006 - DNA, 3774 bp, synthetic construct
  misc_feature 1..3774: note = Description of Artificial Sequence: Synthetic coding sequence
  source 1..3774: mol_type = other DNA
atggtagtggcattacgatacgtgtggccgctacttttgtgctcaccatgtctgctgattcagatacctgaagagtacgaaggccatcatgtgatggaaccccctgtcattactgagcaatcaccacgcagactcgtcgtttttcctacagatgacatttcactcaagtgtgaggccagcgggaagcccgaggtacagttccgatggaccagggacggggtacatttcaaacctaaagaagagttgggtgtgaccgtgtaccagtccccacattccggcagtttcacaattacaggaaataactccaatttcgcccagcgctttcaaggcatataccgttgctttgcttccaataaacttggcacagctatgtctcatgaaatccggctgatggcggaaggcgctcctaagtggccaaaggaaacggtgaagccagtggaggtggaagaaggggagtctgtagtcctgccctgcaatccccctccaagcgcagaacccctgcggatatattggatgaactcaaaaattttgcatattaagcaggatgagagagtgacaatgggccagaacgggaacctttatttcgccaatgtgctgacctccgacaaccacagcgattacatatgccacgcgcatttccctggcactcggaccattatccagaaagagcctatcgacctgcgcgtgaaagctaccaattccatgatcgatcgaaagcctcgcctactgtttcctactaattcatcctcgcatctcgtcgctctgcagggacagccgctggtgttggagtgcatcgccgagggttttcctacaccgaccatcaaatggcttcgcccatctggtcccatgcctgctgatcgcgtaacgtaccagaaccacaataagactttgcaactccttaaagtcggtgaggaagatgatggcgagtacagatgcctggcagaaaactctctaggcagtgcacgccatgcatactacgttaccgtagaggccgctccctactggctgcataagccccaaagtcatctctacggccctggtgaaaccgcccgtcttgattgtcaggtacagggcagacctcaacctgaggtcacatggagaattaacgggattcctgtggaagaactggctaaggaccagaagtaccgaattcaacgcggtgctctgatccttagcaacgtgcaaccgtctgacaccatggtgacccaatgtgaggcacgaaaccgccatggtctgttactcgctaacgcatatatctacgtggtgcaactgcctgccaaaatcctcactgccgataatcagacatacatggcagtccagggatccacagcctatctgttgtgcaaggcctttggcgcacccgtgccatccgtgcaatggttggacgaggacggcactaccgttctccaagacgagagatttttcccatatgccaatggcacactagggattcgagacctccaggcaaatgatacaggcaggtacttctgcttggcagccaatgaccagaacaatgtaacgataatggccaacttaaaggttaaggacgcaacgcagataacccagggcccacgctctacgatcgaaaaaaagggtagcagagtcaccttcacctgtcaagccagcttcgatcccagcctacagccaagcattacctggcgtggtgatggcagggatctgcaagagttgggtgattcagataaatactttatcgaagacggcagactagtcattcattccttggactatagtgaccaaggaaactactcatgtgtggctagcaccgagttggatgtcgtcgagtcacgtgcccagctgctggtggtagggtcccccggacctgtgcctaggttggtactttctgacctgcacctactaacccaatcccaggtgagagtgtcctggagtcccgcagaagatcacaacgcccctatcgagaagtatgatatcgagtttgaagataaagaaatggcccctgagaagtggtatagtctcggtaaagtacctgggaatcagacatctaccacacttaaactgtcgccatacgtgcattacacctttcgcgtgaccgcaatcaacaaatacggacctggagagccgagccccgtgagtgagacagttgtgacacccgaggcggcaccggagaagaatccagtcgacgtgaaaggggaaggaaatgagaccactaacatggtgattacgtggaaacctttgcgctggatggattggaatgcccctcaggttcaatatagagtacaatggagaccgcaagggaccaggggaccatggcaggaacagatcgtgtcagatccatttctggtggtgtccaatacctcaacctttgtgccatatgaaatcaaggttcaggctgttaacagtcagggcaaaggcccagaaccacaggtgaccattggttacagcggcgaagactacccccaggctattcccgaattggagggaatcgagattcttaattcctccgctgtgctggtaaaatggaggcccgtcgacctcgcccaggtgaaggggcatctccggggttacaatgtgacctactggcgagagggcagtcagcgcaagcattccaagcgtcacatccacaaggaccacgtggtggtgcccgcaaataccaccagtgtgattctgagtggactccggccatacagctcgtaccatctggaagtgcaagccttcaatgggcgtggtagtgggcctgcctccgagttcaccttctctaccccagagggggttccgggacaccctgaggcactccacctggaatgccagtctaatacatcactattgttacggtggcagcccccactgtcccataacggcgttctcaccgggtacgtcttatcttatcatcccctcgacgaggggggtaagggccagttgtccttcaaccttagagaccctgagctgcgcacccacaatctgactgatctcagcccccacttgaggtaccggtttcaacttcaggccacaacaaaagaaggaccgggagaggccatcgtgcgggagggcggtacaatggccctctcaggcattagtgattttggcaacatttcagctaccgctggggagaattacagcgttgtgagctgggtgcccaaagagggccaatgcaactttaggtttcatattctgtttaaagcgctcggggaggaaaagggcggagctagcctgagtccgcaatatgtatcatacaatcaatcttcttacacacagtgggatctgcagcccgatacagactatgagatccacctttttaaagagcgtatgttccgccaccaaatggccgtcaagacaaacggaacagggagggtacgtcttcctcctgcaggtttcgccactgaagggtggtttattggcttcgtgagcgcaattattcttcttctcctcgtccttctcatattatgctttattaagcgctctaagggtggcaagtattcagtgaaggacaaggaggatacccaggtcgactccgaagcccgtcccatgaaagatgagactttcggggagtaccgaagccttgagtcagacaacgaggagaaggccttcggaagctctcagccctcgctgaacggtgacattaagcccttggggtctgacgacagcttagccgactatgggggatcagtggacgtgcagttcaatgaggatggatcctttattggccagtatagcgggaaaaaagaaaaggaagcagccggtggtaacgatagctcgggcgctacctcccctataaatccggcagttgctcttgaatag

SEQ ID NO: 228007 - DNA, 3774 bp, synthetic construct
  misc_feature 1..3774: note = Description of Artificial Sequence: Synthetic coding sequence
  source 1..3774: mol_type = other DNA
atggtggtagccctgaggtacgtatggcccttgttactctgctcaccgtgtctactgatccagattcccgaggaatatgagggacatcacgtcatggagcctcctgtgattaccgaacagtcacccagacggctggtggtattcccaacagatgacatttccttgaagtgcgaggcctccggaaagccagaggtacaattccgctggacccgggatggagtccacttcaaaccaaaagaggagctgggggtgacggtgtaccagagcccccattctggttcattcacaattacaggcaataactccaactttgcccagaggtttcagggtatctataggtgctttgcctctaacaaattgggtacagcaatgagtcacgagattaggctgatggccgagggcgcaccaaaatggcctaaagagacagtcaagcctgttgaggtggaggaaggtgaaagcgtggttctcccatgtaatcctccccctagcgccgaacccctccgaatctactggatgaattcaaagatcctgcacatcaagcaggacgaacgtgtgacaatgggtcagaacgggaacttatatttcgccaacgtccttaccagcgacaatcattcagattacatttgtcatgctcacttccctgggacaaggactattatccagaaagagcctatcgacctgagagtgaaggccaccaatagtatgattgatagaaagcctcgcctcctgttccctacaaacagctcttcgcatctggtggctctgcagggtcagcctctcgtgctagaatgtatcgcagaaggtttccctacccccactatcaagtggctgagacccagtggccctatgcccgcagatcgcgtcacttaccagaaccataataaaacactccagttgttaaaggtgggtgaggaggacgatggagaatatagatgcctcgcagagaactccctaggttctgctaggcacgcttattatgtaaccgttgaagcggcaccctactggctgcacaagcctcagtctcacctttatggccctggtgagactgccagacttgattgccaggtgcagggacgccctcagcccgaggtgacctggcggatcaatggtattccagtggaggaactcgctaaggaccagaagtaccgtatacagcggggagccctgatcctatcaaacgtccagccgtctgacacaatggtcacccagtgcgaagctagaaaccgccatgggctgttactcgcgaatgcatatatctatgttgtgcaactgcccgcaaagattctcactgctgacaatcagacttatatggctgttcagggctcaacggcctacctgctatgcaaagcgttcggtgcccctgtgccaagcgttcagtggttggacgaggacggcactactgtcttgcaggacgagcgttttttcccatatgccaatggtaccctcgggatcagggacctccaagcaaacgacactggacgatatttctgcctggccgctaacgaccaaaacaacgtgacaattatggccaacttgaaagtcaaagacgccacgcagatcacacagggacctagatccactatcgaaaagaaaggcagccgagtcacttttacctgtcaagctagtttcgatccaagtctgcaaccttcgattacttggcggggtgatgggagggatctgcaggaactgggggattcagacaaatacttcattgaagacggccgtctcgtgatccacagtctcgactatagcgatcagggtaactattcctgtgtggcttccaccgaactagatgtagttgagagtagagcacaactgctggtcgtcggctcccctggcccagtcccgagattggtgttgtctgacctccacctgcttacgcagtctcaggttagagtgagttggagccccgctgaagaccataacgcacctattgagaagtacgatatcgaatttgaggacaaggaaatggcacccgagaagtggtatagtctgggcaaggttcccggaaatcaaacctctaccaccctcaagttgtcaccatatgttcactatacattcagagtgacagctatcaacaaatacgggccaggagagccttcccccgtgtcggagaccgtggtgacccctgaggccgcacccgagaagaaccctgttgacgttaagggagaggggaacgaaaccacgaacatggtcatcacatggaagcccctgaggtggatggactggaatgcaccacaggtgcagtacagggtgcagtggcggccacagggaacgagaggaccctggcaggagcagatcgtgagcgatccgttcttggtggttagcaatacgtctacattcgtcccttacgagatcaaagtccaagctgtgaacagtcagggcaaaggcccagagccccaggttaccataggatacagcggtgaagattacccgcaggccattccagaactcgagggcattgagatattaaatagctctgctgtgctagtgaaatggcgcccagtggatctagcccaggtaaaggggcatttgaggggctacaatgtaacgtactggagggaggggtctcaaagaaagcacagtaagagacatatccacaaagatcacgtcgtcgtgcccgcaaacaccacaagcgtaatcctgtcaggtttaagaccttacagttcctatcatctcgaggtgcaggcttttaacggtcgcggttcaggacccgctagtgagtttaccttctccacccccgagggggtcccaggccatccagaagctcttcacctggaatgccagagcaacacctcactgctgttgcggtggcaacccccactgtcccataatggcgtgctgactggctacgtactgtcgtatcaccctcttgacgaggggggaaaagggcaactaagctttaatctgagagatccagagctccggacccataatctgaccgatctcagcccccacttgaggtacaggtttcaactgcaggccacaacgaaagagggccctggggaagcgatcgtgcgcgaagggggaacaatggcgctttcaggaattagtgacttcgggaatatatcagcaactgctggcgagaattacagtgtggtatcttgggtcccaaaggagggccaatgcaactttcggttccacatcttgttcaaggccctgggggaagagaaaggaggggcatcattatccccacaatatgtctcatataatcaatcctcctacacccagtgggatctccagcccgacacagactatgagattcacttgttcaaggagagaatgttccgtcaccagatggccgtgaagaccaatggtactgggcgtgtgagactgccgccagccggattcgcaaccgagggctggttcataggattcgtgtctgccatcatcctgttgctcttggtgctgctgatactgtgcttcatcaaacggagtaagggtggcaaatactcggtcaaggacaaggaagacactcaggtggactccgaggctcggcctatgaaagacgaaacatttggtgaatatcggtctttggaatcagacaacgaagaaaaggctttcggtagttcgcaacccagccttaacggcgacattaagccactcggatccgacgacagcttagcggattatggcggatctgttgatgtgcaattcaatgaagacgggtctttcatcgggcagtactcaggtaaaaaggagaaagaggccgctggtggaaacgacagctccggcgcaacctcaccgattaatcccgcagtggccttagaatag

SEQ ID NO: 228008 - DNA, 456 bp, synthetic construct
  misc_feature 1..456: note = Description of Artificial Sequence: Synthetic coding sequence
  source 1..456: mol_type = other DNA
atggtcgttgccctgaggtacgtgtggcccttgctgctttgtagcccttgcctactaatacagattcctgaagagtacgaaggtcatcacgtcatggaacccccagtgatcaccgaacaaagtccacgcagacttgtagtatttcctaccgacgatattagtctgaagtgcgaggcgagcggcaagccagaggtgcaatttcggtggacacgtgacggggtgcactttaaaccaaaggaggagttaggagtcaccgtgtaccagagcccacactcgggatcgttcaccatcaccgggaataactccaactttgctcagagattccaaggtatctatcgctgcttcgcatcaaacaaactcggaaccgcgatgtctcacgagattaggctgatggctgagggtgcaccaaaatggcctaaggaaactgtcaagcccgtcgaagtggaggaggggtag

SEQ ID NO: 228009 - DNA, 255 bp, synthetic construct
  misc_feature 1..255: note = Description of Artificial Sequence: Synthetic coding sequence
  source 1..255: mol_type = other DNA
atggtcgttgccctgcgttacgtttggccactattgctctgcagcccatgccttctgatccagatccctgaagaatatgagggccaccacgtaatggagccaccagtgatcaccgagcagtcccctagacgtcttgtggtgttccctaccgacgacatctctctcaaatgcgaggctagtggcaaaccagaagtgcagttcaggtggacacgggacggtgtgcacttcaaacctaaggaagagctgggggtttag

SEQ ID NO: 228010 - DNA, 3768 bp, synthetic construct
  misc_feature 1..3768: note = Description of Artificial Sequence: Synthetic coding sequence
  source 1..3768: mol_type = other DNA
atggtggtggctcttaggtacgtctggcctctgctgctgtgcagtccgtgtctgctaatccagatcccagaagagtctttccctggacatcgcgttgttatggagcctcccgtgatcactgagcaatcacctaggcgactggtggtttttcctaccgacgacatttcgctgaagtgcgaagcctctgggaagcctgaggtccagttcagatggactagagacggtgtgcattttaagccaaaggaagagttaggagtcaccgtgtaccagagtccccatagtggcagtttcactattactggaaacaatagtaatttcgcccagcgattccagggaatctataggtgtttcgccagcaacaaactgggcacggccatgtcacacgaaatacgcttgatggctgaaggggctcccaagtggccgaaggaaaccgttaaaccagtagaggtggaagagggagagagtgttgtgctgccctgtaatcccccacccagcgccgagccactgcggatctactggatgaactccaagatcctgcatattaagcaggatgagagagtgaccatggggcagaatgggaacctgtattttgctaatgttctcacttccgataatcatagtgactacatttgtcatgcacactttcctggtactagaaccataatccagaaggagcctattgatctgagagtgaaggctacgaattcaatgattgataggaagccccgactgctgtttcccacaaattcatcaagccacctcgtggcgctccaaggccagcctctcgtgctggagtgtatcgctgaagggttcccaacacctacaatcaagtggctgaggcctagtggaccgatgcccgctgacagagtaacctaccagaaccacaacaagacactgcagcttctgaaagtgggagaagaagatgacggggaatatcgatgtcttgccgaaaattcactgggctctgcacggcacgcctactatgtcactgtcgaagcagcaccttactggctgcacaaacctcagagccacctttacggaccaggcgagacagccagacttgactgccaagtgcaaggtagacctcagcctgaggtcacctggcggataaatggtattcctgtcgaggaattagctaaagaccagaagtatagaatccagagaggggctctgattcttagtaatgtccagcccagcgacaccatggtaacccagtgcgaggcgagaaatagacacggcctgttgttggccaatgcgtacatctacgtagtgcagctgcctgccaaaattctcaccgccgacaatcagacatatatggctgtccaagggtctacagcttacctactgtgcaaggctttcggagcccctgtgccctcagtacagtggcttgatgaggatgggacaactgtgctgcaggacgagcgcttctttccttacgcaaacgggactctgggaattcgagatctgcaagctaatgataccggccgatacttttgcctcgctgcgaacgaccagaacaacgtaactattatggctaatttgaaagtcaaggacgccacgcagattactcagggcccaagatctacaatagaaaaaaaaggctcgcgagttactttcacctgtcaggcaagcttcgacccctctctgcagccaagcatcacctggcggggagacggaagggacctccaagagctgggcgattccgataaatacttcatcgaagatggcaggctcgttatccacagcctggactatagcgatcagggtaactactcttgtgtggcttctacagaacttgatgtcgttgagtctcgtgcccagcttttggtcgtgggctcccccggtccggtcccgcgtctggtcctcagtgaccttcatcttctcacacaaagtcaggtgcgggtatcttggtctcctgctgaggaccacaatgcccctatcgaaaagtacgacatcgaattcgaggataaagagatggcgccagaaaagtggtattcgctcggcaaggttcctggaaaccaaaccagcaccacactgaagctctccccttatgtgcattatacctttcgagtgaccgctataaataagtacggcccaggcgaacctagccccgtgtccgagacagtggtaactccagaagccgcacccgagaagaatcccgtagacgttaagggcgaaggcaatgagaccaccaatatggtgatcacctggaaacctcttagatggatggactggaatgcccctcaggtacagtatcgcgtccaatggaggccacagggaacacgagggccttggcaggaacagattgtgtctgatcctttcctggtggtcagcaataccagtacttttgtgccttatgagataaaggtgcaggccgtgaacagtcaaggcaaagggcctgagccacaggtcaccattgggtacagcggcgaagattacccccaggccatcccagaattagaaggtattgaaatccttaattcttccgcggttctggtcaagtggaggccggtcgacctggcccaagtgaaaggccacctgcggggatataacgtgacttattggcgggaggggagccagagaaagcacagcaagcgacatatccacaaagaccatgtcgtggtgcccgcaaacaccacctctgtgatactgtctggcttacggccatatagcagttatcacttggaggtccaggcctttaatggcagaggatcaggcccagcctctgagttcacattcagcaccccagaaggtgttccagggcacccggaggctctgcacctcgagtgtcaaagtaacacctctctcttactgcgctggcagcctcccctgagtcacaatggtgtgctaacaggatacgtcctgagctaccacccattagatgaggggggaaaaggccagctatccttcaacctgcgcgaccccgagcttaggacgcataatctgaccgacttgagcccgcacctgaggtatcggtttcaacttcaagccacaaccaaggagggaccgggagaggcgatcgtcagagagggaggaactatggctctatccgggatctctgattttggaaacattagtgccacggctggggagaactatagcgtcgtctcttgggttcctaaggaggggcagtgcaactttcgctttcatattctgtttaaagcgttaggggaagaaaaggggggtgccagcctctcaccccaatacgtctcttacaaccaaagtagctacacacaatgggacctgcaacccgatacagattatgagatccacctattcaaggaacgcatgttccgacaccagatggcagtgaaaacaaatggtaccggtagggtgcgcctgccccctgcaggattcgcaaccgaggggtggtttatcgggttcgtgtcagccatcatacttctactactcgtcctcctgatcctttgctttattaaacggagcaaggggggaaagtatagcgtgaaggataaagaggacactcaggtggatagcgaagccagacctatgaaagatgagacgtttggagagtactccgataatgaagagaaggccttcgggagtagtcaaccttctctgaatggtgatatcaaacccctggggagtgatgacagccttgctgattacgggggaagcgtggatgtccagttcaacgaagatggatcatttattggtcaatactccggaaaaaaagagaaggaagccgctggaggaaatgactcaagcggggctacctccccaattaatcccgctgtggctctcgaatag

SEQ ID NO: 228011 - DNA, 351 bp, synthetic construct
  misc_feature 1..351: note = Description of Artificial Sequence: Synthetic coding sequence
  source 1..351: mol_type = other DNA
atggcagaaggggctcctaagtggcctaaagagactgttaagcctgtagaagttgaggaaggcgaatctgtcgtccttccctgtaatcccccaccttcggccgaacctctgcggatctactggatgaattccaaaattctacacattaagcaagacgagcgcgtgaccatgggccagaacggtaacctgtatttcgccaatgtcctcactagtgacaatcatagtgattacatttgtcatgcacacttccccggtacaaggacaataatccaaaaggaacctattgatctccgcgttaaggctacgaacagtatgatcgatcgcaagcctcggcttctcttcccgacgtag

SEQ ID NO: 228012 - DNA, 3780 bp, synthetic construct
  misc_feature 1..3780: note = Description of Artificial Sequence: Synthetic coding sequence
  source 1..3780: mol_type = other DNA
atggttgtggccctccggtacgtctggccgctgctgctgtgctctccatgcctgctgatccagattccggaagaaagcttcccaggccatagagtggtgatggagccaccagtaatcacggaacagtctcctagacgtctggtggttttcccaacagacgacatctccctgaagtgcgaagcttcggggaagcctgaagtgcagttcagatggacacgagatggggtccacttcaagccaaaagaggaactgggagtgaccgtataccagtcgccccactcaggttcattcacaattacgggcaataacagcaactttgcgcagcgattccaaggaatctaccgatgctttgcttccaacaaactgggtacagcaatgtcgcatgagatccgcctgatggccgagggggctcctaagtggcccaaggaaaccgtgaaaccagttgaagttgaggagggagaaagcgtcgtgctgccctgtaacccaccgccaagcgccgagccgctgcgcatttactggatgaactcaaagatcctgcatataaaacaagacgagcgtgtgacgatgggccagaacggcaacctctattttgcaaacgtattgaccagcgacaatcactcagactacatatgtcacgctcacttccccggaacgcgaactatcattcagaaagagccaattgatctgcgcgtgaaagccacaaattctatgatcgatagaaaacccagactcctgttcccaacaaattcctcgtcacatctcgtcgcattgcagggccagccgcttgtcctcgaatgtatcgcagagggatttcccaccccaacaatcaaatggttgcgcccatctgggccaatgcccgcagatagagtgacctatcaaaaccacaacaagactctgcagctgttgaaggtgggcgaagaggatgatggagagtaccgctgcttggccgaaaactcgctgggctcggcccgacacgcgtattatgtgactgtggaagcagcaccttattggttgcataaaccgcagtcacatttgtatgggccaggagaaactgctcggctcgactgtcaggtccaaggcaggccacagccggaagttacctggagaataaacggaattcctgtggaagagttggctaaggaccagaagtacagaatccagcggggtgccctcatcttgtctaacgtccagccaagcgacaccatggtcacccagtgcgaggccagaaatcgccacggccttctacttgctaacgcttacatctacgtcgtccagcttccagctaaaatcctgacagcagataaccagacatacatggccgtacagggcagcacagcataccttctgtgtaaagcgttcggagctccggtcccgtccgttcagtggctcgatgaagatgggaccactgtcctgcaggacgagagatttttcccctatgccaacggcacactggggattagagacctgcaggccaatgacactggacgatacttctgcctggccgcaaacgaccaaaacaatgtgaccattatggcaaatcttaaagtgaaggatgcaactcagatcactcaggggccacgctctacaattgagaaaaaaggttcacgcgtcacgtttacctgccaggcatcatttgacccaagcctccagccatccattacatggaggggggatggacgggatctacaggagctgggcgacagcgacaaatatttcatcgaggacggccgattggtgatccactcattggactacagtgatcagggtaactactcctgtgttgcttccaccgagctcgatgtggtcgagtccagggctcaactgctggtcgtcggttcaccgggtccagtaccgagactggtgttgagcgatctgcacctgctgacccagtcacaagtgcgtgtcagttggtctcccgctgaggaccacaacgctccaatcgaaaaatacgatattgagtttgaggacaaggagatggctccggaaaagtggtactcgctcggaaaagtgcctgggaaccagacaagcaccaccctgaaactttcgccctatgtgcattatacattccgagtgaccgcaattaacaaatacggtccaggcgaaccctcaccagtctcagaaacagtggtcactcctgaagccgcaccggaaaagaaccctgtggacgtgaaaggcgagggcaatgaaacaaccaatatggtgatcacctggaagcctcttcgatggatggattggaacgcccctcaggttcagtacagagtgcaatggcggcctcagggcacccgaggtccctggcaggagcagatcgtgtcagacccatttctagtagtcagcaacacttctaccttcgttccctatgaaattaaagtgcaggccgtcaactcccaaggcaaaggccctgagcctcaggtgaccattgggtacagcggtgaagactatccgcaagctattccagagctagaaggcatagaaattctcaatagtagcgcggtcctcgtgaagtggaggcccgtcgatctggcccaggtaaagggccatctgcggggatataacgtgacatattggagagaaggctcgcaacgaaaacatagtaagaggcatatccacaaggatcacgtcgtggtcccagccaatacaaccagcgtgattctgtcaggactccgaccatacagctcttaccaccttgaagtccaggcattcaatggacgcggaagtgggcctgcttctgagttcacgttctcgacacctgaaggagtgcccggtcatccagaggctctgcacttggaatgtcagtccaatacaagcctgctgctacgttggcaacctcctctttctcacaatggggtgctcactggatatgtcctttcttaccaccccctggacgaaggtggaaaggggcagctgtcctttaatctcagggatcccgaactgcggacgcataacctgactgacttgagcccacatctgcggtaccgctttcagttgcaggcgacaaccaaggagggtccgggtgaggctatagttcgcgaggggggtactatggcactcagcgggatctctgacttcggaaacattagtgcaaccgctggagaaaactattccgtggtctcttgggttccaaaagaggggcagtgcaatttccgatttcacatactcttcaaggcactaggtgaggaaaaggggggagcttcactgtccccacagtatgtttcttacaatcaatcttcctacacccagtgggacctacagcctgatactgattatgaaatacacttgttcaaggaaagaatgtttcggcatcagatggccgtgaagaccaatggcactgggagggtgcgcctgccccctgcagggtttgcaaccgagggctggtttattgggttcgtgtccgccatcatactgcttctgctagtccttctgattctttgctttattaagcgctcgaagggcggaaagtactctgtcaaagataaagaggacacccaggttgactctgaggccaggcccatgaaggacgagaccttcggagaataccgatctctcgaatcagacaacgaggagaaagcttttgggtcgtcccagccctccctcaatggggatattaaacctcttggatctgacgatagtctcgcagactatggaggctcagtcgatgtgcagttcaatgaggacggatcattcataggtcaatattctggaaagaaagagaaggaggcagctggtgggaacgactctagcggggctacatcccctataaaccccgctgtggcgctggagtag

SEQ ID NO: 228013 - DNA, 1326 bp, synthetic construct
  misc_feature 1..1326: note = Description of Artificial Sequence: Synthetic coding sequence
  source 1..1326: mol_type = other DNA
atggtgcctgctttaaggtaccttgtgggggcatgcgggcgagcaaggggtctgtttgcaggtgggagtcctggagcatgtggctttgccagtggacgccctcgcccactgtgtgggggatcgcggagcgcttctacaagttcttttgatatagttatcgtaggaggtggcatcgtaggcctcgcctctgccagggctttgatcctccggcacccctcgctctctatcggggtgctcgagaaagagaaagacctggcagtgcaccagacgggccataacagcggagttattcacagcggtatttattataagcctgagagcttaaaggctaagctgtgcgtccagggagcagcattactgtacgaatactgtcagcagaaaggaatctcttataaacaatgcggcaagctgattgttgcagtggagcaggaggagattcctcgactgcaggccctgtatgagaagggcttgcagaatggtgtccccggactacgactgattcaacaggaggatatcaaaaagaaagagccatactgccggggacttatggcgatcgattgcccgcatacgggaatcgttgactataggcaggtagcattgagcttcgcacaggatttccaggaggctggcggaagcgtgctaacgaacttcgaagtcaagggaatcgagatggccaaggagtcaccttctaggtcaattgacggaatgcagtacccaattgtgatcaagaacaccaaaggggaggagattcggtgtcagtatgtcgtcacctgtgccggactgtattcagacaggatctcagagctttccggctgcacacctgatccacgcattgtgcccttcaggggcgactacttactattgaagcccgagaagtgctatctagtgaaaggcaacatttaccctgtgccagactcccggttccctttcctaggggtccactttacccctcgaatggatgggtctatctggctcgggcctaacgcggtgctagcattcaaaagagagggatatcgacccttcgatttttcagccactgatgtcatggacatcatcataaattcgggcttgattaaactggcgtctcagaatttctcctatggggttactgaaatgtacaaggcttgcttcttgggtgccactgtgaagtatctccagaaattcatccccgaaatcaccatcagtgatatactccgacaggtggccgtgaggggccctagttggctgtggcagcagcccatgaaagttagcgacaataatatatattgctttctgtggagatgcttcgcactgctgctaaccggatcagcttgcagctttaagtag

SEQ ID NO: 228014 - DNA, 1392 bp, synthetic construct
  misc_feature 1..1392: note = Description of Artificial Sequence: Synthetic coding sequence
  source 1..1392: mol_type = other DNA
atggttcctgcactgaggtacctagtgggtgcctgcgggagggctcgaggtctttttgcaggaggaagtcctggagcttgcggattcgcaagtggacggcctcgcccactgtgcggcggttccaggtcagcctcgacctctagcttcgacatcgtgattgtcgggggtggaatcgtcggactagcttctgcaagggctctgatcctgcggcacccaagcctaagcatcggtgtcctagagaaagagaaggatctggctgttcatcagaccgggcacaactctggtgtgatccactctggtatttattacaaaccagaaagcctgaaagccaaactctgcgtgcaaggggctgcgctcttatacgagtactgtcagcaaaagggcataagctacaagcagtgcggcaagctgatcgtggctgttgaacaagaggagattccaagactacaagccctatatgagaagggcctccaaaatggggtgcccggattgaggctgatacagcaggaggatattaaaaagaaggagccctattgccggggacttatggctatcgactgtccccatactggcattgtggattaccggcaggtggccctgtcttttgcccaagattttcaggaggccggtgggagcgtgctgactaatttcgaggtcaagggcattgaaatggccaaagaaagccccagcaggtcaattgacggtatgcagtacccaatcgtaattaaaaatacgaaaggagaggaaattagatgtcagtacgttgtgacatgtgctggtctttacagcgaccgaatatctgaattgtccgggtgcacaccggacccacgcattgtgccattcaggggagactatctacttctaaagccagaaaagtgttacctcgttaaagggaatatctatccagtccctgattctcgttttccctttctgggcgtgcacttcacacccagaatggatgggtcgatttggctaggtcctaacgccgtgctggcatttaagcgcgaaggttacaggcccttcgatttcagtgccacagacgtgatggacatcataattaattccggcttaattaagctggccagtcaaaattttagctatggggtgaccgaaatgtataaggcctgtttcctcggagcaacagtgaagtatctccagaagttcatcccagagataactatcagtgatatactgagagggccagcaggagtcagagctcaggcgctggaccgcgacggcaatttagtggaagatttcgttttcgacgcaggcgttggagacatcgggaacagaatcctccacgtgaggaacgcaccttcccctgccgctacttccagcatcgcgatttctggtatgatcgctgatgaggtgcagcaacgcttcgaactgtag

SEQ ID NO: 228015 - DNA, 1392 bp, synthetic construct
  misc_feature 1..1392: note = Description of Artificial Sequence: Synthetic coding sequence
  source 1..1392: mol_type = other DNA
atggtgcccgcactccgataccttgtaggggcatgtggccgagcacgcggactatttgcagggggttctcccggagcttgtggatttgccagtggaaggcctcggccactctgcggcggatcacgctcagcgtcgacgtcaagtttcgatattgtcatcgtgggtggcggaattgtgggcctggcaagcgcaagggcactcatcctgcggcacccctctctttcaataggcgtactcgagaaagaaaaagatctcgccgtacaccagacaggacacaattcaggagtcattcatagcggaatctactataagcccgagtccctgaaagcaaagctgtgtgtccagggagccgcactgttatacgagtactgtcagcagaaggggatctcatacaaacagtgtgggaaacttattgtggccgtggagcaggaggagattcctagattgcaggcactgtacgagaagggccttcaaaatggcgtcccagggctgcggcttattcagcaggaagatattaagaagaaggagccttattgtaggggcctgatggccattgactgcccccacacgggtattgtagattatagacaggtggccttatcctttgcccaggacttccaagaagccggaggaagcgttctgactaattttgaagttaaaggaatcgaaatggctaaggagtcgccatctcgttcaatagatgggatgcagtaccccattgtgatcaaaaatactaaaggagaagagatccgctgccagtacgtcgtcacctgcgccggtctttacagtgaccgcatcagcgaattaagcggctgtaccccagacccacggattgtaccattcaggggagactacctgttgttaaaaccggaaaagtgttatctcgtgaagggcaacatctatccagttcccgactcccggttcccctttttgggtgtacacttcacaccgaggatggacggcagtatctggctggggcctaacgctgtgttagctttcaagagagaaggatatcgtcctttcgatttcagtgctacggatgtgatggatattattatcaattcaggcttgattaaactggcaagtcaaaacttcagttatggtgtgaccgaaatgtacaaggcttgcttcctgggggctaccgttaagtaccttcagaagttcattccagagatcactatctccgacattctgcggggaccagccggagtgagagcccaggccttggaccgggacggtaacctggtggaggatttcgtgttcgacgccggagtgggcgacatcgggaaccggatcttgcacgtgcgcaacgcaccaagcccagcagctactagcagcatcgcgattagcgggatgatagccgacgaagtgcagcagcggtttgaattatag

SEQ ID NO: 228016 - DNA, 3060 bp, synthetic construct
  misc_feature 1..3060: note = Description of Artificial Sequence: Synthetic coding sequence
  source 1..3060: mol_type = other DNA
atgctgtggcgagtcctgctgagcaaaaggccgccattcccgcacccggagcttgatttccaggaggccccaattccaagctgtcccggtaggctcccagggcgtaagaactcagtcgccctggccgctgctcctagaaaggagccgactggcgatcgagagaagccactgccctttccagtcctggctccattctctaaccctgagcattcggctcccgcaaaggtggtccgcgcagcggtgccgaagcaaagaaaagggtcgaaggtgggcgatttcggcgacgcaattaactggcccacccccggtgagatcgctcacaaatctgtgcaaccacaaagccacaagcctcagcctactcgcaagctccctccaaagaaggatatgaaggagcaggagaagggcgagggcagcgattcaaaggagagtccaaagacaaagagcgacgagtccggtgaagagaaaaatggtgacgaggattgccagagaggaggacagaaaaagaagggaaacaaacataagtgggtccccctgcagatcgatatgaagccagaggttcctagggagaagcttgcatctcggcctacacggccaccagagccacgccacattccagctaaccgcggagagatcaaagggtcagagagcgctacatacgtccctgtcgccccacctacccccgcttggcagccagagataaaaccggaacccgcatggcacgatcaagatgagacgtcctccgtgaaatctgatggggctggcggtgctagggcttcatttcggggacgagggcgtgggaggggacggggaaggggcagggggcgtggcggaaccagaacacactttgactaccagttcggttataggaagttcgacggggttgaagggcctcggaccccaaagtacatgaataacattacctattacttcgataatgtctctagcactgagctgtattccgtcgatcaagaactcctcaaagactatataaaaaggcaaattgaatactatttttcagttgataacctggagcgggatttttttttgcgacgtaaaatggatgccgacggctttctgccaattacacttatcgctagctttcacagagtgcaggcactgaccacagacattagcctgatctttgcggcactgaaggacagcaaagtcgtggaaatagttgatgagaaagttaggcgccgtgaggagcccgagaagtggcccctccccccaatcgtcgactattcgcagaccgactttagccaactgctgaactgccctgaatttgtgccccgacaacattaccagaaggagactgaaagcgcaccgggaagcccgcgtgctgttaccccagtccctactaaaaccgaagaggtatctaatctgaagaccttacccaaaggattgagcgcttccctgcccgatctggactcagaaaactggattgaggtgaagaaaagaccacgtccctcccctgccagacctaagaagagtgaagagagtagattttcacacttgacttctctaccccagcagcttcccagccagcagctaatgtcaaaggatcaggatgaacaagaagagcttgacttcctgtttgatgaagagatggaacagatggacggcagaaaaaacaccttcactgcctggagcgatgaagaatcagattacgaaatcgacgatagagatgttaacaagattctcattgtcacacagactcctcattatatgcggaggcaccccggtggtgatagaacagggaaccacacctcaagggcgaaaatgtctgcagaattagctaaggtgatcaacgacggccttttttactacgagcaagatctttgggccgaaaagtttgagcccgagtacagccagatcaagcaggaggtcgaaaactttaagaaagtgaatatgatatccagagaacaatttgacactctgactcccgagcccccagtcgaccctaaccaggaggtgcctccaggcccaccacgttttcagcaagttccaaccgacgccctcgccaataaattgtttggagcccctgaaccatcaacaatcgccagatccctgcctaccacagttcccgagagcccaaactaccgaaatacacgtacaccacgaacccctagaaccccccagttaaaggactcctcccagacatctaggttttatcctgtcgtgaaggaggggaggacgttagacgctaaaatgccacgcaagcggaaaacaagacactcatcaaatccaccactagaatctcatgtcggctgggtaatggactcgcgagaacatcgtccgagaactgcctccatctcctcttcccccagtgagggcaccccaactgtaggcagctatggttgtaccccccagagcctcccaaagttccagcatcccagccacgaactcctcaaggagaacggattcacacagcatgtctaccataaataccgaagaagatgtctgaacgaacggaagcgactaggcataggtcagtcccaggaaatgaataccctgttccggttctggtctttcttccttcgggaccatttcaataaaaaaatgtatgaggagtttaaacaacttgcattggaggatgctaaggagggttacaggtatgggctcgagtgtctcttcaggtattacagttacggccttgagaaaaagttcaggttggacattttcaaggattttcaggaggagaccgtaaaggattatgaggccggacagctgtatggacttgaaaaattctgggcatttttaaaatatagtaaagccaaaaacctcgacatcgacccaaagctacaggaatacctcggcaaatttcgcaggttagaagatttcagggtcgatcccccaatgggcgaggaaggcaaccacaagagacattcagttgtggccggaggaggtggtggagagggccgaaagaggtgtccttcccagagctcctcacgcccagcagccatgatcagtcagccaccgacccctcctaccggacagccagtcagagaagacgcgaagtggacctcacagcactcaaatacacagactctaggtaaatag

SEQ ID NO: 228017 - DNA, 2451 bp, synthetic construct
  misc_feature 1..2451: note = Description of Artificial Sequence: Synthetic coding sequence
  source 1..2451: mol_type = other DNA
atggccacacaggtcgagcctctcttgcctggcggagccaccctgctgcaggccgaggagcacggcggactcgtgcggaagaaaccaccccctgccccagaaggaaagggagagccaggtcccaatgacgtgaggggcggtgagcctgatggtagcgcacgacggccacgacccccttgtgccaaaccccacaaagaaggaaccggccaacaggaaagggaaagccccagacctctccagctgcccggagccgaaggccctgccatttccgacggggaggaggggggaggagagcctggagctggcggaggggctgccggtgctgcaggcgcaggacgcagggacttcgttgaggccccacccccaaaggtgaacccatggaccaagaatgctctcccacccgtgttaacaactgtaaatgggcagagccctcccgaacattctgccccagctaaagtggtgcgggcagccgtacctaagcagcgcaaaggaagtaaggtaggcgatttcggagacgcaattaactggccgacacctggagagattgcccataagagtgtgcaaccgcagagtcataagccacaacctaccagaaagcttcccccaaaaaaggatatgaaggaacaggagaagggcgagggctcagatagcaaggaatccccaaagactaagtccgacgaatctggagaggagaagaatggggatgaagattgtcagagaggaggccagaaaaagaagggcaacaaacataagtgggtgccgctgcagattgacatgaagccggaggtcccgagagagaagctggcctctaggcccacaaggccgcctgaacctaggcacatccctgccaacagaggggagataaagggcagtgaaagcgcaacctacgtgcctgtggcccctcctacccccgcatggcaacccgagatcaagccggagcccgcatggcacgatcaagatgaaacatccagcgtaaagtcagacggcgcagggggagccagagcttcgtttcggggtcggggacggggaagagggagagggagaggcagaggcagaggaggcactcgtacccactttgactatcagttcggttaccggaaatttgatggcgtagaaggaccccgtactcccaagtacatgaacaatataacttattattttgataatgtttcctctaccgaactatatagcgtcgatcaggaactgctcaaggattacatcaagcgtcagatcgaatactactttagcgtggataacctggagagagacttcttcttaagaagaaagatggacgctgacgggtttcttcccataactctgatcgcaagttttcatagagtgcaagcactgaccactgacatctctctaattttcgccgcactgaaagacagcaaggttgtcgaaatcgtagacgaaaaggtgcgacgtagagaggaacctgaaaaatggcccctcccaccaatcgtggattatagccagaccgattttagccagctgctgaactgcccagagttcgttccgcgacagcattaccagaaagagaccgagagtgccccagggtcacctcgagccgtgactcccgtacctacgaaaacagaagaagtgagcaacctgaagaccttacccaaggggttatcggcctctctccccgacctggattccgagaactggatagaagttaagaagcgtcccaggccatcccccgctagaccgaagaagtccgaagagtctcgattttcccacctcacaagcttacctcagcaactgccttcacagcagctaatgtcaaaggatcaggatgaacaagaggaactcgatttcctgttcgacgaagaaatggagcagatggatggacgcaaaaacactttcacagcatggtccgatgaagaaagtgattacgaaatcgatgaccgggatgtgaataagatcttgattgttacacagaccccccattatatgcgcagacatcctggaggcgaccgcactggtaatcacactagtagagcaaagatgagcgcagaactagccaaagtcatcaacgacggcctgttctattacgagcaggatctgtgggcggagaagtttgaaccagagtactcacagatcaagcaggaggtcgaaaactttaagaaagtgaacatgatctcccgagagcagtttgacacattgaccccagaaccccctgtggatcctaatcaggaagtcccaccaggaccacctcgatttcagcaggtgccaactgatgcactggcaaataaactgtttggcgcaccagaaccctccacaatcgcacgatccttgccaactactgtccctgagtcccccaattaccgaaatacgcgcacaccccgaaccccacgcacaccgcagcttaaagatagtagtcagacatctcgcttctatccagtggtgaaggaagggaggacacttgacgctaaaatgccacggtag

SEQ ID NO: 228018 - DNA, 282 bp, synthetic construct
  misc_feature 1..282: note = Description of Artificial Sequence: Synthetic coding sequence
  source 1..282: mol_type = other DNA
atgaaggagcaggaaaagggggagggttccgactcaaaggagtccccgaagaccaagtcagatgagagcggcgaggagaaaaatggggacgaggactgtcagagagggggtcagaaaaagaagggaaacaaacataaatgggtgcccctgcaaatcgacatgaagccagaagttcccagagagaagctggccagtcgcccaactaggcctcccgaacctaggcatatccccgctaacaggggtgaaattaaaggcagcgagtctgctacctatgtgccttag

SEQ ID NO: 228019 - DNA, 1836 bp, synthetic construct
  misc_feature 1..1836: note = Description of Artificial Sequence: Synthetic coding sequence
  source 1..1836: mol_type = other DNA
atgaaggagcaggaaaagggggaaggctctgactcaaaggagagccccaagacaaagagtgatgaaagcggcgaggagaaaaatggcgacgaagactgtcagagagggggacaaaagaaaaaggggaacaaacacaaatgggttccactgcagatcgatatgaaacctgaggtacctagggagaagctggcgtcccgtcctactcgtcctccagaaccccgacacattcccgctaacagaggggagattaagggctccgagtcagccacatatgttcctgttgcccctcctaccccagcctggcagccagaaattaagcccgagcccgcatggcatgaccaggacgaaacttcctccgttaagagcgacggggcaggaggcgctcgggcttcattcaggggacggggaagaggacgagggaggggccgtggacgtggccgaggcggaactcgtacccatttcgattatcaattcggctatcgtaagtttgatggtgttgagggcccacgaacccctaaatatatgaacaacatcacgtactatttcgacaacgtttccagtactgaactgtactctgtagaccaggagctgttgaaggattatattaagcgtcaaatcgagtattacttcagtgttgataacctggaaagagattttttcctgcgcaggaagatggacgctgatggattcttacctataacattgatcgccagcttccatcgcgttcaagccttgacgaccgatatttccctcatttttgccgctttgaaggatagcaaggtggtggaaatcgtggacgagaaggtgcgccgtcgtgaggaaccagagaagtggccacttccccctattgtggactactcacagactgacttttcacagctgctgaactgtccagagttcgtgcctcgacagcactatcagaaggaaacggaatccgcacccggtagcccgagagctgtcacccctgtccccaccaaaaccgaggaagtctcaaacctgaagaccttgcctaaaggactcagtgcctcacttccagatctggatagcgagaactggatcgaggtcaaaaagcgcccaagaccttctcctgcacgccctaaaaagagtgaggaaagtcgattcagccatctaacaagcttgccccaacagctcccaagccagcagctgatgagtaaagatcaggatgagcaggaagaacttgacttcctctttgacgaggaaatggagcagatggacggacgcaagaacacttttaccgcttggagcgatgaggaatccgactacgaaatcgatgatcgggacgtgaataaaatcttaatagtaacgcagacaccccattatatgcggcgacaccctggaggggatagaactggcaatcatactagcagagcgaaaatgagtgcagagctcgctaaagtgatcaatgatggcctgttttactacgagcaagacttgtgggctgagaagttcgaacccgagtactcacagatcaaacaggaagtggaaaacttcaagaaggtgaatatgatctctcgtgaacagtttgacaccctgactcccgagccccctgttgaccccaatcaggaagtccctccaggccctcctagatttcagcaggtgccaactgacgctttagccaacaagctcttcggtgcacctgagccgagtaccattgcacgcagcttacctaccacggttcctgagagtcccaactatcgcaacacacgcacccccagaacacctaggacacctcaactgaaagactcctctcagacatcacgtttctatcccgtggtgaaagagggcaggactctagacgccaaaatgccgcgttag

SEQ ID NO: 228020 - DNA, 1749 bp, synthetic construct
  misc_feature 1..1749: note = Description of Artificial Sequence: Synthetic coding sequence
  source 1..1749: mol_type = other DNA
atggagaccgagtcgggcaaccaagaaaaagtcatggaggaggagtccacagagaaaaagaaagaggtcgagaagaagaaacggtcgagggtgaaacaagtcctggccgatatcgctaagcaagtcgatttctggtttggcgacgcaaatttacacaaagaccgttttctccgcgagcaaatagagaagtcacgagacgggtatgtcgacatcagtctgcttgtttcattcaataagatgaagaagctcaccactgacgggaaactgatcgctagagcgctgaggtcctccgcagtggtggaattagatctggaaggcacccggatccggagaaagaagccgctgggcgaacggccaaaagacgaagatgaacgcacagtatacgtggaactgttgccaaagaacgtgaaccacagctggatcgagcgagtttttggtaagtgtggcaacgtcgtgtatattagtatacctcattacaagtcaaccggagaccctaagggattcgcattcgtcgagtttgagactaaagagcaggccgctaaagcaatcgagtttctcaacaaccctcccgaagaggcacctaggaagcctggcatctttccaaagacggtgaagaacaaacctatccctgccctcagagtggtggaggagaaaaaaaagaaaaagaaaaagaaagggcgaatgaaaaaagaagataatatccaggctaaagaggagaacatggacacctccaatacatctattagcaaaatgaagagaagtcggccaacatccgaaggttccgacatcgagtcgacagagccccagaagcagtgctcaaagaaaaagaagaagagagatcgcgtggaggcttcaagcctccccgaggtcaggaccggtaaaagaaagcggtcatccagcgaagatgccgaatcgctcgccccacgctcgaaagtcaaaaaaatcatccagaaggacatcataaaagaagccagcgaggcttctaaagagaaccgcgacattgaaattagcacggaagaggagaaggatacaggagaccttaaagatagctccttactcaaaactaagcggaagcacaagaagaagcacaaggagcggcacaaaatgggcgaggaagttattcccctcagggtcttaagtaaatccgagtggatggacctgaagaaggagtatctggctttgcaaaaggcctctatggcttctcttaaaaagaccattagccagataaagtcggagtcagaaatggagacggactcgggcgtcccacagaacacagggatgaagaacgagaagaccgctaatcgggaggaatgtaggacccaagagaaggtgaacgcgaccgggccacaattcgtgagcggggtcatcgtaaagataatttccacagagccgttacccggtagaaaacaggtcagagacaccttggccgctatttcggaggtactatacgttgacctgctggaaggcgacaccgagtgccatgccaggttcaagacaccagaggacgcgcaggcagtgatcaacgcctacaccgagattaataagaaacattgttggaagttggaaattctgtccggcgaccatgagcagcgatattggcagaagatcctggtggatcgccaagcgaagttaaaccagcccagagagaagaagcggggaacagaaaagctgatcacaaaagcagagaaaatcaggctggcgaaaacgcagcaggcttcaaaacatattcgattcagtgagtacgactag

SEQ ID NO: 228021 - DNA, 1749 bp, synthetic construct
  misc_feature 1..1749: note = Description of Artificial Sequence: Synthetic coding sequence
  source 1..1749: mol_type = other DNA
atggagactgaatctgggaatcaggagaaggttatggaggaggagagtacagagaaaaaaaaggaagtggaaaaaaagaagagaagtagggttaaacaggtgttggctgatatcgcgaaacaggtggacttttggtttggtgacgctaatctgcacaaggacaggttcctgcgcgagcagatagagaaatcaagggatggttatgtggatatatcactgctggtgagcttcaacaaaatgaagaaactgactacagacggtaagttgatcgcaagggccctccggtcatcagcagtggttgaactggacctagaagggacccgaattcgcagaaaaaaacccttgggcgaacgcccaaaggatgaggacgaaaggacagtgtatgtcgaattgctcccaaagaacgtgaatcattcatggatcgaacgagtctttgggaagtgtgggaatgtcgtgtacatctccattccccactacaagagcactggagatcctaagggatttgcattcgtggagtttgagactaaagagcaggcagcaaaagccatcgagtttctgaataacccacctgaagaagctcctaggaagccagggatctttccaaaaaccgtgaaaaataaaccaatacctgcattgcgtgtggtcgaggagaaaaagaagaagaagaagaaaaagggcaggatgaaaaaggaggataatattcaagcgaaagaggaaaatatggacacctctaatactagcataagtaagatgaagagaagtcggccaacctccgaagggtccgatattgaatccacagaaccccagaagcagtgcagtaagaaaaagaaaaagagagaccgtgtggaagcctccagcctgcctgaggtgaggactgggaagcggaagcgcagttcctcagaggacgctgagtccctggccccaagaagcaaggtgaaaaagatcattcagaaagatatcatcaaggaggcctcggaagccagcaaggagaatcgcgatatcgagatttccacagaggaggaaaaagatacgggggacctgaaggacagttctttgcttaagacaaaacgtaagcataaaaagaaacataaagaacggcacaagatgggcgaagaagtcatacctctcagggtgctttccaaatccgaatggatggatctcaagaaagaatacctcgctctgcagaaagcttccatggcctctttaaagaagaccatctcacagataaagagcgaatccgagatggagacagactccggtgtaccccaaaatacaggcatgaagaatgagaagaccgcaaaccgcgaggagtgccgtacccaggagaaggtgaatgctactggtcctcagtttgtgtctggtgtgattgtcaaaattatcagtacagagcccctccccggaaggaagcaggtccgagacactctggctgccatctctgaagtgctgtacgtagacctcctggagggagataccgaatgccatgcacgctttaaaacccccgaggacgcccaggccgtgatcaatgcgtacactgaaattaacaagaagcactgttggaagttagaaattctttcgggagaccatgaacagagatactggcaaaagatcctagtcgaccgtcaggcgaagttgaaccagccacgtgagaagaagcggggaacagaaaagctcattactaaagcggaaaaaatccgcttagccaaaacgcagcaggcttcaaagcatattcgcttcagcgagtacgactag

SEQ ID NO: 228022 - DNA, 900 bp, synthetic construct
  misc_feature 1..900: note = Description of Artificial Sequence: Synthetic coding sequence
  source 1..900: mol_type = other DNA
atggaaacagagagcggtaaccaggagaaagttatggaggaagagtccaccgaaaaaaaaaaggaggtggagaagaaaaaaagaagccgggtaaagcaggtcctggcagatatcgcgaagcaggtcgatttttggtttggcgacgccaaccttcataaggatcgtttcttaagggaacagatcgaaaaatctagggatggctacgtggacatatcactgttggtgtctttcaataagatgaaaaagctaacaacagacggtaaattaattgccagggccctcagatcatcagcagtggtggaacttgaccttgagggaacacgcatccggaggaagaagcctctcggggagaggcctaaagatgaagacgaacggacagtctatgtggagctgcttccaaaaaatgttaatcactcctggatcgaaagggtgtttggaaagtgtggcaacgtagtgtacatttctatcccacactacaaatctacaggagaccctaaagggtttgcctttgttgaatttgaaaccaaagaacaggccgcaaaagccatcgaattcttaaacaaccccccagaggaggccccacgcaagcccggaatctttccgaagacggtcaaaaacaagcccatccctgctctgagggtggtcgaagagaagaagaaaaaaaaaaagaaaaagggaagaatgaagaaagaagataacatccaggcaaaggaggaaaacatggatacgtcaaatacgagcatcagtaagatgaagcgctcgagaccaactagcgagggcagcgatatagagtcgaccgagccgcagaaacagtgctccaagaagaagaaaaaaagggatcgggttgaggcatcttccctacctgaggtcaggactggaaaacgtaagagatcttcttag

SEQ ID NO: 228023 - DNA, 390 bp, synthetic construct
  misc_feature 1..390: note = Description of Artificial Sequence: Synthetic coding sequence
  source 1..390: mol_type = other DNA
atggagaccgagtcagggaaccaggaaaaagtaatggaagaggagagcacagaaaagaaaaaagaggtcgaaaaaaagaagagaagcagagttaagcaagtcctggctgacattgccaagcaagtcgacttttggttcggtgacgccaatctccataaggacagatttttacgggaacaaatagaaaaaagtcgcgatggctacgtagacatctcactactggtctcctttaataaaatgaagaagcttacgactgatggcaagctgatcgccagagcccttcgttccagtgcggtggtggaattggacctcgaaggcacgaggatccgtcggaaaaagcctctgggggagcggcctaaggacgaagacgagagaaccgtatacgtctag

SEQ ID NO: 228024 - DNA, 360 bp, synthetic construct
  misc_feature 1..360: note = Description of Artificial Sequence: Synthetic coding sequence
  source 1..360: mol_type = other DNA
atggagaccgagtccggtaaccaggaaaaagttatggaagaggagtcaaccgaaaagaaaaaagaggtggagaaaaaaaagagatctcgagttaagcaggtgctggcggatatagctaaacaggtagatttttggtttggagacgcaaacctgcacaaagacaggtttctgagggagcagatcgagaaaagccgggacgggtatgtggacattagcctgctggtgtccttcaacaaaatgaagaaactgacaacagacgggaaattaattgcaagggctctgcgctcctccgcagtggtcgaactggatctcgagggaacccgtataagacgaaaaaagcccctgggagagcgcccatag

SEQ ID NO: 228025 - DNA, 1770 bp, synthetic construct
  misc_feature 1..1770: note = Description of Artificial Sequence: Synthetic coding sequence
  source 1..1770: mol_type = other DNA
atgattcccaatatagaaggcatggagaccgagagcggaaaccaggaaaaagtcatggaggaagagagtacagagaagaaaaaggaggtggaaaaaaagaagcgatctcgggtgaaacaggtgttggcggacatagctaagcaggtagatttctggtttggcgacgcaaacctgcacaaggacaggtttctgagggaacaaatcgagaaaagtcgcgacggatacgttgatatctcgctgctggtgtcctttaataagatgaagaaacttaccaccgacggtaaactcattgctcgagcgcttcggtcatccgctgtggtggagctcgacctcgagggcacccgcattcgccgaaagaagcccctgggagaaagaccaaaagatgaagatgagaggactgtctatgtggagctactgcctaagaatgtgaatcactcctggatagaaagagtttttggaaagtgcggaaatgtggtctatatttcaatcccgcactataaatccaccggagacccaaagggatttgcttttgtggagttcgaaaccaaggagcaggccgcaaaagctatcgagtttcttaataacccgcctgaggaggccccacgtaaacctggaattttccccaagaccgtaaagaacaaacctatcccagctctgcgggtggtggaagagaaaaagaaaaagaagaaaaagaaggggcgtatgaaaaaggaagacaatatccaagcgaaggaggagaatatggatacctcaaacacttccatctccaagatgaaacgatcgagacccacctctgaaggttctgatatcgagagcaccgagccacagaagcaatgttccaagaagaaaaaaaaaagggatcgggttgaggccagcagcttaccagaggtgaggactggaaaacgtaaaagatcaagtagcgaggacgccgaatcgctggcccctaggtctaaggtaaagaaaattatacagaaggacataatcaaggaagcctctgaagcaagtaaagagaaccgcgatatcgaaattagcacagaggaggagaaggacactggagacctgaaagactcatcgttactcaagacaaagcgtaagcacaagaaaaagcataaagagagacataaaatgggggaggaagtaataccattaagagtcctgtctaaatctgagtggatggacttgaagaaggagtacctggccctgcaaaaggcctccatggcctcacttaaaaagactataagtcaaattaagtcagagagtgagatggaaaccgactccggcgtgcctcaaaacacaggaatgaaaaatgagaaaaccgccaaccgggaggagtgccggacccaggagaaggtgaatgccacaggaccgcagtttgtctccggagttattgttaagatcattagcaccgaacctcttcctgggaggaagcaagttagggatacccttgccgctatctctgaggtgttgtacgtcgatctattggaaggagacactgaatgtcacgctcgctttaagacgccggaagacgcccaggcggtgatcaatgcctacacggagataaacaagaagcactgttggaagctcgagattctcagcggcgatcacgaacaacgttactggcagaaaatcctcgttgaccgccaagccaaattgaatcaaccacgcgagaaaaaaaggggcactgaaaagctgatcaccaaagcggagaagatacgactggctaaaacgcagcaggcttctaagcatatccgattctccgaatacgactag

SEQ ID NO: 228026 - DNA, 417 bp, synthetic construct
  misc_feature 1..417: note = Description of Artificial Sequence: Synthetic coding sequence
  source 1..417: mol_type = other DNA
atgaagttcacgactctgctgttcttggccgcagtcgccggtgccttggtgtatgcagaagacgcgtcatctgattccactggagctgacccggctcaagaggcgggaacctccaagcccaatgaagagatttctggccctgcagaacctgcgtccccgccagagactacgaccacggcacaggaaacttctgccgctgccgttcaaggcactgctaaggtgaccagctcacgccaggagcttaatcccctcaaatccatcgtcgaaaagagcatccttttaaccgagcaggcactggccaaagctggcaaaggtatgcacggcggagtgcctggcggaaaacagttcatcgaaaacggcagtgaatttgcacagaaactgctgaagaagttttccctgttaaagccatgggcctag

SEQ ID NO: 228027 - DNA, 429 bp, synthetic construct
  misc_feature 1..429: note = Description of Artificial Sequence: Synthetic coding sequence
  source 1..429: mol_type = other DNA
atgcgcttctttgtgccgctgttcttggtgggcattctcttccctgccattttagcaaaacaatttacaaaatgtgagctgagccagctccttaaagacatcgacgggtacggcggtatcgccctccctgagttaatttgcacaatgttccacacttccggatatgatacccaggctatagtggagaacaacgagagcaccgaatatggcctgtttcagataagcaacaagctgtggtgtaagagcagccaggtccctcagtctcgcaatatatgcgatatttcctgcgacaagttcctcgacgacgacatcaccgatgatataatgtgtgcgaaaaaaattctcgatattaagggcatcgactactggctcgcacacaaggctctgtgcaccgaaaaactcgagcagtggctatgtgagaagctttag

SEQ ID NO: 228028 - DNA, 1644 bp, synthetic construct
  misc_feature 1..1644: note = Description of Artificial Sequence: Synthetic coding sequence
  source 1..1644: mol_type = other DNA
atgtatcgtctgatgtccgctgtgacagccagggctgctgcccctggcggtctggcttcatcttgcggcagaaggggagtccaccagagagcgggacttcctccactcgggcacggatgggtcggcggactcgggctgggtctgggactagcccttggcgttaaattggcaggtggactcagaggagcggcacccgcacagagtcccgctgcccctgacccagaggccagtcctttggccgagccccctcaggaacaaagtctcgctccatggtccccccagacaccagctccaccttgcagccgctgcttcgccagggccattgaaagctctcgggatttattgcaccggattaaggacgaggtgggcgcacccggaatcgtggtcggggtatctgtggacgggaaggaggtgtggtccgagggtttggggtacgcagatgtggagaatcgtgtcccatgcaaacctgagaccgttatgcggatcgctagcattagcaaatccctgacaatggtagccctggccaaactttgggaagcaggcaaacttgatctagacatccctgtccagcactacgtgcctgaatttccagagaaggagtatgagggagagaaagtttccgtgacgacacgcctcctcatcagccacttaagtggcattcgccattatgaaaaggatatcaaaaaggttaaggaggaaaaagcctataaggcattaaagatgatgaaagagaacgtggccttcgagcaagagaaggagggcaaaagtaacgaaaagaatgatttcactaaattcaaaacagaacaggagaacgaggccaagtgtaggaattcgaaaccagggaaaaagaaaaacgactttgaacagggagaactgtacctcagggaaaagttcgagaacagtatcgaatctttaaggctgtttaagaatgacccactgttctttaaaccgggaagccagtttctctacagcacttttgggtacacactcctggcggctattgtcgagagagccagcggctgtaagtatctcgattatatgcagaagatttttcatgacttggatatgcttactacggtgcaggaagaaaatgagcccgtgatatacaaccgggcacgcttctacgtctacaacaagaaaaagcgtctggtgaacactccttatgtcgacaactcctacaaatgggcaggcggagggttcttgtccacagtgggcgacctccttaagttcggaaacgcaatgttgtatggttatcaggtcggtttgtttaaaaactctaacgagaatctccttcctggatacttgaagcccgagacaatggtgatgatgtggacaccagtgcccaacaccgagatgagctgggataaagagggtaagtacgccatggcttggggcgtggtcgagcgaaaacagacatacggtagctgtcgtaagcaacgccactatgcctctcacactggtggggcagtcggagccagttcggtgctgctggttctccctgaagagctggacacagagaccatcaataataaagtaccccctcgcggaattatagtatctatcatttgtaatatgcagagtgttgggcttaactcaacagctttgaagattgcgttggaattcgacaaagatcgctcagattag

SEQ ID NO: 228029 - DNA, 1122 bp, synthetic construct
  misc_feature 1..1122: note = Description of Artificial Sequence: Synthetic coding sequence
  source 1..1122: mol_type = other DNA
atgtatagattaatgagtgccgtcaccgcgagggcggctgcgcctgggggactcgcaagcagctgtgggagacgcggagtgcaccagcgggcagggcttccaccactgggacacggctgggttgggggactcggtttaggtctgggtttggcactgggggtaaagctagcagggggactcaggggagccgcacccgcacaatccccagccgcaccagatccggaggcctccccactggctgagccaccccaagaacagagtctggcaccttggagcccgcaaactcccgctccaccatgttctcgatgctttgcacgagccatcgaatcgtcccgtgatttgctacatcgcatcaaagatgaggtcggcgcaccgggtatagtggtgggggtctccgtggatggaaaagaagtgtggtcagaggggctgggatacgccgacgtggagaatcgagtaccctgcaagcccgagacagtcatgcgcattgcgagcatttccaagagcctaacgatggttgcccttgccaaactttgggaagcagggaaattagacctagacattccagtgcagcattacgtgcctgagtttcctgaaaaggagtatgagggggaaaaagtgagcgtgaccacgaggttgctgatcagccatctctcgggcatccgccactatgagaaggatattaagaaggtgaaagaggagaaagcttacaaagcactgaaaatgatgaaagagaacgtcgcttttgagcaggagaaagaggggaaatcaaatgaaaagaacgacttcactaaatttaagacagagcaggaaaatgaggcgaaatgtcggaatagcaaaccaggtaaaaaaaagaacgactttgagcagggggagctgtacctacgggaaaaatttgaaaatagcatcgagtccctgaggttgttcaaaaatgaccctctgtttttcaagcccggatctcagttcctctactctacattcggatatacattactagccgcaattgttgaaagagcttctgggtgtaagtacctggattacatgcagaagatcttccacgacctggatatgctgactactgttcaagaagaaaatgagcctgtcatatacaatagagctaggtag

SEQ ID NO: 228030 - DNA, 5784 bp, synthetic construct
  misc_feature 1..5784: note = Description of Artificial Sequence: Synthetic coding sequence
  source 1..5784: mol_type = other DNA
atggagctctcttggcatgtggtgtttatcgctcttttgtcattcagctgctggggatcagactgggagagtgataggaatttcatatctactgctggaccactgacaaatgatttattgcataaccttagtggcttactgggagatcagtcctccaactttgttgcaggggacaaggacatgtacgtgtgccatcagcctctgccaacgtttcttcctgagtacttttcatctcttcacgcatctcagatcacccactacaaagtattcttgtcctgggcacagctgctgcccgctggaagcactcagaatcctgatgagaaaaccgtgcaatgctacagaagactgctgaaggccttaaaaacggcaaggctgcaacccatggtgatcctgcaccaccagacactccccgcatctaccctgagaaggacagaggcttttgctgacctcttcgctgattacgcaaccttcgcttttcattcatttggcgacctggtgggaatctggtttacattcagtgacttggaggaggtgattaaggagctgcctcatcaggaatcacgtgcctctcaattacagactcttagcgacgcacatagaaaagcctacgagatatatcacgaatcctacgctttccagggcggaaaactcagtgttgtgctgagagcagaggacatccctgaactgctgctggaaccacccattagcgctctggcccaagatactgtagatttcctgtccctggacctgagctatgagtgtcagaacgaggcttctctgcggcaaaagctgtcgaagttacagacaatcgagcctaaagttaaggttttcatctttaatctgaagctgccagactgcccaagtactatgaagaaccccgctagcctgttatttagcctgttcgaggccatcaacaaggaccaagtgttaactattggtttcgatataaatgagttcctctcttgcagttcatcatcgaagaagagcatgagctgctccctgacagggtctctggcactccagcccgatcaacagcaagatcacgaaacaactgacagtagccccgcatccgcctatcagcgcatctgggaagcgttcgccaaccagagccgcgcagagagagacgcattcctgcaggataccttccccgagggattcttatggggggctagcaccggagccttcaatgtggagggcggatgggccgaaggaggcagaggggtgagtatctgggacccccgtcggcctttgaatacgaccgaaggccaagctacgcttgaagtggcttcggattcctatcacaaagtggccagcgacgtggcactcctctgcggactgcgcgctcaggtgtataagttctccatctcatggtcacgcatttttcccatggggcatggctcttctcccagcttacctggcgtagcctactacaataagctgatcgacagattgcaggacgcaggaatcgagccaatggccactctgtttcactgggacctcccccaggccctccaggaccacgggggatggcagaatgaatctgtagtcgacgccttcctcgactacgctgcgttttgctttagcaccttcggcgaccgggtgaaactctgggtgacattccacgagccctgggtgatgagttatgccggatatggcaccggtcagcacccacccggaatatccgatcctggagtggcctcctttaaagttgcacacctcgtgctgaaggcacacgcacgtacttggcatcattataactcccatcaccggcctcagcaacaggggcatgtgggaatcgtactaaattccgattgggcggagccactgtcccccgagaggccagaagacctcagagctagtgagaggtttttgcattttatgctgggctggttcgcccacccagtttttgtggatggcgactaccctgctactcttcggacacagattcaacagatgaaccgccaatgcagtcatccggttgcccagttgcctgagttcacagaggccgaaaagcagctcctgaaaggctcagccgattttctcggactttctcattatacatcgcggctcattagtaatgcccctcaaaatacctgcatcccttcttatgacactatcgggggttttagccagcatgtcaatcacgtgtggccgcaaacgtcctctagttggatccgggtggtaccctggggcatccgtcgcctcctgcagttcgtgtcgttagaatacaccaggggcaaagtgcctatatatctggcaggcaacgggatgccaattggagagtcagagaaccttttcgacgattccttaagagttgattactttaatcagtatataaatgaggttctgaaggccattaaggaagattcggtcgatgtccggtcctatatagcgagatccctcatcgacggcttcgaaggcccatcaggctattcccagcgcttcggtctgcatcacgtgaacttctcggactcttcaaaatctagaacaccgaggaagtctgcatattttttcacatccatcatcgaaaaaaatgggttcctaaccaagggagcgaagaggctgctgcctccaaacacagtaaacctgccctccaaggtgagggcctttacctttccgagtgaggttccaagcaaggccaaagtggtgtgggagaagttcagctcgcagcctaaatttgagagagacctcttctaccacggcacgtttcgggatgacttcctgtggggtgtgagtagctccgcctatcagatcgaaggtgcgtgggacgcggatggaaagggaccgtcaatctgggataattttactcacaccccaggatccaatgtgaaggacaatgcaaccggcgacatcgcatgcgacagctatcatcagctggacgctgatctcaacatgctgcgcgcactcaaggttaaggcatacagattctctatcagctggagccgtatcttcccaactggtcgaaactctagcatcaattcacacggtgtggactattacaatcgcctgatcaacggactagtggctagtaatatcttcccaatggtcaccttgttccattgggatctgccccaggcacttcaggatatcgggggatgggagaacccagcactaattgacctgttcgatagttacgcagacttctgctttcaaaccttcggcgatcgcgtgaagttctggatgaccttcaacgagccgatgtatctcgcctggctgggctatggcagcggtgagttcccgcctggagtgaaggatcccggttgggcaccatacagaattgctcacgcggtcatcaaggctcacgcgagggtgtaccacacatacgacgagaagtacaggcaggagcagaaaggcgtcatctcactctcattgtccacacactgggccgagcccaagtctcccggtgtgcccagagacgtcgaggccgcagacagaatgctgcagttttcgctgggctggtttgcccaccccatcttccgaaatggggactatcctgacactatgaaatggaaggtggggaacagatccgagctgcagcaccttgcaacctcccgcctaccctcctttaccgaggaggaaaagaggtttatcagggctaccgccgatgtcttttgtttgaatacttactactctagaatcgtgcaacacaagacaccccgtctgaatcccccaagttatgaggacgatcaggaaatggctgaggaagaggatccttcctggccatccaccgcaatgaaccgggctgccccatggggcactcgaagattgctgaattggattaaggaagaatacggcgacatacccatctacattacagaaaatggggtagggttaaccaatccaaatacagaggatacggacagaatattttaccacaagacatatatcaatgaagcccttaaagcatatagactcgacgggatcgatctgcgcggatacgtcgcttggtccttgatggacaattttgaatggctgaatggatatacagtgaaatttggattgtatcatgtagattttaacaacacaaacaggcccagaacggccagggcttcagcgcgatactacacagaggttattaccaacaacggaatgccccttgctcgggaagatgagttcctatacggaaggttcccagaaggattcatttggagcgcagcttctgccgcataccagatcgagggcgcatggcgtgccgatgggaaaggcctcagtatctgggatacattttcacacacgccacttagggtagaaaacgacgctatcggtgacgtggcttgtgacagctaccacaaaattgcagaggacttagtgacactgcagaacttgggcgtttcccactataggttttctatcagttggagcagaattctgcctgacggtactacacggtacattaatgaggcaggattaaactactatgtccggctgatcgacaccttgttggccgcaagcattcaaccccaggtgactatctaccactgggacctgccccagaccctacaggatgttggaggctgggagaacgaaaccatcgttcagagattcaaggaatatgcagacgtcctgttccagcgactgggcgataaggtgaagttttggatcactttaaatgaaccatttgtgattgcatatcagggatatggttacggtaccgccgcacccggtgttagcaatcggcctggcactgccccttacatcgttgggcataacttaatcaaggcccacgccgaggcctggcacttgtacaacgacgtctaccgcgcttctcaggggggtgttatctcaatcaccattagcagcgactgggccgagccacgggatccttctaaccaggaggacgtagaagccgcaagacgctatgtgcaatttatgggcggatggttcgctcaccctatattcaagaacggggactacaatgaagtcatgaaaacaagaattcgtgaccggtcactggccgctggccttaacaaaagtcgccttcctgagttcacagagtcagagaagcggagaatcaacggtacatacgatttttttgggtttaatcactacacaaccgtcctggcgtataatctcaattacgctaccgccatcagttcatttgatgcagaccgaggagtggcaagcatagccgaccgctcttggccagactccggctctttttggttaaagatgaccccttttgggtttaggcggatcctcaactggctgaaagaagagtataatgatccaccaatttatgttacagaaaatggagtgagtcagagggaggagacagacttgaatgacactgctcgcatctactatctgcggacatatatcaatgaggccctgaaggccgtgcaggacaaggtcgacctcagggggtataccgtctggtctgccatggataactttgagtgggctactggattctccgagcgtttcggactgcatttcgtgaattattctgatccttctcttcctcgcattccaaaagcatcagcaaaattttatgcaagtgtggtcagatgcaacggttttcccgacccagctactggtcctcacgcctgcctgcaccaacccgatgcaggaccaaccataagccctgttcgtcaagaagaggtgcagttccttggtctgatgctgggcaccaccgaagcacagacggccctatatgtcctgtttagtctggtcctgttaggtgtgtgtggcttggcatttttgagctataaatactgtaagcgttccaaacagggcaagacacaacgcagtcaacaggagctgtcacccgtgtctagtttctag

SEQ ID NO: 228031 - DNA, 3012 bp, synthetic construct
  misc_feature 1..3012: note = Description of Artificial Sequence: Synthetic coding sequence
  source 1..3012: mol_type = other DNA
aaagtcgcccacctggtgctgaaggcccacgcaagaacttggcaccattacaacagccaccaccggcctcaacagcaagggcacgtggggatcgtgctcaatagcgactgggccgaaccactatctcccgagagaccagaagacctgcgcgcttccgagcggttcctgcactttatgttgggctggttcgcacatcctgtctttgtcgatggggactatcctgctaccctgagaactcagatccagcagatgaaccggcagtgtagccatcccgtcgcccagttaccggaatttactgaggccgagaagcagctgttgaaagggtctgcggatttcctaggcctttctcattacacttcacgtctgatctcaaatgcccctcagaacacctgtattccatcttacgataccatcgggggtttttctcagcacgtgaatcatgtgtggcctcaaacctcgtcatcgtggattagggtggtgccctggggcatccggagacttctgcaattcgttagcctcgaatacactcgcggtaaagtgcccatttatttagcagggaacgggatgcctattggagaatccgagaacctgtttgacgattctctccgcgtggactattttaatcagtacatcaacgaagtcctgaaagctatcaaagaagattccgtagatgtacgctcttatatcgctaggtctctgatcgacggctttgaggggccaagcgggtacagccagaggtttggactccaccacgtgaatttttccgattcctccaagtctcggaccccgagaaagtccgcatacttcttcacctctatcattgagaagaacggatttctgacaaagggcgctaaacgcttattacctcctaatacagtcaatctgccgagtaaggtgagggcctttacatttccctccgaagtgccgtcaaaggccaaagttgtgtgggaaaaattttccagtcagccaaagttcgagagagatctcttctaccacggaaccttcagagatgactttttatggggagtcagctcctcggcctaccaaatcgagggcgcatgggacgccgatggcaaagggccaagcatatgggacaattttacacatactcctggtagcaatgtgaaggacaacgccactggcgatattgcttgcgattcctaccaccagctggatgcagacttgaacatgctacgggctctcaaggtgaaagcctaccggttttcaataagctggtcccggatcttcccaaccggtagaaactcttcaattaacagtcacggcgtggattactacaatcgtctaatcaatgggttagtggcatcaaatatctttcctatggtgaccctatttcactgggatctcccgcaggccttgcaggacataggcggatgggaaaaccctgcgctaattgacctctttgatagttatgcagacttttgctttcagacattcggcgaccgagtgaagttctggatgaccttcaatgaacccatgtaccttgcttggctcgggtacgggagtggagagttccctccgggagtgaaagatccgggttgggcgccatatcgaatcgcccacgctgtgataaaggcccacgcaagagtataccatacttacgacgaaaagtaccgtcaggaacagaagggggtcatctctctcagcctgagtactcactgggcggagccaaaatcgccaggtgtgcctcgcgatgtagaggcggctgacagaatgctgcagttctccttaggatggtttgcccatcccatatttcgcaatggggattatccagacactatgaaatggaaggtgggaaataggagcgaactccaacacctggcaacaagcaggctgccatccttcaccgaggaagagaagcggtttatccgggctacagcggacgttttttgtctcaatacatattatagcagaattgtgcagcataagacacccaggcttaatccaccatcctatgaggacgatcaagaaatggccgaagaagaggacccctcttggccctctaccgctatgaacagagccgcaccttggggcactcggaggctactaaactggatcaaagaagagtacggagacatacccatatacattactgagaacggtgtgggccttaccaaccccaacacggaggatacagaccggatcttctatcataaaacgtatattaacgaagcactgaaggcataccgcttagatggcatcgatttgcgcggttacgttgcatggtccctcatggacaactttgagtggctgaatggctacaccgtcaagttcggcctctaccatgttgacttcaacaatacgaatcggcctaggacagcaagggcctcggccagatattatacagaggttattactaataatggcatgccactggctcgcgaggacgagttcctgtacgggagatttccagaagggttcatctggtccgccgcatccgccgcataccaaattgagggagcatggcgggctgatggcaagggcttatctatctgggacacgttcagccataccccactccgcgttgagaacgacgccataggcgacgtcgcttgtgacagctaccataaaatcgctgaggatttggtaacattgcagaaccttggagtgagccactacaggttcagcatcagttggtccaggatactaccggatggaactaccagatatatcaatgaggctggacttaactattatgttcgcctgattgatacgctcttggccgcaagtattcaacctcaggtgactatctaccactgggatttgccgcagactctccaggacgtcggaggctgggagaacgagacaatagtgcaaagattcaaagaatacgccgacgtgttatttcaaagactgggagataaggtcaagttctggataacgctgaatgagcctttcgttatcgcttatcaaggatatggctacggcactgctgcgccagtgcacggtagattggtgtgcacatcttatttccaggagtggagacttcagtag

SEQ ID NO: 228032 - DNA, 1005 bp, synthetic construct
  misc_feature 1..1005: note = Description of Artificial Sequence: Synthetic coding sequence
  source 1..1005: mol_type = other DNA
atggccactctgaaggaaaagcttattgcacccgtggcagaagaagaagcaaccgtgcccaacaacaagatcaccgtcgtaggagtgggacaggtcggcatggcttgtgctatctccatcctgggaaaatctctagcagatgagctagctttagtggatgtcctggaggacaagctaaaaggcgaaatgatggacctgcaacatgggagcttgtttcttcagactccgaaaatagtggctgataaagactattctgttaccgccaacagcaagatcgtggtggtcacagctggggtgagacagcaggagggagagtcccggctgaatctcgtacagcggaatgtcaatgtgttcaagttcattatcccacagatagtgaagtactcacctgactgcatcattatcgtggtatccaatccagtggacatcctcacctatgttacctggaagctttccggtcttcccaaacacagggttatcggatcagggtgcaatttggacagtgctcgtttccgctatcttatggcggagaagttgggcattcacccctctagctgccatggctggatcttaggagagcatggggactcctccgtggctgtgtggtctggcgttaatgtcgctggcgtatctctccaggagttgaaccccgagatggggacagataatgactctgaaaattggaaagaggtgcacaagatggttgtggagtccgcctatgaagtgatcaagctgaagggttatactaactgggccattggtcttagcgtggccgacctgatagagagcatgctgaaaaatctcagccgaatccacccagtgagcactatggtgaaggggatgtatggcattgagaacgaggtgttcttatctctcccctgcatcttgaacgccaggggcctgacttcggtcatcaatcagaagttgaaggacgacgaggtggctcagcttaagaagtccgctgatacactgtgggatatccagaaagacctcaaggacctgtag

SEQ ID NO: 228033 - DNA, 699 bp, synthetic construct
  misc_feature 1..699: note = Description of Artificial Sequence: Synthetic coding sequence
  source 1..699: mol_type = other DNA
atggccacattaaaggagaaactgatcgctcccgtcgcagaagaagaagcgacggttcccaataataagataaccgtggttggcgtgggacaggtcggaatggcttgtgccatttccatccttgggaaatcactcgctgatgagctcgctctggtggacgttctggaggacaagcttaagggtgaaatgatggatttacagcacgggtccttgttcctccagacacctaaaatagtggctgacaaagattatagcgtgaccgccaatagtaaaattgtggtggtgactgctggggttcgtcagcaggagggcgagagccgcctgaatctggtgcagagaaatgtgaacgtatttaagtttatcattccacagatcgtaaaatatagtccagattgcattattatcgtcgtaagtaaccccgtggatatcctgacttatgttacgtggaagctgtccggcctacctaagcacagagtgattgggagcggatgtaatctagattcagcacggttcagatatttaatggcagaaaagctgggcatccatccctctagctgccacggctggatcctcggcgaacatggggactcatcagtagcagtgtggtcaggtgtgaatgtggctggagtgtctcttcaggagttgaaccctgagatgggcacagacaatgattctgaaaattggaaggaggtgcactag

SEQ ID NO: 228034 - DNA, 1005 bp, synthetic construct
  misc_feature 1..1005: note = Description of Artificial Sequence: Synthetic coding sequence
  source 1..1005: mol_type = other DNA
atggccaccttaaaggaaaagctgattgcgccagtcgccgaagaagaagctactgttcctaacaacaagattactgtcgtgggtgttggacaggtgggtatggcgtgcgccatttccatcctgggcaagtcgctcgccgacgagcttgctttagtagatgtgctggaagacaaactgaaaggcgagatgatggacttacagcacggcagcttgtttctccagactcccaagattgtcgccgataaagactatagcgtgaccgcaaatagcaaaattgtggttgtcacggcgggagtgcgccagcaggaaggcgaaagccggttaaacctggtgcagcgcaacgtgaatgttttcaaatttatcattccccagatcgtgaaatactctcctgactgcatcatcattgttgtgtccaaccccgttgacattctgacatatgttacttggaagctcagcggccttcccaaacatagggtgatagggagcgggtgcaatctggactccgctcggtttcgttatctgatggctgaaaaacttggaatccacccctctagttgtcacggatggatccttggggagcacggggatagttccgtggccgtgtggagcggcgtgaatgtggcgggagtctctctacaggagctgaaccctgagatgggtacggataatgactccgagaactggaaagaggtccataagatggttgtagaatctgcatacgaggttatcaagttgaagggatacaccaactgggctatcggtttgagtgtggccgacttaattgagtctatgctgaagaacctgagtaggatacaccctgtttccacaatggtaaagggaatgtacggcattgaaaatgaagtgtttttgtcccttccgtgtatcctgaatgctcgcggtctaacaagcgtgattaatcagaaattaaaggacgacgaagttgcacaactgaaaaaaagcgctgatactctgtgggatattcagaaggacttaaaggacctgtag

SEQ ID NO: 228035 - DNA, 414 bp, synthetic construct
  misc_feature 1..414: note = Description of Artificial Sequence: Synthetic coding sequence
  source 1..414: mol_type = other DNA
atggcgacactcaaggaaaaactgattgcacctgtggctgaagaggaagcgaccgtgcctaacaataaaatcaccgttgtcggggtcgggcaggtcggcatggcctgcgccatctcaattcttgggaaatctctggcggatgaactcgctctggtggacgtgctggaagacaagctgaaaggggaaatgatggatctgcaacatggatctctcttcctccagacgccaaaaatagtggccgacaaagattatagtgttactgctaactcaaaaatcgtcgtcgtcacggcaggtgtgcgccagcaggaaggggaatctaggctgaatctcgtacagcgcaatgtcaacgtgtttaaattcatcatcccccaaatcgtcaagtattcgccagactgtatcataatcgtagtgtag

SEQ ID NO: 228036 - DNA, 309 bp, synthetic construct
  misc_feature 1..309: note = Description of Artificial Sequence: Synthetic coding sequence
  source 1..309: mol_type = other DNA
atggcaacgctgaaggagaagctcatcgcccctgtggcagaggaggaagccacggtcccgaacaacaaaataaccgttgtgggtgtgggccaggtggggatggcctgcgccatttcaatcctcggcaagtccttggcagatgagctagctttggtggatgtgttggaagataaactgaagggggagatgatggacctgcagcacggatcgctgttcctgcagacacctaaaattgtcgctgacaaggactattctgtgaccgcaaacagcaagatagtggtcgtcacagccggagtgcggcagcagtag

SEQ ID NO: 228037 - DNA, 999 bp, synthetic construct
  misc_feature 1..999: note = Description of Artificial Sequence: Synthetic coding sequence
  source 1..999: mol_type = other DNA
atgtcaactgtcaaagagcagctcatcgagaagctgatcgaggacgacgaaaactcccagtgcaaaataactattgtggggaccggcgctgtgggaatggcttgtgcgattagcattctgctgaaggaccttgcagatgagcttgccctggtcgatgtcgctctggacaagctgaagggtgaaatgatggatctgcaacacggctccctgttctttagcactagcaaaatcacatcagggaaggattatagtgtcagcgccaattctcggatagtcattgtgacagcgggtgctcgccaacaggagggcgaaacccgattggccctcgttcagaggaatgttgccattatgaaatccatcatcccggcaattgtccattactcccccgattgtaaaatcttagtggtgtctaaccctgtggatatcttgacctacattgtttggaaaatctctgggctgccagtcactagagtgatcggctctggctgtaacctcgactcagcacggtttcgttatctgatcggggaaaaattaggcgtgcatccaacgtcctgccacggatggatcattggagagcatggggattcaagcgtacccctttggagcggggtcaatgtcgccggtgtagccttaaaaacccttgatcccaagctcggaacagattctgacaaagaacattggaagaatatacataaacaagttattcagtcagcctatgaaattattaagctgaaagggtacacaagctgggccatcggtttgagtgtcatggacctggtaggcagcatcctcaaaaacttgaggagggtgcatcccgtcagtacaatggtcaaagggctgtatggaatcaaagaagagcttttcctgtcgattccgtgcgtgctcggaagaaatggtgtcagcgacgttgtcaaaattaacctcaatagtgaggaagaagcattattcaaaaaaagtgcagaaaccctctggaatattcagaaagatctgattttctag

SEQ ID NO: 228038 - DNA, 999 bp, synthetic construct
  misc_feature 1..999: note = Description of Artificial Sequence: Synthetic coding sequence
  source 1..999: mol_type = other DNA
atgtcaaccgtcaaggaacagctgattgaaaagcttattgaggacgacgaaaacagccagtgcaaaattacgatcgtggggacaggagcagtgggaatggcctgtgctatctctatccttcttaaagacttagccgacgagcttgcactcgttgacgttgctttagataagctgaaaggagagatgatggacctacaacatggatctctcttcttttccacatcgaagatcacgtctggtaaagactattctgtgtccgcaaactcacgcatagtcatcgtgacggccggagccagacagcaggagggagagactcggctggctctggtccagcgaaatgtcgcaataatgaaaagcatcatacccgctattgtgcactacagtccagattgcaaaatcctggttgtttcaaatccagtggatatactaacgtacatcgtgtggaaaatttctggcctccccgtgactcgcgtcattggaagcgggtgtaatctcgattccgcccgattccggtatttgattggagaaaaacttggcgtccaccctacctcttgtcacggttggatcattggcgagcatggggattctagtgtacctctgtggtcgggcgtcaacgtggccggtgtagcccttaagaccctggatcccaagttggggaccgatagcgataaagaacactggaagaacatccacaagcaggtcatccagtccgcctatgaaatcattaagctgaagggttacacatcatgggccattggtctgtcggtgatggatttggtcggcagtatcctgaaaaatctacgccgtgtgcaccccgtctccaccatggtgaagggcttatacgggataaaggaagagctgttcctgagtatcccatgcgtgctgggcaggaacggggtgtcagatgtcgtgaaaataaatctcaattccgaggaggaagccctctttaagaagtccgccgagacgctctggaatatccagaaggacctgattttctag

SEQ ID NO: 228039 - DNA, 1524 bp, synthetic construct
  misc_feature 1..1524: note = Description of Artificial Sequence: Synthetic coding sequence
  source 1..1524: mol_type = other DNA
atggctaggctcttgcgatcagccacctgggaactctttccctggcgtggttattgttctcagaaggccaagggagaactttgtcgggatttcgttgaagcattgaaagcagtggtcgggggaagtcatgtttccaccgccgctgtagttagagaacagcacggcagagatgaatccgtgcacaggtgtgagcccccagacgccgtggtgtggcctcagaacgtggagcaggtctcccgtcttgcagcattatgctatcgccagggtgtgcctataattccctttgggaccggcacaggactcgagggaggggtgtgcgccgtgcagggaggcgtgtgtgtgaacctaacccacatggacaggattctcgagctcaaccaggaagacttcagcgtcgtggttgaaccgggagttacacggaaagcacttaacgctcacttacgcgattcaggattgtggtttcctgtggacccgggtgcagacgccagtctctgcgggatggcggcaactggggctagcggcactaacgccgtgcgatacggcacgatgagggataatgtgctgaacttggaggtggtcctgccggatggtaggctcctccacaccgcgggtagaggcaggcattttcgctttggattttggcccgagatcccccatcatacggcttggtatagcccatgcgtcagtctcggtcgacgaaagagtgccgctggctataatcttaccggcctgttcgtcggatccgaaggaaccttaggactaattacagctactacactgcggctacaccccgctcccgaggcgaccgtggccgctacttgcgcttttccttccgtccaggcggcagtagatagtacagttcacattctccaagccgcagtgcccgtggctagaatcgaatttctcgatgaggtcatgatggacgcttgtaacagatatagcaaactgaattgcttggtggcccctacattatttctggagttccatggatcccaacaggccctggaagaacagcttcagaggaccgaagaaatcgtgcagcagaacggcgcatctgacttttcatgggctaaggaagcagaggaacggtcaagactttggaccgccagacataatgcatggtatgcagccctcgccaccaggcccggatgcaagggatacagcaccgatgtctgtgtgcccattagccgccttccagaaattgtcgtgcagactaaggaagatctgaacgcttcagggctcacaggtagcatcgtgggacatgtgggtgatggtaacttccattgcattcttctagtaaatcctgatgacgcagaagagttgggacgggtcaaggcttttgcggagcagctgggcaggcgcgctctggccttgcacggaacctgcacgggagagcacggtattggcatgggcaagcggcagctgctgcaagaagaagtaggcgcagtgggcgtagaaaccatgaggcagctgaaggctgtgctcgacccccaggggctgatgaaccctggtaaagtcctatag

SEQ ID NO: 228040 - DNA, 1455 bp, synthetic construct
  misc_feature 1..1455: note = Description of Artificial Sequence: Synthetic coding sequence
  source 1..1455: mol_type = other DNA
atggcaaggttacttcggagcgcgacatgggaattgtttccatggaggggttactgtagccaaaaagcgaagggcgaattgtgtcgcgacttcgttgaggcccttaaagctgttgtggggggttcacacgtttcaacagccgcagtggtgagagaacagcatgggagagatgagtcggtccacaggtgcgagcctcccgatgctgtcgtgtggccccagaatgttgagcaggtttctcggctcgccgctctctgttaccgccagggcgtccctatcatcccattcgggaccggcaccggactagaagggggtgtctgcgccgtgcaggggggtgtgtgcgttaacctgacgcacatggatcggattctcgaactgaatcaggaagatttcagcgtggtcgttgagcccggtgtgacacgaaaggccctgaacgcccacctgagagacagcggtttgtggtttcccgtggaccccggtgccgatgcttcactgtgtggaatggccgctaccggggcatcagggacaaacgctgtcagatatggtacaatgcgagacaatgtgctgaatctggaagttgtcctcccagacgggcgacttttgcacactgccggtaggggcagacacttccgcaagagtgccgctgggtacaacctcactggcctatttgttggaagtgagggtaccctcgggttgataaccgccaccacgctgcgtcttcaccccgcaccagaggccacagtggcggcaacctgcgcttttccctctgtgcaggcagcggttgatagcactgtgcacattctccaggccgcagtccccgtagcacggattgagtttctggacgaagtcatgatggacgcctgtaacagatacagcaagcttaattgtcttgtggctccaacactttttttggaatttcacggcagccagcaagccctcgaggagcagcttcagcggactgaggagatagtccagcaaaacggtgcatcagatttcagttgggccaaagaggcagaggaacgttcacgactctggacagccagacacaacgcgtggtatgctgctcttgccactcggcctggctgcaaaggctattctaccgatgtctgtgtacccatctcaaggcttcccgaaatcgttgtccaaacaaaggaggacctaaacgcgtcaggactcactggcagcatagtgggccatgtcggcgatggcaactttcactgcatactgttggtcaacccggatgatgctgaagaactggggagggttaaggcattcgcagagcaactcggcaggagggccctcgcattgcacggcacctgtacaggagagcacggaattgggatgggaaagagacagctcttacaggaggaagtcggtgccgtcggagttgagactatgcgccagctcaaagctgtactggacccccagggtcttatgaatcctgggaaggtgctgtag

SEQ ID NO: 228041 - DNA, 2139 bp, synthetic construct
  misc_feature 1..2139: note = Description of Artificial Sequence: Synthetic coding sequence
  source 1..2139: mol_type = other DNA
atgcgcgttttgctgcacctaccggctcttctggcttctctgatcctgctgcaagctgcagcaagtaccactagggctcagaccacgagaacatctgccattagtgacacagtgtcccaggccaaggtccaggtgaacaaggcctttcttgatagccgtacccggttaaagacagctatgagtagcgagacacccacctcgcgtcagctgagcgagtacttaaaacacgctaagggtcggaccagaactgccatccgtaacggacaggtgtgggaagagagcttaaaacgcctgcgtcaaaaagccagtctgaccaacgtaactgacccttcactcgacctcacgagcctgagcctggaagtagggtgtggggctccagcgccagtagtccgctgcgatccctgcagtccatatcgaaccatcactggtgactgcaataaccggagaaagccagctctcggagctgccaatagggctctggcccgatggctcccagccgagtacgaggacggacttagcttgccttttggctggacacccggaaagacccggaatggatttcctttgcctctcgcccgtgaggtgagcaacaaaatagtggggtacctaaacgaggagggcgtgttagaccaaaaccggagcctgctctttatgcaatggggccagattgtcgaccacgatctggattttgcccctgataccgagcttggctcaagtgaatatagtaaggcccagtgtgatgaatactgtatccaaggagacaactgttttccgatcatgtttccaccaaacgaccctaaagcagggacccagggtaaatgtatgccttttttccgcgctggcttcgtttgtccgacgcccccttataagagtctcgcaagagagcaaattaacgcactcaccagtttcctggacgcttcatttgtatactctagcgagccatctcttgcttctcgcctcaggaatttaagctctccactcggactcatggcagtgaaccaggaagtgtctgaccatggccttccatatctgccttacgattccaaaaagccaagtccctgtgagtttatcaatactaccgcacgcgtcccttgttttctggcaggtgattccagggcctccgaacacatcctgctcgcgacctcacataccctgttcctccgggagcacaatcgcctcgctagagaactgaaacgcctcaacccccagtgggacggagagaagctttaccaggaggcacgtaaaatcctgggggcatttgtccagataatcacgttccgggactatctgcccattttactgggcgatcacatgcaaaagtggataccaccttatcagggctatagcgagtctgttgatcccagaatatctaatgtgtttacgtttgctttccgattcggccacctggaagtgccaagctccatgttcaggctggatgagaattatcagccatgggggcctgagcctgagctgccgctgcacaccttgttctttaacacttggcggatggtgaaggatggtggaatcgacccattagtaagagggctgctggcaaagaagtcgaagttgatgaaacagaacaaaatgatgacaggagagctgcggaacaaactgttccagccaacacatcgtatccacggtttcgatctcgcagccatcaacactcagcgctgtagagatcatggtcagccaggctacaattcctggcgggctttttgtgacctgtctcagccccaaaccctagaggaactgaataccgtgctgaagtcgaagatgcttgctaagaagctcctgggcctgtatggaactccagacaacatcgacatatggataggagccatcgctgagcctctggttgagcggggtcgcgtcggccctctcctcgcctgtctgctgggcaaacagttccaacagatacgcgacggtgacagattctggtgggagaacccaggcgttttcacaaatgagcagaaggacagcctgcaaaaaatgtccttcagcaggctcgtctgcgacaacacccggataaccaaggtaccaagggatcccttttgggcaaattcgtatccatatgacttcgttgattgttccgccattgacaagctggatctcagcccatgggccagtgtgaaaaactag

SEQ ID NO: 228042 - DNA, 1374 bp, synthetic construct
  misc_feature 1..1374: note = Description of Artificial Sequence: Synthetic coding sequence
  source 1..1374: mol_type = other DNA
tgttttccggtacagttcccgcctaacgaccccaaagcagggactcagggcaagtgtatgcccttttttcgagccggattcgtgtgccctactcccccatacaagagtctagcgcgtgaacagatcaatgccctcacttcgtttctggatgcatcttttgtgtactcctcagaaccttccctggctagccggcttcggaatctctccagtcccctcggcttaatggccgttaaccaagaagtgtccgaccacgggttgccctatctgccttatgactcaaagaaacccagcccttgtgagtttattaacaccacagctagagtaccttgcttcctcgccggagattcacgagcaagcgaacacatcttgctagcaaccagccatactctgttcctgagagaacacaacagactggcacgcgaacttaagaggttaaacccacaatgggacggagagaaattataccaggaagcaagaaagatcctgggggctttcgtccagattataaccttcagggactatttgcccattctcctgggggatcatatgcagaagtggatcccaccctaccaaggctattccgagtccgtggaccccaggatttcaaatgtgttcaccttcgctttcagatttggtcatctggaggtgccttcatcaatgtttcgcctggacgaaaattatcagccatggggtcccgagcccgagctccccctccacacgctatttttcaacacttggaggatggtgaaagatggtggaattgatccactcgttcggggacttctggcaaagaaatcaaagttgatgaagcagaacaagatgatgaccggggaactgaggaacaagctgttccaacccacacatcggatccatggatttgacctggcagctatcaatactcagcgttgtcgggatcatggccagcccggatataacagctggagggctttttgtgatttgagtcagccacagacacttgaagagctgaacaccgtgctgaagagcaagatgctcgctaagaaactgctggggttgtacggaacccccgacaacatcgatatatggatcggcgcaattgcggagcccttagtcgagcgcggaagggtaggtccactgcttgcttgtctcttaggcaagcaattccagcagattagagacggagacaggttttggtgggagaaccctggggtgtttaccaacgaacaaaaggactctctgcagaagatgagcttctcccggctggtttgcgataatacccggatcaccaaagtgccacgcgaccccttctgggccaacagttacccttatgacttcgtggattgttccgctatcgataagctcgatctgtctccttgggcctcagttaagaattag

SEQ ID NO: 228043 - DNA, 1890 bp, synthetic construct
  misc_feature 1..1890: note = Description of Artificial Sequence: Synthetic coding sequence
  source 1..1890: mol_type = other DNA
atgcgggtcttgctccatctgccggcattactagcatccttgatccttctgcaggctgctgcctctaccacaagagacccttccctggacctgacttccttgtccctcgaggttggctgtggagcccctgcacccgtggtccggtgcgatccttgctccccttataggaccattactggggactgtaacaacagaaggaagcctgcccttggagccgctaatagagcattggccagatggctacccgctgaatatgaagacgggctaagcttgcctttcgggtggacccctggcaaaacacgcaatggtttcccattgccccttgctagggaagtgtctaataaaattgttgggtatcttaacgaggagggtgtgctggatcagaatcggagccttttgtttatgcaatggggccagattgtggaccatgacctggatttcgcaccagacaccgagctgggctcctccgaatattctaaagcccagtgtgacgaatattgtatccagggcgacaattgcttccctattatgttcccaccaaatgatccaaaggcaggtacccagggcaagtgtatgccttttttccgtgccggattcgtgtgccctacccctccttacaagtctcttgctagagaacagatcaacgcgctgacttctttccttgatgcctcttttgtgtattcgagcgagccttcactggcatctcggctgcgcaacctcagctcccccttaggcctgatggcagttaaccaggaggtcagcgatcatgggttgccctatctcccatacgactccaagaagcctagcccttgcgagttcatcaacacaacggctagggtgccctgctttttggctggggactctagggcttcggaacatatcttactggctacttcccacacactgttccttcgcgaacacaatcgtctggcaagggaattgaagagattgaatccacagtgggatggtgagaaactgtatcaagaggcacgaaagatcctgggtgcattcgtccagatcataaccttccgagactacttgcccattttgctgggcgaccatatgcaaaagtggatccccccttaccaggggtattcagagtccgtggatcccagaattagcaatgtgtttacattcgcttttagatttggccatctggaggtgccctcctcaatgtttcggctcgacgagaattaccagccctggggccctgagcctgagctcccgctacacaccttgttctttaatacatggcgcatggtgaaggacggcggaatcgatcctttagtgagggggctgctcgccaagaagtccaagttgatgaaacagaacaagatgatgacaggtgaactgagaaataaactgtttcaaccaacacataggattcatggctttgatctggctgccatcaacacccagcgttgcagagaccacggtcagcccggatacaactcctggcgagctttctgcgacctcagtcagccccagacgctggaggaactgaatacggtgctgaaaagcaagatgctcgccaagaagttgctaggattatatggaacgcctgataatattgatatttggatcggtgccatcgccgagccccttgtggagcggggtagggtgggccctctgctggcgtgccttctcggaaaacagtttcaacagattcgagatggggatagattctggtgggaaaaccctggggtatttactaatgagcagaaggactccttgcagaaaatgtccttttccagactggtatgtgataataccagaatcaccaaagttccccgagaccccttctgggctaacagctacccctatgactttgtggattgttctgccatagataaattggacctgagcccgtgggcctcggtaaagaactag

SEQ ID NO: 228044 - DNA, 1962 bp, synthetic construct
  misc_feature 1..1962: note = Description of Artificial Sequence: Synthetic coding sequence
  source 1..1962: mol_type = other DNA
atgagtagcgagaccccaacctctagacaacttagtgaatatctcaaacatgcgaagggtcggactagaaccgcaatccggaacgggcaggtctgggaggagtccctcaaaaggctccgccagaaggcgtctttgactaacgtcaccgacccctctctggacctaaccagtctgagtttggaagtgggatgcggtgccccagctcccgtcgtgcggtgcgatccttgctcaccttaccgcaccattactggcgattgcaacaatagacgaaagccggctcttggggctgctaatagagccctggctcgctggctgcccgctgaatacgaggatggattgtccctaccattcggctggacccctggaaagacccgaaacggatttccattgccgctggcacgcgaggtcagtaacaaaatcgtgggttatctgaacgaggagggggtactggatcagaatagaagtttgctgtttatgcaatggggccaaatcgtggatcatgacctggacttcgcccctgacacagagctgggcagttctgaatacagtaaggcccagtgtgatgaatattgtattcagggggacaactgcttccctattatgttccccccaaacgaccccaaagccggtacccaggggaaatgcatgcccttttttcgggctggatttgtgtgtcccacccctccatataagagcctggccagggagcagatcaacgcactgacatcctttctggatgcatcattcgtttacagcagtgaaccaagtctcgcgagtaggcttcgcaacctatccagcccactcggcctcatggccgtgaaccaggaggtcagtgatcacggcctgccgtaccttccctacgattcaaaaaagccgtccccatgcgaatttataaatactacagctagagtgccctgttttttggcgggagactcgagggccagtgagcatatcctcctggccacctctcataccttgtttctccgggagcacaacaggctcgcgcgagaactgaagaggttgaatccccagtgggacggggagaagctttaccaggaggccagaaagattctcggggctttcgtccagattatcactttccgggattatctgcccattttactgggggaccacatgcagaaatggattcctccataccaggggtactcagagtccgtagatccccgaattagtaacgtatttacatttgcattccggttcggccatctggaggtgcctagttccatgtttagactagacgagaactatcaaccatggggccctgaacccgagcttccattgcataccctgttctttaacacttggagaatggtcaaagacggcggaattgatcccctggtcaggggactcttggcaaagaagtctaaactaatgaagcaaaataaaatgatgaccggtgaactgcgcaataaactgtttcaaccaactcaccgaattcacggcttcgaccttgctgcgattaacacacaaaggtgcagagatcacgggcagcccggttacaactcatggcgggcattctgtgatctgtctcaacctcagactctggaagaacttaatacagtgctgaagtccaaaatgctggccaagaaattactgggattgtacggcaccccagataacatagatatttggatcggtgcaatcgctgagcccctcgtcgaaagaggccgtgtcgggccactcttggcttgtctgttgggcaagcaattccaacagatccgggatggtgataggttttggtgggagaatccaggtgtcttcacaaacgagcagaaagattctctgcagaagatgtccttctccagactagtgtgtgacaacacaagaatcacaaaagtccccagagatccattctgggcaaattcttacccctacgacttcgtagactgcagcgccattgataagctggatctctccccatgggcatccgtcaagaactag

SEQ ID NO: 228045 - DNA, 1323 bp, synthetic construct
  misc_feature 1..1323: note = Description of Artificial Sequence: Synthetic coding sequence
  source 1..1323: mol_type = other DNA
atgggagatctggaacttcttctgccaggtgaagctgaagttctcgtcaggggcttgcgctcttttcccttgcgcgaaatgggctccgaaggctggaaccagcagcacgagaatctggagaagctcaacatgcaggctatcctggacgccaccgtgtctcagggcgagcccatacaagaactgttagtaacccatggcaaggtacctaccctggtggaggagctgatcgctgtagagatgtggaaacagaaggtcttccccgtgttctgccgcgtcgaggacttcaagccacagaatacctttcctatctatatggtggtccatcacgaagcgtccatcatcaacctgctggagaccgttttcttccataaggaagtatgcgaaagcgccgaggacacagttcttgatttggtagactactgtcataggaaactgaccttactggtagcccaatctggatgtggtggtcctcccgaaggcgaaggttctcaagacagcaacccaatgcaggaactccagaagcaagcggagttaatggagtttgaaatcgcccttaaagctctttccgttcttaggtacattacagactgcgtggactcacttagcctgtcgacattaagcaggatgctctcgacacataacttgccttgcctgctggtagaacttcttgaacacagcccctggtcccgcagggagggagggaagctgcagcagtttgaaggcagtcgctggcatacagtggccccttccgagcaacaaaagctctcgaaattggatggtcaggtatggatcgctttatacaacctgctgttaagccctgaagcccaggcaaggtactgtctcacatcgtttgcaaagggccgactccttaagttgcgcgcatttctcaccgacactcttttggaccagctgcccaatctagcacacctccagtcatttctcgcccatcttacgctgaccgagacgcagcccccaaaaaaggatctcgttctcgaacagattcctgaaatttgggagaggcttgagagagagaatagaggaaaatggcaagcgatcgccaaacaccaactgcagcatgtcttttcaccaagcgagcaggatctacgtctgcaggccagacggtgggcagagacgtaccgcctcgacgtgctggaagccgtggcccctgagcgcccacggtgcgcctactgtagcgccgaggccagcaaaagatgcagccgatgtcagaacgaatggtattgctgcagagagtgtcaggtcaagcattgggagaaacacggtaagacatgcgtccttgcagcacaaggtgatcgagctaagtag

SEQ ID NO: 228046 - DNA, 2001 bp, synthetic construct
  misc_feature 1..2001: note = Description of Artificial Sequence: Synthetic coding sequence
  source 1..2001: mol_type = other DNA
atgcgtaaggttaggggccctcccgttagctgcattaagcgcgactctccaattcagtgcatccaagccatcgcagaaaacagggctgatgctgtgacgctagacggtggctttatctacgaggcaggactcgccccttacaaattgcggccagtcgccgctgaggtgtacggtactgagcgtcagcccagaacacattactacgcagttgcagtcgtcaaaaaggggggttctttccagctgaacgagttacagggtctaaagtcctgccatactggtcttaggcgcacagcaggctggaacgtccccataggaaccctgagaccctttctgaattggactgggcctcccgagcccatcgaagccgctgtcgccagattcttttctgcaagctgcgtgccaggtgccgataagggccagttccctaacctttgcagactttgcgcaggaaccggcgaaaacaaatgcgctttctcttcgcaggagccatacttcagttacagcggcgctttcaaatgtctcagggatggagcaggcgatgtggcattcatcagggaatcaacggtgttcgaggatctttctgatgaggcggagagagacgaatatgagcttctttgcccagacaacacccgcaaacccgtggataagtttaaagactgtcacttggccagggtcccgtcacatgctgtcgtggcaaggtctgttaacggtaaagaggacgccatctggaacctcctccggcaggcccaggagaagttcgggaaagataagtccccaaagtttcaactgttcggctcgccatcagggcaaaaggatttgctattcaaggatagtgcaatcggattttcacgtgtacccccacgcatcgactccggcttataccttggctccggatacttcactgctatacagaatttacggaaatctgaagaggaagttgcggctagaagagctcgcgtggtgtggtgcgcagtgggagaacaagagctccgtaagtgtaatcaatggtccgggctgagcgagggctcagtaacctgttcaagcgcttcaaccacggaagactgtatcgccctggtccttaaaggcgaggctgatgctatgtccttagacggcggttatgtctacaccgctggtaagtgtggactggttcctgtcttagctgagaactacaagagccaacagtcaagtgacccagacccaaattgtgttgatcggcctgttgaaggatatctagctgttgcagtggtgagacgatcagacaccagcttgacctggaatagcgtcaaaggcaagaaaagctgtcatacagccgtcgatagaaccgctggatggaatatccctatgggtctgctatttaaccagaccggctcctgcaaattcgacgagtacttttcccagtcttgcgcccctggttctgatcccagatcaaatctgtgcgcgctgtgcatcggggatgagcagggggagaataaatgcgtgccaaacagtaatgagcgctattatgggtacacgggggcttttaggtgtctggccgagaatgccggagacgtggctttcgttaaagacgtcaccgtgctgcaaaacactgacggcaacaataacgaagcctgggccaaagacttgaaactcgcagatttcgccttgctctgcctggatggcaagagaaaaccagtgacagaggctaggtcttgtcacttggccatggcaccaaatcatgcagttgtttcccggatggacaaagtggagcgacttaagcaggtactgctacatcagcaggcaaagtttggacgcaatggatctgattgtcctgacaaattttgcctctttcagtctgagacaaagaacctgctttttaatgacaacaccgagtgcttagccaggctgcacggcaaaaccacatacgagaagtatctaggaccccagtatgtagcagggatcacgaatttgaaaaaatgctctacctcaccgctgctcgaggcctgtgagttcctgcggaaatag

SEQ ID NO: 228047 - DNA, 453 bp, synthetic construct
  misc_feature 1..453: note = Description of Artificial Sequence: Synthetic coding sequence
  source 1..453: mol_type = other DNA
atgaaactagtctttctggtgctgcttttcctgggggctctgggattatgcctggcgggaaggcgccgatcagtacaatggtgcgcagtttcacagcctgaagcaacaaagtgctttcagtggcaacgaaacatgcgaaaagtgcggggaccacctgtgtcttgcattaagagggatagcccaattcagtgtattcaggcaatcgccgaaaaccgggctgacgccgtgacactggatggtggatttatctacgaggcgggactggcaccctacaagttgaggcctgtggcagcagaggtgtacggtacggagagacagcctgccgtcttcccagtccagattaaagattccagtcctacttgcgtcgcatgcgtgagaggacagggaaagacaaatgtaccatctccaccaagaaacagaacctcggccacactcgttcccagctccgtgtag

SEQ ID NO: 228048 - DNA, 846 bp, synthetic construct
  misc_feature 1..846: note = Description of Artificial Sequence: Synthetic coding sequence
  source 1..846: mol_type = other DNA
atgaccagtaaggaagatggcaaagcagcaccaggcgaagagcggcgaagaagccctttggatcatcttcctcccccagcaaattccaataagccactgacccccttctcaattgaggacatcctcaataagccctccgtgcgacggtcatattcactctgtggggcagcccatctcctcgccgctgccgataagcacgcccagggagggctgccactcgctggcagagcccttttgtcacagacatccccattgtgtgcccttgaagagctggcgagcaaaacatttaaagggctggaagtaagcgtccttcaggccgctgaaggtcgtgacggaatgaccattttcggccaaagacagactccaaagaagaggagaaaatctagaactgctttcaccaaccatcagatttacgagctcgagaagcgctttctgtaccagaaatacctgagccctgcagaccgcgatcagattgcccagcaattagggcttactaatgcacaggtcattacatggttccagaatcgtcgggcaaagctcaaacgagatttagaagagatgaaggccgacgtggaatctgcgaagaagctcggaccatctggccaaatggatatcgtcgctctggcagagctggagcagaacagcgaagcaactgccggaggcggtggcggatgcggcagagctaagagcaggcccggatcgcccgtacttcccccaggagcccctaaggcacccggtgctggggctctacaactatcccctgcaagcccactgacggaccagccggctagtagccaggactgctccgaggatgaggaggacgaagagattgatgttgacgattag

SEQ ID NO: 228049 - DNA, 597 bp, synthetic construct
  misc_feature 1..597: note = Description of Artificial Sequence: Synthetic coding sequence
  source 1..597: mol_type = other DNA
atgaattccggtcgcgaacctaggacacccagaactcttctttccattgcagacatcctggccccaaggatggttccacgagctccatctgccccacagctgcccgaatcaggacccggacccacatcccctctgtgcgccctagaagaactaacttcaaagaccttcagaggcttagatgccagagcgcttcagccgtcagagggcagggccggacccgacgccctaggtccaggcccattcggacgcaagagacgcaagagcaggaccgcattcacggcccagcaagtcttggaactggaaaggagattcgtctttcagaagtatctggctccctccgagcgtgacgggctggcaacaagactggggctcgcgaatgcacaggtggtgacttggtttcagaataggcgcgcaaagctgaagcgagatgtcgaggagatgcgagcagatgtggcatctttgagggccctctctcccgaagtgctctgctcccttgctcttcccgagggtgcccctgaccccggtctgtgcctggggcctgccggaccagattcacgacctcacctgtctgacgaggagattcaggtggatgactag

SEQ ID NO: 228050 - DNA, 585 bp, synthetic construct
  misc_feature 1..585: note = Description of Artificial Sequence: Synthetic coding sequence
  source 1..585: mol_type = other DNA
atgggaaaaaggacgtcacttgaagtttccttaggggagctcggcggtgagaaatgtcgaggtggccgaaggtccttccctcccttagccgcatctcgacccgcaagaccgggaggctggagatgggcacggcgagacctctgtaagacagcttccagggctgaaaacaatagtcaggcttgtcgtccgcagcgccgagctgggcctgacgccctcggacctggaccctttggacggaagcgtcggaaatctcgaaccgcattcactgcccagcaggtcctcgaactcgaacgacgtttcgtctttcagaaatatcttgctccctccgagagagacggcctcgcaaccagactgggacttgccaacgcccaagtcgttacctggtttcaaaataggcgcgcaaagttaaagagagacgtcgaggagatgcgagcggacgtggctagcctgcgagcactgagccccgaagttctgtgctcattggctttacctgaaggtgcccctgatccgggactctgtcttgggcctgcaggcccagattcaaggccacacctaagcgacgaggaaattcaggtagacgattag

SEQ ID NO: 228051 - DNA, 1398 bp, synthetic construct
  misc_feature 1..1398: note = Description of Artificial Sequence: Synthetic coding sequence
  source 1..1398: mol_type = other DNA
atggagactccttctcaaaggcgggcaacaagatctggcgcacaggcctcttccaccccgctctcccccaccaggatcacacggcttcaggagaaggaggacctgcaggagctgaacgatagacttgccgtgtacatcgaccgagtcaggagcctggagacggagaatgccggtttgcggctgcgaatcaccgagagtgaggaagtggtttcgagggaggtgtctggcatcaaagctgcttatgaggccgagctgggagacgccaggaagacactggactctgttgcaaaagagcgggcaaggctgcagctggaactgagtaaagtcagagaagaattcaaggagctcaaggcaaggaacacgaagaaggagggagacctcatcgccgcacaggctaggctgaaagatcttgaggccctgctcaattccaaggaggctgctctctcgacagccctttctgagaaaagaacactcgagggggagcttcacgatctgcgagggcaggtagcaaagctggaagccgctctcggggaagctaagaaacagctgcaggatgagatgttacggcgtgtggatgccgaaaaccgcctacagacaatgaaggaggaattggactttcagaaaaacatttatagtgaggagttgcgggaaactaaacgcagacatgagactagactagtcgaaatagataacgggaaacagcgcgagttcgaatcaagactggccgacgcactccaggaactgcgagcccagcatgaagaccaggtggaacaatacaaaaaagaacttgagaaaacctacagtgcaaagcttgacaacgctaggcaatctgccgaaagaaattctaacttggtaggcgctgcccatgaggagctccagcagagccggatccgcattgactcactctcagcacagctgtcccaattacagaaacagcttgccgctaaagaggccaaactccgggaccttgaagacagcctggcaagagagcgggatacatctcgaaggcttctcgccgagaaggaacgggaaatggccgagatgcgagccaggatgcagcagcagctggatgagtatcaggagttgctggacattaagttagccctggatatggagatccatgcataccggaagctactcgaaggcgaggaggaaaggctgagactcagcccttcccccacttcccagcgttcaagggggagggcgagctcccacagttctcagacccagggagggggaagcgtgacaaaaaagagaaaactggagagcacggagtccaggtcctctttttcgcaacacgctagaaccagcggaagagtcgcagtcgaggaggtcgatgaggatgaggatggggacgacttgctacatcaccatcacgtcagtggttcacgacggtag

SEQ ID NO: 228052 - DNA, 1905 bp, synthetic construct
  misc_feature 1..1905: note = Description of Artificial Sequence: Synthetic coding sequence
  source 1..1905: mol_type = other DNA
atggagacgccatctcaaaggcgcgcaacgagaagtggggctcaagccagcagcacaccactaagccccacccgcatcacccgacttcaggaaaaggaggacctgcaagaactaaacgatcgtctggctgtgtacatcgacagagtaagaagtcttgagaccgaaaatgccggtttgcgcctgcgcattacagaaagtgaggaggttgtgtcccgggaggtgtctggaatcaaagccgcttacgaggcagaactcggggacgcgcgtaagaccctagatagtgtggccaaggagagagctcggctgcaactggaactctctaaagtgcgagaggaatttaaagagttgaaggcaagaaacaccaaaaaggaaggggatctgatagccgctcaagcccgtttgaaagacctcgaggccttactaaactctaaagaggccgctctgagtacagcactaagcgaaaagaggaccctggaaggagaactgcacgacctacggggacaagtcgcgaaattggaggcggcattgggtgaagctaaaaagcagctccaagacgaaatgcttaggcgggttgatgcggaaaatcgattacaaactatgaaggaagaactggacttccaaaagaacatatacagtgaagaactgcgggaaacaaagagacgtcatgagactcggctggtcgaaatcgataatggaaagcaacgagaatttgaaagcaggctcgcggacgccctgcaagagctgcgcgctcaacacgaggaccaggtcgaacaatacaagaaggagcttgagaaaacctacagcgccaagttggataacgcgaggcagagcgctgaaaggaattccaacctggttggagctgcacacgaagagttgcaacagagcagaatcagaatcgatagcctcagtgctcagctctcacagctgcagaagcaactggccgctaaggaagctaaactgagagatctagaagactctctagctcgtgagagagacacttcccgaaggctactggcggagaaggaaagggaaatggccgagatgagggccagaatgcaacagcagctggatgagtaccaagagctccttgatatcaagcttgctctggacatggagatacatgcttaccgcaagcttttggaaggggaggaagaacgtctgcgcctgtctccatctcccaccagccagcgaagcaggggcagggccagcagccacagttctcagacccagggcggtggttctgtgaccaagaaaagaaagctggagtctaccgaatcacgctctagtttctcacaacatgcccgaacctccgggagggtggctgtggaggaggtagatgaagagggcaaatttgtaagacttagaaacaaatctaacgaggatcaaagcatgggtaattggcaaattaagagacagaatggggatgaccctcttcttacttatcgcttccccccaaagtttactctcaaggctgggcaggtggttacgatttgggccgctggcgcaggggctactcactctcccccaacagatcttgtctggaaggcccaaaatacctggggatgtgggaacagcctccggacggcgctgattaactctactggcgaggggtcccactgttcatccagcggcgatccagctgaatacaatttaagatcccgtacagtgctttgtggcacttgcggacagccagcagacaaggcgagtgctagcggcagcggagcgcaggttggaggtcccatctcaagcggctcttcagccagttccgtgaccgtgacacggtcatatcggtccgtcggcggaagcggcggaggatctttcggtgataacctggttaccaggagctatctgctggggaactcatcaccccgaacacagtcacctcagaactgtagcattatgtag

SEQ ID NO: 228053 - DNA, 1719 bp, synthetic construct
  misc_feature 1..1719: note = Description of Artificial Sequence: Synthetic coding sequence
  source 1..1719: mol_type = other DNA
atggagacccctagccagagaagagcaactcgttccggtgcgcaagccagctctactccgctatctcctacccggattacaaggctgcaggaaaaggaggatctccaggagttgaatgacaggctggcagtttatattgaccgcgtgaggtcactggaaaccgaaaacgcgggattgaggcttcggattactgaatccgaggaagtggtatcacgggaggtctccggcatcaaagctgcttatgaagcggaacttggcgatgcgagaaaaaccctggattccgtcgccaaagaaagagcacggctccaactcgagctgtcaaaggtcagggaagagtttaaggagctaaaggcacgaaacacaaagaaagagggcgatttgatcgcggcacaggctcgtttgaaagacctggaagcattactgaactccaaggaggctgccctaagtaccgctctgtctgaaaagagaaccctggagggtgaactgcatgacctgagagggcaggtagccaagctggaagccgctctaggtgaggcaaaaaagcaactgcaggacgagatgctcaggcgcgttgatgccgaaaaccggctgcagaccatgaaggaggaactcgacttccaaaaaaacatttatagtgaggaactacgcgagaccaaacgacggcacgaaactcgtttggttgagatagataatggcaagcagcgggagttcgaatctaggctggcagacgcactgcaggagcttcgagcccagcatgaagaccaggttgaacagtacaaaaaggagctggagaagacatactccgccaaactcgacaacgcaaggcaatcggcggagaggaactccaacctggtcggtgccgctcacgaggaactccagcaaagccgtatccgcatagactccttatctgcccagttgtcccagctgcagaaacagttggctgccaaggaggccaaacttcgtgatcttgaagacagccttgcgcgagagcgcgatactagcagacgactgctggccgagaaagagagggagatggctgaaatgagggcccgaatgcagcagcaacttgatgagtatcaagagctgctagacattaaactggcccttgatatggagatacacgcctatagaaagcttctggagggggaagaggagaggctacgactgagtccttctccaacatcgcagcgcagcagagggcgagcctcttcacactccagccagacccaggggggaggctcagtgacaaagaaaagaaaactggaatccacggagtcacgatcctctttcagccagcatgctcggacttcagggagagtggcggtggaggaggtcgatgaggaaggaaagttcgtgcgtttaaggaacaaatccaacgaagatcagagtatgggcaactggcagataaagaggcaaaatggggacgaccctctgttgacttatcgatttccacctaagttcacacttaaggctggacaggttgtgacaatttgggccgcaggggcaggcgcaacgcactcccctcccacggacttagtctggaaagctcagaacacctggggctgtggaaacagcctgcgcaccgccctgatcaattccaccggtgaagaggttgcaatgcgaaagttagtgagatcagtgaccgtggttgaagacgacgaggacgaggatggggacgacctgcttcaccatcatcatgtgtccggaagcaggcgctag

SEQ ID NO: 228054 - DNA, 1476 bp, synthetic construct
  misc_feature 1..1476: note = Description of Artificial Sequence: Synthetic coding sequence
  source 1..1476: mol_type = other DNA
atgcagcccttactgtgtctcggcaatcttgaagacgccagagagagaacagggaccttattggcgcagcaccccgcatggggccgtactcgcgctaagccaggctctcctcttaacacgaagaaggagggagatctgattgccgctcaggccaggctgaaggatctggaggcgctgttgaatagcaaggaggctgccctcagtaccgcactaagtgagaaaaggactctggaaggtgaattgcatgacctgaggggacaggtcgccaaactggaagctgctctgggcgaggccaaaaaacagctgcaggacgaaatgcttagacgtgtggatgcagagaatcggttgcagaccatgaaagaggaactagacttccagaaaaacatatactcggaggagcttagagagacaaagagacgtcacgagacacgattagttgaaattgacaacgggaagcaaagggagttcgagtctcgactcgcagacgcactgcaggaattgcgagcacaacacgaggaccaggtcgaacagtataagaaggagctggagaagacttacagcgcaaagctcgataacgctagacagtccgcagagagaaatagcaaccttgtcggcgcagctcacgaagagttgcagcagagccgtattagaatcgactcccttagcgctcagctgtcacaactccagaaacagctggccgctaaggaggctaaactgcgcgaccttgaggattccctggctagggaacgcgatacaagtcgacgcctcttggctgagaaggagcgcgagatggccgagatgcgagcccgaatgcagcagcaacttgatgaataccaggaactgctggatattaaactggctctggatatggagatccatgcctaccgcaagttattggaaggagaagaggagagactcaggttgtcgccaagccctacctcccaacgttcccgtggaagagcatcctcccatagttcgcagactcagggcggaggcagcgttactaaaaagagaaagttagaaagcacggagagtcggtccagcttctcacagcatgccagaacctccggcagagtggcagtagaggaggtggacgaagagggcaagttcgtgagactgcgaaacaagagtaacgaagaccaatcgatgggaaactggcagattaagcgccagaatggtgacgatcctttgttaacttacaggttccctcccaaattcaccctgaaggccggacaggtggttaccatttgggccgcaggagcgggagccacccattcccctccaacggaccttgtatggaaggcccagaacacttgggggtgcgggaactcactgcgcacagctctgatcaactcaacgggcgaggaagtggcaatgaggaaactggtgaggtcagtcacagtggtcgaggatgatgaggacgaagacggagacgaccttctgcatcatcaccacgtgtccgggagcaggcgctag

SEQ ID NO: 228055 - DNA, 1845 bp, synthetic construct
  misc_feature 1..1845: note = Description of Artificial Sequence: Synthetic coding sequence
  source 1..1845: mol_type = other DNA
atggagactccttcacagcgtcgagctacccgatcaggtgcccaggcttcatccactcccctgagccccactagaataacgcgcctgcaggagaaggaagatttacaggaactgaacgaccgactggctgtctatatcgaccgagtgcgctcgctggagaccgagaatgccggactgagactgagaattaccgaatccgaagaggtagtaagccgggaagtgtctggaataaaagccgcttacgaagctgaacttggagacgctagaaagaccctggactcggtggcgaaggagcgagctaggctgcagctcgaactgtccaaagtgagggaggagttcaaggagttgaaagccaggaacaccaagaaggagggcgaccttatcgctgcgcaggccaggctgaaggacttggaagcgctcctcaactcaaaggaggccgcactcagcaccgcactgagcgagaaaaggacactagagggcgagctccatgacctgagaggccaggtggccaagttagaagccgctcttggcgaggcgaaaaagcagctacaagacgagatgctgcgtcgcgtggacgcagagaacaggctccagaccatgaaggaggagctggactttcagaagaacatctactccgaagaactccgggaaaccaagcgcagacacgagaccagattggtggaaatagacaacggaaaacagagggaatttgaatctaggctggccgatgcactacaggagctaagagcccagcacgaggaccaagtcgagcaatataagaaggagttggaaaaaacctacagtgcgaagctagacaacgccagacagtctgccgagcgtaattccaacctcgttggcgctgctcatgaggaactccaacaaagtaggatccgcattgattctctatctgcccaactcagtcagctgcagaaacagttagctgcgaaagaggccaagctccgcgacctcgaagactcactcgctcgggagcgggatacctcaagaagactgctggcagaaaaggagcgcgagatggccgaaatgcgcgctaggatgcagcaacaactggatgaatatcaggagttgctggatatcaagctagctctcgatatggagatacacgcttatcgtaagctgttggagggcgaggaggaaagacttcgattgagcccatcccccacgtcacagcgttccaggggtagagcaagctcccactcctctcaaactcagggaggcggtagcgtgaccaagaaacgcaagctggaaagcactgaatccagatcaagctttagccagcacgccaggacctcgggacgggtcgcggttgaggaagtcgacgaagaaggcaagttcgtaagactgcgcaataaatcgaacgaagatcagtccatgggaaactggcagattaaacgacagaacggagacgatcctctgctaacctatcggtttccacctaagttcaccctcaaggcaggacaagtggtcactatatgggcggcaggcgctggcgctacccactcaccccctacggacttggtgtggaaggcccagaatacatgggggtgcggcaattcccttcgcaccgctctcattaactccactggagaggaggtggctatgaggaagctcgtcagaagtgtgacagtggtggaggatgacgaagatgaagacggcgacgacctgctgcaccatcatcacggatctcactgcagctcatctggggatcctgcggaatacaatctgagatctcgaacagtcctatgcgggacttgcggacagccagccgataaggctagcgcatcaggctctggggctcaatcacctcaaaactgtagcatcatgtag

SEQ ID NO: 228056 - DNA, 1995 bp, synthetic construct
  misc_feature 1..1995: note = Description of Artificial Sequence: Synthetic coding sequence
  source 1..1995: mol_type = other DNA
atggagacaccatctcagcgcagggccacccgatcaggcgcacaggcgtccagtacccctctcagcccaacgcgaatcactaggctgcaagaaaaggaggaccttcaggaactgaatgacagacttgcagtgtatattgacagggtccgtagtctcgaaactgagaacgccggacttcggttgcggattaccgagtctgaggaagtggttagcagggaggtttcaggcataaaagccgcttacgaagccgagctgggagatgctagaaaaaccctcgatagcgtagccaaagagcgcgcaagactgcagctggagttgtccaaggtccgcgaggagtttaaggaactgaaggcccgtaatacaaaaaaggagggggacctgatcgccgctcaagctaggctcaaggatctcgaagccttattgaatagcaaagaggccgctctgagcacggctctgtcagaaaagcggacgctggaaggagaactccatgatttacgcggacaggtggctaaactcgaggccgctttaggcgaagctaagaagcagttgcaggatgaaatgttgagaagagtcgacgccgaaaataggttgcagacgatgaaagaagaactcgatttccagaaaaacatttattctgaggagttacgtgaaacgaagagacggcatgagacacggctagtggagattgataatggaaaacagcgcgagttcgagtctagattggccgacgcccttcaagagctgcgcgctcagcatgaggatcaagtggaacaatacaaaaaggaactggaaaagacatacagcgctaagctggacaacgcccgacaatccgccgagaggaattctaatctggttggagctgcccatgaggaattgcagcaaagtaggatcagaatagactccctgtctgctcaactcagtcaattgcagaaacagctcgccgcaaaggaggccaaactccgggatctcgaagactctctggcacgagaacgggatacaagcagacggttacttgctgagaaagagcgagaaatggctgagatgagagcacgaatgcagcagcagctggatgagtaccaggagttgcttgacatcaagttggcccttgacatggagatccacgcatatcgtaagctgctggagggtgaggaggagagactgcgactgtcaccctctcccaccagccagcggagcagaggccgtgcctcttcccactcttcccaaacccagggagggggtagtgtgaccaaaaagcgcaagttggagtctacagagtcacgcagctcttttagtcaacatgcacgcaccagtggaagagtggccgtggaagaggtggacgaggaaggcaaatttgttcgtctgaggaacaagtcaaatgaagatcagtccatgggaaactggcagattaagcggcagaatggcgatgacccactgctcacttacaggttccctccaaagtttaccttgaaagctgggcaggttgtaacaatttgggctgccggtgctggtgccacccatagccctccaactgatctcgtgtggaaagcccaaaacacctggggatgcggcaacagtctgaggaccgccctaataaatagtaccggggaggaggttgccatgagaaagctcgtgcgcagtgtgaccgttgtagaagacgatgaggacgaagatggagatgacctgttgcaccatcaccacgggtcccattgtagctccagtggagacccagcagaatataatctccgatcccggacagttctgtgcggaacatgcggccagcctgctgacaaagcttccgctagcggatccggcgcacaggtgggaggccctattagctccggctcgagcgcgtcctctgtcactgtcactcggagctaccgctcagtcggcggttccggtggaggatcatttggagacaacctggtcaccagaagttacctgctgggaaattcctcgcctaggactcaaagccctcagaactgctcaatcatgtag

SEQ ID NO: 228057 - DNA, 1719 bp, synthetic construct
  misc_feature 1..1719: note = Description of Artificial Sequence: Synthetic coding sequence
  source 1..1719: mol_type = other DNA
atggagacgcctagccagcggcgagccacccgttctggagcccaagctagtagcaccccactttctccaacccggataactcgactgcaagagaaggaggatctacaggagctgaacgaccggttggctgtctatatcgatcgggtcaggagcttagaaacagagaatgctggccttcgactgcgcattactgagtccgaagaggtcgtgtcccgcgaagtgagtgggatcaaagccgcttacgaagctgaactgggtgatgccagaaaaactttagattctgttgcaaaagagagggcccgactccagctggagttgagtaaggtgcgtgaggagttcaaggaacttaaggcacggaatacaaagaaggaaggtgacctgattgctgcccaggcacggctgaaggacttggaggctctgctgaatagcaaggaggccgctctcagcacagccctgtcagagaagcggactctggaaggcgagcttcacgacttgcgcggacaggttgccaagcttgaagcagccctaggcgaagcaaagaaacagttgcaggatgagatgctgagacgagtggacgcagagaacaggttacagacaatgaaggaagaactggattttcagaagaatatttacagtgaagagctgcgtgagacaaaacggaggcacgaaacaagactggttgaaattgacaacggcaagcagcgggaattcgaatctcgcctggccgacgctcttcaggaactgagagcacagcacgaagatcaggtggaacagtacaagaaggagctggaaaagacatacagtgctaaacttgacaacgctcgtcagtctgccgagcgaaactctaacctagtcggggctgcccatgaagagctccagcaaagtcgtattcgcattgacagtctttccgctcagctcagccagctgcaaaagcagttggccgctaaagaggctaagcttcgggatctggaggattccctcgctcgagaaagggatacaagtcggagactcctggccgagaaggagcgcgaaatggctgagatgagagcaagaatgcagcagcaactggatgaatatcaggaactgctcgacatcaaactggcactcgacatggagattcatgcttatcggaagcttctagaaggggaggaggagagattgcggttgtctccctctccgacttctcagcggtcccgagggagggcttccagccacagttcccagacacaggggggtggcagcgtgactaaaaagaggaagctggagagcacagagtcacggtcttctttctcccagcatgcacgaaccagcggcagggtggccgtggaggaggtagacgaagaaggcaaatttgtacgcctgcggaataaatctaatgaagaccagtcgatggggaattggcaaattaaacgtcagaacggcgacgaccctctgttgacctatcgctttccccctaagttcactctaaaagctggacaggtggtaacaatttgggcggctggcgctggtgcaacacactctcctccaaccgatctggtgtggaaggcacagaatacatggggatgtggaaatagcctccgcaccgccttgattaatagcacgggagaagaggttgccatgcggaagctggtgcggagcgtgaccgtcgtggaggatgatgaagacgaggatggagatgatcttctgcaccaccatcatgtttcaggcagtcgcaggtag

SEQ ID NO: 228058 - DNA, 1476 bp, synthetic construct
  misc_feature 1..1476: note = Description of Artificial Sequence: Synthetic coding sequence
  source 1..1476: mol_type = other DNA
atgcaacctctcctgtgtctcgggaacttggaagatgctcgcgaaagaacgggcacattacttgcccagcacccggcatggggaaggacacgcgcaaaacctggaagccctctgaataccaagaaagaaggagacctgattgcagcccaagccagactcaaagacttggaagccctccttaactctaaagaggctgcccttagtacggccctgtcagaaaaaaggaccctggagggagaactgcacgacctcagggggcaggtggcgaagctcgaggccgctctgggggaagctaagaaacagctgcaggatgaaatgttgcggcgagtggacgcagaaaaccgccttcagaccatgaaagaggaactggatttccagaagaacatatattccgaggagctgcgtgagacaaagagacgtcacgagacacgcctggttgaaatcgacaacggaaagcaacgggagtttgagtcacgcctcgccgatgccctgcaggagttgagggcacagcacgaggaccaagtggagcagtacaagaaagaactggagaaaacatattcagccaagttagacaacgcccgtcagagtgctgagcgcaactccaatctggtgggcgctgcacacgaagaactgcagcaaagccgaattcgcatcgattccctctccgcccaactgtcccagctccagaagcagttagcggcaaaggaagcgaagctgcgggacctcgaggactcactggcccgtgaacgggatacaagtcgcagacttctggcagaaaaggagcgcgagatggctgagatgcgcgcacgtatgcaacagcaactggatgagtaccaagagctcctggatatcaaattggctcttgacatggagatacacgcctacaggaagcttctggaaggcgaggaagagcgactgagactgagtccttcaccaacatctcagcgctctcggggacgcgcttcaagccacagttcgcagacccagggaggtggatccgtcacaaaaaagagaaaactggagagcaccgaatcaagatcatcattttcccagcacgcgcgaacctccggtcgggtggccgtcgaagaggtcgacgaggagggcaagtttgttcggcttcggaacaaatccaacgaggatcagagtatggggaactggcagattaagcgccaaaacggcgacgatcccctgctcacctatcgttttcctcccaagttcacgctgaaggcaggtcaggtggtaactatctgggcagccggtgccggagctacacatagtcctcccacagacctggtgtggaaagctcagaatacatggggctgcggcaactctttgaggacagccctgattaatagtactggcgaagaggtggccatgcgcaaattggtccgttctgtcacggttgttgaggatgacgaagacgaagacggtgacgacctcctgcatcaccaccatgtgagcggttccaggcgatag

SEQ ID NO: 228059 - DNA, 1464 bp, synthetic construct
  misc_feature 1..1464: note = Description of Artificial Sequence: Synthetic coding sequence
  source 1..1464: mol_type = other DNA
atggagacaccaagccagcggagagccacacggtcgggggcacaagcatcctctactccgttaagccccactcgaattaccagactgcaggaaaaagaggacctacaggagcttaatgaccgattggctgtgtacattgaccgtgtaagaagcttggaaaccgaaaatgcaggtctacggttaaggattacggagtctgaggaggtcgtttcaagagaggtgagcggaataaaggccgcttatgaagcagagctcggcgatgccaggaagactcttgacagcgtggccaaggaaagagctagattgcaactggagctttccaaagtgagggaagagtttaaagagctgaaggcgcgaaatactaagaaggaaggcgacttgatcgctgcacaggccaggctcaaggacttggaagcactgcttaactctaaggaggccgcactcagtactgccctttccgaaaagcggactctggagggagaattacatgacctccgaggacaagtggcaaaactggaggcagctttgggcgaggcgaagaagcaattgcaggacgagatgctgcgtagagtagatgctgagaacaggttacagaccatgaaggaggagctcgatttccagaaaaatatctattctgaagaactccgcgagacgaaacgacgacacgagactagactggtcgagatcgataacgggaagcagcgggaattcgagagccgcttggccgacgccctgcaagagctaagggcccaacacgaggaccaggtggagcagtacaagaaagagcttgagaagacatatagtgcaaagctggataatgccagacaaagcgcagagcgcaactcaaatttagtcggagccgctcatgaagagcttcagcagtctagaataagaatcgactctctgtctgcccagctgtcccagctgcagaaacaattggctgctaaggaagccaaactgagggaccttgaggactctctcgctagggaaagggacacaagcagacgcctgctggctgaaaaggaaagggaaatggcagagatgcgcgcaaggatgcagcaacagctggacgagtaccaagaacttcttgatatcaaactggccctcgacatggagatccatgcgtacaggaagttgttggagggggaagaggagcgcttacgactaagtccttctcctacctctcagaggtcccggggtagggcttcttcccattccagccagacacagggcggaggctctgtgaccaagaaacggaagctcgaatctacagaaagtcgcagcagcttctcgcagcacgctcgaacttcaggaaactccctgcgcaccgcactcattaattccactggggaggaagtggccatgcggaagttggttagatctgtcacggtcgtcgaagatgacgaagacgaagacggagacgatctgctgcatcatcatcacgtaagtggatctagacgttag

SEQ ID NO: 228060 - DNA, 1725 bp, synthetic construct
  misc_feature 1..1725: note = Description of Artificial Sequence: Synthetic coding sequence
  source 1..1725: mol_type = other DNA
atgggcaatagcgagggttgtaacactaagaaggagggggatctcattgccgctcaagcacggttgaaggatttagaggcactgctcaactctaaggaagctgcgttaagtaccgcactgagtgagaaacgaactctggagggcgagttgcacgatctgagaggacaagttgcaaaactggaagcggctcttggagaggccaagaagcagctgcaggacgagatgcttcgcagagtcgacgccgaaaatcgcctccagaccatgaaggaggaactggactttcagaaaaatatttattcggaagaactgcgtgagaccaaacgcagacatgaaactcgcctggtggagattgacaacgggaaacagagagagttcgagagcaggctggccgacgcactgcaagaactacgtgcccagcacgaagaccaagtggagcagtacaagaaagagctcgaaaaaacttattccgcaaaactcgacaatgccagacagagcgccgagagaaacagcaacctggttggtgccgcacatgaggagttgcaacagtcccgtattagaatcgactccctatcagcccagctctcacagctgcagaaacagctggcagccaaagaggctaagttacgcgacctggaggactctctggccagggagagagacacctccagaagactattggcagagaaggaacgggagatggccgaaatgcgtgcacgcatgcagcagcagctcgacgaatatcaggaacttctagatattaaacttgctttggacatggagattcacgcttatcggaaactcctggaaggtgaggaggagcgccttcggctgagtccttcaccaacttctcagcgttcacgaggtcgcgcaagttctcacagcagccaaacccagggtggcggttcagttacaaagaaaaggaagctagaaagcaccgagagccgttcctctttttctcagcatgccagaacatctggcagggtcgcagttgaggaggtcgatgaagagggcaaatttgtgcggttgaggaataagtctaatgaggatcagagcatggggaactggcagattaaacgccaaaacggcgacgatcctctgttgacatatcgtttccccccaaaattcaccctcaaagccggtcaggtggtgaccatttgggcggcaggggctggcgcaacgcactccccacctacagatctggtctggaaagcccagaatacctggggatgtggaaactccctgagaacagctctcattaattccacaggcgaagaagtggccatgaggaaactggttagaagcgttaccgtggtagaggatgacgaggacgaggacggtgacgacctgctgcaccaccatcatgggtcccactgctccagcagtggagacccagcggagtataacctgaggtctaggactgtgctatgcggcacatgtggacagcctgctgataaagcaagtgcatcagggtcaggggctcaagtcgggggtcctatcagttcaggatcctcagctagctccgtcacggtcactcgcagttacaggtcagtgggcggatctggcggaggatcatttggagataatctcgttacaagatcttacttattagggaattcctcgcccaggacacagagtcctcagaattgttcgataattcaggagatgggtatgcgttgggaagtcgaagagggacgcagaaaggtgtcccttagctgccttccttag

SEQ ID NO: 228061 - DNA, 1848 bp, synthetic construct
  misc_feature 1..1848: note = Description of Artificial Sequence: Synthetic coding sequence
  source 1..1848: mol_type = other DNA
atgccgagtagaaagtttgccgatggggaggtggtccgcggacgctggcctggaagttctctttattacgaagtcgaaattctcagccacgacagcaccagtcagctatataccgttaaatacaaggatggcacagagctggagctgaaggaaaacgatatcaaacctttaacttccttccgtcagcgaaaaggtgggtccacctcctcctcaccttccagacggagaggtagcaggtcgcgctcacgctcccgcagccccggtaggcctcccaaatccgcacggaggagcgcctctgccagtcatcaagccgatatcaaggaagctagacgcgaggtggaggtcaaactcacaccccttattttgaagccttttgggaacagcattagtagatataacggagagcccgaacatatagaacgcaatgatgcccctcataagaatacccaagaaaaatttagtctctcccaggagagctcttacatcgcaactcagtactctctccgccctagacgcgaagaggtgaagctcaaagagattgactccaaggaagagaaatatgtggccaaggaactcgctgtgaggaccttcgaagtgacgcctatccgcgcaaaggatctggaatttggaggagtgccgggtgtgttcctcatcatgttcgggctccctgtctttctgtttttgctgctgctgatgtgtaagcagaaggacccatctctgctgaatttcccgccacctctgccagccctttatgagttgtgggaaactcgtgtatttggagtttatctgctgtggttcttaatacaggtgctcttttatctgctccccataggaaaggtggtggagggtacgccactgatcgacggccgacggctgaagtacaggttgaacggattctacgccttcatcctgacttccgctgtcattgggacctctctatttcaaggtgtggaattccactatgtctactcgcatttcctgcagttcgccctggctgccactgttttttgcgttgtgctctctgtgtacttatatatgcgctctttaaaggccccaaggaacgatctttcaccagcctcatctggcaacgctgtgtacgatttttttattggaagagagttgaaccccagaattggcacattcgatttgaagtacttttgcgagctccgacctggtctgatcgggtgggtcgttataaacctggtcatgttactcgccgagatgaagatccaagatcgagccgtcccatccttagctatgattctggtaaactcatttcagctcttgtatgtagtggatgccctgtggaatgaggaggccctactcacaactatggacatcattcatgacgggtttggttttatgctggccttcggggacctcgtgtgggtgccatttatctactccttccaggcattctatctggtgagtcaccctaacgaagtgagctggcccatggcttctctgattattgttcttaaattatgcggctatgtcatctttcgtggagcaaattcccaaaaaaatgccttccgtaaaaatccctcagacccaaagctggcacacctcaagactatccacacgtccaccgggaaaaaccttttagtgtccggttggtgggggttcgtgcgacaccctaactatctgggggatctcattatggcattggcctggtctttgccctgcggctttaatcatatcctgccatatttttacataatctacttcactatgctgctggtgcaccgcgaggcacgggatgagtaccattgcaagaaaaagtatggcgtagcttgggaaaaatactgccagagggtgccataccgaatctttccttacatttactag

SEQ ID NO: 228062 - DNA, 1848 bp, synthetic construct
  misc_feature 1..1848: note = Description of Artificial Sequence: Synthetic coding sequence
  source 1..1848: mol_type = other DNA
atgccgtcccgaaagttcgcggatggtgaagtggtccggggaaggtggccaggcagttcgttgtattatgaggtagagattctctctcatgatagcacctctcagctctacaccgtcaagtataaagatgggactgagctggagctaaaggagaacgacatcaaaccactcacatcattccgccagcgaaaaggaggctcgaccagctctagtccgtctagacgtcggggaagccgctctaggagccggagtcgatctcccggaagacccccaaagtccgccaggcggagtgcctctgcctcacaccaggcagacatcaaagaggccagaagagaggtcgaagttaaactgacgcctctgattctgaagccatttggtaattctatttcccggtacaatggcgagcccgagcacatcgaacgtaacgacgcccctcataagaatacccaagagaagttcagcctctctcaggagtcgagttacatcgctacacagtacagccttagacctcggagagaggaggtgaagttgaaagagattgatagcaaggaagaaaaatatgtagccaaggagttggcagtgcggacattcgaagtcacgcccataagagccaaggacttagagtttgggggtgtgccaggagtgtttctcattatgtttgggctgccagtctttctgttcttgttgttgttgatgtgtaagcaaaaggacccatctctcctcaacttcccacctcccttacctgcactttacgagctctgggagacacgagtgttcggggtttacctcctctggttcttgatccaggttctgttctacctcctcccaattggcaaggtggtcgagggaaccccccttatcgacggtagacgactgaagtaccgtctaaatggattctacgcttttatccttacgagtgccgtcattggtaccagcttgttccagggcgttgagttccactacgtatattcacactttctccagttcgcactggccgcaactgtgttttgcgtcgttctgtcggtttacctgtacatgcgcagcctgaaagcccctaggaatgatctgtcacctgccagctcaggtaatgcagtgtatgatttctttattgggagggaactgaaccctaggatcggcacttttgatctgaagtacttttgtgagcttcggccaggcctaatcgggtgggtggtgattaacctggtcatgttgttagccgagatgaagatccaggaccgcgctgtgccctccttggcaatgatcctggtgaactccttccagttgctatatgttgtagacgcgttatggaatgaggaagcgctgcttaccaccatggatatcatccacgatggtttcggctttatgctggcattcggtgacctggtctgggtacctttcatatactcatttcaggctttctacctcgtctcacaccccaacgaggtgtcttggccaatggcttctctcattatcgtgctgaagctatgcgggtatgtgatcttcagaggcgcaaattctcagaagaacgcattccggaaaaacccgtccgaccccaagctggcccacctgaagactatacacacaagcactggcaagaacctgttagtgagcggctggtgggggttcgtcagacacccaaactatcttggagacctgataatggctttggcttggtccctgccctgcggattcaaccatatcctgccctatttctacattatctattttaccatgctcctggttcatagagaagcccgagacgagtatcattgcaagaagaaatatggtgtcgcgtgggaaaagtactgccagcgagtcccttaccgtatttttccttacatctactag

SEQ ID NO: 228063 - DNA, 156 bp, synthetic construct
  misc_feature 1..156: note = Description of Artificial Sequence: Synthetic coding sequence
  source 1..156: mol_type = other DNA
atgcctagtcggaagttcgccgatggtgaggtggtgagaggccgatggccaggttcaagtctgtactacgaggtcgagatcctcagtcatgactcaacctctcaactgtatactgtaaagtacaaggacggcacggaactggagcttaaggaatag

SEQ ID NO: 228064 - DNA, 387 bp, synthetic construct
  misc_feature 1..387: note = Description of Artificial Sequence: Synthetic coding sequence
  source 1..387: mol_type = other DNA
atcggcagggagctcaacccaaggattggcacgttcgacctgaaatacttctgcgaacttcggccaggtttgatcggctgggtcgtcatcaacctggtgatgctcttggctgagatgaaaattcaggacagagccgtcccgtccttagccatgatcttggttaatagttttcagcttctgtatgttgtagatgccctgtggaacgaggaagctctcctaaccactatggatatcatccatgacggatttgggttcatgctggctttcggagatcttgtatgggtgccattcatatattcgtttcaggctttttatctggtaagccacccgaatgaagtgtcttggcccatggcatccctcatcatcgttttgaaaagagaatactag

SEQ ID NO: 228065 - DNA, 642 bp, synthetic construct
  misc_feature 1..642: note = Description of Artificial Sequence: Synthetic coding sequence
  source 1..642: mol_type = other DNA
atgccatcaaggaaattcgccgacggtgaagtcgtgcggggtcgctggcccggaagtagtctgtattatgaagttgagattctgtcccacgacagtacatcacagctgtataccgttaaatacaaggatggcactgagctcgaactcaaggaaaatgacatcaagccgctcacttcttttcgccagcgcaaaggaggttccacctcctcctccccttcccggaggaggggctctaggagcaggtccaggagccggtctccaggacgaccccctaaatctgcaagacgatcagcctctgcctctcatcaggccgatattaaggaagctcgtagggaggttgaagtgaaactgacacccctgatcctcaaaccctttggaaactccattagccggtacaacggggaacccgagcacatcgaacgcaatgacgctcctcataaaaatacacaggaaaagtttagtctatctcaggagtccagctacattgccacgcagtactccctgagacctcgcagagaggaggtcaagcttaaggagattgacagtaaagaagagaagtatgtggcaaaagagctggccgtgagaacttttgaagttacaccgatacgtgccaaggacctggagtttggcggagtgccatag

SEQ ID NO: 228066 - DNA, 324 bp, synthetic construct
  misc_feature 1..324: note = Description of Artificial Sequence: Synthetic coding sequence
  source 1..324: mol_type = other DNA
taaagcaccagtctgaagatgtatttctatttctatatcgaccttaagacaatccacacaagcacaggaaaaaacctgctagtgtccggctggtggggctttgtgaggcaccccaactacctcggtgacctaatcatggcactagcttggtctcttccgtgtggcttcaatcatatcttgccttacttttacattatctacttcactatgctgctggttcaccgcgaggccagggacgaatatcactgtaaaaagaagtatggtgtggcctgggagaaatattgtcagagagtaccctatcgaatcttcccctacatttactag

SEQ ID NO: 228067 - DNA, 1761 bp, synthetic construct
  misc_feature 1..1761: note = Description of Artificial Sequence: Synthetic coding sequence
  source 1..1761: mol_type = other DNA
atggccactgcaacacccgtgccgccacgcatgggctcacgggctggcggtcccacgactccactatccccaacaaggctcagcaggctccaagagaaggaggagcttcgggaactgaacgataggttggcggtctacatcgacaaagtgagaagtttggagacagagaactccgcattgcagctccaggtgaccgaacgggaagaagtgcgtggtcgtgaactgaccggcctgaaggctttgtatgagacagaacttgctgacgcacggagagctttggatgatacagcgcgagagcgcgctaagctgcagattgagctaggtaaatgtaaagcagagcatgaccaattattacttaactatgcaaagaaggagagtgatctgaacggagcacaaatcaagctgcgagaatatgaggccgctctcaattcaaaggatgcggctcttgcgaccgccctgggcgataaaaagtcgctcgagggagatctcgaggacctgaaagatcagattgcgcaattggaggccagtctcgcggctgccaaaaagcagctcgccgacgaaaccctccttaaagtggacctagagaaccggtgccagagcctgacagaggatctggagttccgtaagtccatgtatgaggaagagataaatgaaactaggcgcaaacacgagaccagactcgtggaggttgactctggacgccagattgagtatgaatataaactggcccaggctctgcacgaaatgcgggaacagcacgatgcacaggttcgactgtacaaagaagagttagagcagacctatcacgccaagctggaaaacgcacgcctgtccagcgagatgaatacaagtacagtgaactcagcacgcgaggaattaatggagtcccggatgcgaattgagtccctctcatcgcagctgtccaaccttcagaaagagtctcgcgcatgcctggagcgaatccaggaacttgaagacctgctcgcgaaggagaaagataatagcagacggatgcttaccgataaagaaagggagatggcagagattcgtgatcagatgcagcagcaacttaacgactacgagcaactgctagatgttaagttggcgctggatatggagatcagtgcgtaccgcaagctgctggaaggggaggaagagaggctgaaattatccccgtccccctccagccgggtaaccgtcagccgggcttcttcctcccgaagtgttagaactacgaggggcaaaagaaagcgcgtcgatgtggaagaaagtgaggcatcctctagcgtctccatctcacactccgctagcgcaaccggaaacgtctgtatcgaggagattgacgttgacggaaagtttatccggcttaaaaatactagcgagcaggaccagcctatgggcggatgggagatgattcgcaaaattggtgatacctcggtttcatacaagtacacatctcgttacgtgcttaaggcaggccaaaccgttactatctgggccgctaacgccggagtgacagcctccccccctaccgatctcatatggaaaaatcagaatagctggggtacaggagaggatgtgaaggtcatcctcaagaattcacaaggagaggaggtcgctcagagatctactgtgttcaaaacgactatcccggaagaagaggaggaggaggaggaggccgctggagtcgttgtcgaggaagagcttttccatcagcagggaacacccagggcctctaatcgtagctgtgcaataatgtag

SEQ ID NO: 228068 - DNA, 1803 bp, synthetic construct
  misc_feature 1..1803: note = Description of Artificial Sequence: Synthetic coding sequence
  source 1..1803: mol_type = other DNA
atggccactccactccctggcagagctgggggaccagccacgccactgtctccaacgagactatctcggttacaagagaaagaggaactgagagagttgaacgaccgcctggcacactacatcgatcgagtacgcgctctcgaattggaaaatgatagactactgttgaagatcagcgagaaggaagaagtaactacaagggaggtgtccggcattaaggcactctacgagtctgagttagctgacgctcgcagagtgctggatgagactgctcgggagcgcgcacgcctgcagatcgagattggtaagttaagagccgagctggatgaggtgaataagtcggccaaaaaaagggagggggagctaaccgttgcccagggtcgcgtgaaggatttagaatcgctctttcaccgctcagaagtggaactcgctgccgcactctcagataaacgcggtctggagtcagacgtggctgaactgcgagctcagttagccaaagccgaggacggacacgcagttgctaaaaagcagctggagaaagagactttaatgcgggtggacctcgagaaccggtgtcagtcactgcaggaggagctggacttcaggaagtcagtgttcgaagaggaggtcagggagacccgtaggagacacgagcgtaggctggtggaagtggacagctcgaggcagcaggaatacgactttaaaatggcacaggcactagaagagctgcggtctcagcacgatgaacaagtgagactttataaactagaactcgaacaaacctaccaagcgaagttggactccgccaagctctccagtgatcaaaatgataaagctgccagtgccgctcgagaagagcttaaagaagccaggatgagactcgagagcctgagctaccagctgtcaggccttcagaagcaggccagtgcggctgaagatagaatccgcgaattggaggaggcaatggcaggtgaacgcgacaagttcagaaagatgttagacgctaaggagcaggaaatgactgagatgcgggacgtcatgcaacagcagcttgcggagtatcaggagcttctggatgttaagcttgcccttgacatggagataaatgcttatcgaaaactgcttgagggcgaggaggagcgtctgaaactgagcccaagcccatcgagcagggtaacagtgagtagggctacctcctcatctagtgggagcttgagcgccacaggtcggctgggacgttctaagagaaaacgcctagaagtggaggaacctcttggctctggtcccagtgtgctgggtaccgggactgggggttccgggggattccacctcgcccaacaagcatctgcttccggaagtgtgtccatcgaagaaatagacttggagggtaaattcgtgcagcttaagaacaattcggacaaagaccagagtctgggcaactggcgcattaagaggcaggtactggagggggaggagatcgcttataagttcactcctaagtacattctgcgggcaggccaaatggtgacagtttgggccgcaggagccggagtagctcacagtccccctagcactctggtgtggaaggggcagtcaagctggggaactggcgagagtttccgaacggtcctcgttaatgccgatggggaagaggttgccatgagaactgtcaagaagagcagtgtaatgagggagaatgaaaatggcgaggaagaggaggaggaagctgaattcggcgaggaggatttgttccaccagcagggtgacccaagaaccacctctcgaggttgttatgtgatgtag

SEQ ID NO: 228069 - DNA, 1803 bp, synthetic construct
  misc_feature 1..1803: note = Description of Artificial Sequence: Synthetic coding sequence
  source 1..1803: mol_type = other DNA
atggcaacccctctacccggacgagccggaggacctgctacccctttatccccaacgcggctgagtcgcctgcaggaaaaggaagagctgagggagctgaacgataggcttgctcattatattgaccgggtgagagctttagaactcgagaacgataggctgctgctcaaaatctccgaaaaggaagaagttactacaagggaagtcagtggcattaaggcgctgtatgagtccgagctggcggacgcgaggcgggtgctcgatgagactgccagggagagggctagactgcagatagagataggaaagctccgtgccgaattggacgaggttaataagagcgcgaaaaaacgggaaggggagctcaccgttgctcagggtagagtaaaggatctcgagtccttgttccaccggagcgaagtagaactggctgctgcactgagtgataagcgtggtctggaatctgacgtggcggaactgcgggcacaactggcaaaagccgaggatggacatgcagtggccaaaaaacaactggagaaagaaactctgatgagagtggatctggaaaatagatgccagtctctgcaggaggaactcgattttcgaaagtccgtgttcgaagaggaagtccgtgaaacgagacgcagacacgagcgcagacttgtggaggttgactcatcaaggcagcaagagtatgatttcaagatggcccaggcactcgaggagctaagatctcaacacgatgagcaagtgcgtctgtacaagttagaactcgagcagacatatcaggccaaactcgattccgctaaattgtcttcagaccagaatgataaagccgcttccgccgctcgggaggagttgaaagaagcacggatgcgactcgagtccctgtcataccaactgagtggcttacagaaacaggccagtgctgcagaagatcgaatccgagagctggaggaggccatggccggagagcgggacaaatttagaaaaatgctggacgccaaggagcaggagatgactgagatgagggacgtgatgcagcagcagctcgcagagtaccaagagcttcttgatgtcaaactggcactggacatggagattaatgcctaccgcaagttgttggagggggaagaagaacgactgaagctctctccgagtccaagctctcgggtcacggtttcgcgcgcaacaagttcttctagtggctccctgagcgcaactgggagactgggaagaagcaagcggaagaggctggaggtggaggagcctttggggagtgggccaagcgtgctcggcactgggacaggtggcagcggcggttttcatctagcgcagcaggcatctgcttctgggtctgtgtcaattgaagaaattgatctcgagggaaagttcgtgcagctaaagaacaactcagataaggaccagtccctgggaaattggcgcattaagcgacaagtgcttgaaggtgaagagatagcgtacaagtttaccccaaaatatattctgcgcgcagggcaaatggtgactgtttgggcagcaggcgcaggcgttgcccacagcccaccgagtacccttgtgtggaaaggccagtccagttggggtactggcgagtcttttcggacagtgctggtgaatgctgacggcgaagaggtcgcaatgaggacggtgaaaaagtcatccgttatgcgggagaacgagaacggggaggaagaggaggaggaggccgaatttggcgaagaggacctgtttcatcaacagggcgatcctcgtacgacatcccgcggatgttatgtgatgtag

SEQ ID NO: 228070 - DNA, 651 bp, synthetic construct
  misc_feature 1..651: note = Description of Artificial Sequence: Synthetic coding sequence
  source 1..651: mol_type = other DNA
atgttaattggaggcaacattgaggtccacgtaaaccccggtgatggtaccggactgagaaaggcccttttgcatgcccctaccggtacatgttctgacggccaggctcactcaattagtttagtacggaatcggcgaattatcactgttcagctcgacgagaacaaccccgtcgagatgaagctggggactcttgtggagagccgcacaatcaacgtgagcaacctctacgtgggcggaatcccagaaggggaaggcacttctctgcttacgatgcgccgatcctttcacggttgcatcaaaaacctcatcttcaatctcgagctgctcgattttaattcggcggttatgagcaagagcacatggacacctgcgggttgtcagaaggggcttagttggctgcccatgcagcgtacaaaacttcttccagaaccacgcgcattcccagttggagccgcaagcttcactatctcccaggttcaatctgcaaaggagggcctaggccagagggaattgaagtggggcctggctgtgaaggtgccagccaaagcgggagccggagccggagccggtgccgttctgaagattcgggcaggaacgggcagggagcgcgtcccccaggccactcagatgacccgaccaaacccctag

SEQ ID NO: 228071 - DNA, 9227 bp, synthetic construct
  misc_feature 1..9227: note = Description of Artificial Sequence: Synthetic coding sequence
  source 1..9227: mol_type = other DNA
atgcgaggcggagttcttctcgtgctgctcctgtgtgttgccgcacaatgcagacagcgcggtctgtttcccgctattctcaacctggctagtaacgcccacatctccactaatgctacgtgtggtgagaagggacctgaaatgttttgtaagttggttgagcacgttccgggaagacctgtccgcaatccacagtgtcgcatttgtgatggcaattcggctaatcctcgggagcggcacccaatttctcacgcgatcgacggcactaataattggtggcaaagcccgtctattcagaacgggagggagtaccattgggtgaccatcaccctggaccttcgtcaggtgtttcaggtagcgtacgtgattatcaaggcagctaacgctccccgaccgggaaactggatcctggagagaagtctcgatggcacaacttttagcccctggcagtactatgctgtttcagactctgaatgcctgagccggtacaatataacgccacgtcgaggtccaccaacataccgcgctgacgacgaagtgatctgtactagttactactccaggctggtgccattggaacacggtgaaatccatacttccctaattaatggcagaccatcagctgacgatctgagtcccaaactcttggaattcacatccgcccgttatattagactgagactccagcgcatcagaaccctcaacgcagatttgatgaccttaagtcatagagagcccaaggagttggaccctatagttacccgacggtactattattcgataaaagacatctcggttgggggaatgtgcatctgttacggccatgcctcatcgtgcccctgggacgaaaccacgaaaaagctgcaatgccagtgtgagcataatacttgtggagagtcgtgcaaccgctgttgccccggataccaccaacaaccctggcggccaggcactgtgtcaagtggtaacacgtgcgaagcttgcaattgccataacaaggccaaggattgttattatgacgaatcagtcgctaaacagaaaaaatctctcaatacagccggacaattcaggggtggtggcgtgtgtatcaattgtctccagaatactatgggtatcaactgcgaaacgtgtatcgatggatattacagacctcacaaggtgtctccatacgaagatgagccctgtcgcccttgcaactgcgatcctgttggttcgctcagttccgtgtgtatcaaagacgatctgcatagcgacttgcataacggtaaacagcctggacagtgcccctgcaaggaaggttatacaggggagaagtgcgatagatgccagcttgggtacaaggattaccccacatgcgtgtcgtgcggctgtaacccagttgggagtgccagtgacgaaccctgcacaggcccatgcgtgtgcaaagagaacgttgagggcaaagcctgcgatcgatgtaaacccggattctacaacctcaaggagaagaatcctcggggttgctcagagtgcttttgcttcggggtcagtgacgtgtgtagctccctaagctggcccgttggacaggtgaactctatgtcaggatggctggtcacggatctaatctctccccgaaaaatcccctcgcagcaagatgctcttggtgggagacatcaggtctccatcaataataccgcagtcatgcaaagactcgcccctaagtattattgggcagccccagaggcatatcttggcaacaagctgacagcatttggaggctttctgaagtacactgtaagctatgacatacccgtggagacagtggactctaacttaatgtcccacgccgatgtcatcatcaaaggcaatgggctgacactcagcactcaagctgaagggttgtcccttcagccctatgaggagtatcttaacgtggttaggttggttccagagaactttcaagactttcactctaaacgacagatcgaccgggatcaacttatgacagtactggccaatgtcacccacctacttattagggcgaattacaacagtgccaaaatggctctttaccgtctagaaagcgtgtcgctcgatattgcctcaagcaacgctatcgatttggtggtagccgctgacgtggaacattgcgaatgcccacaggggtatactggcactagctgcgaaagttgcctatcaggatactacagggtggatggcatcctcttcgggggaatttgtcagccttgtgaatgtcatggccacgctgctgagtgcaacgtacacggggtttgcatcgcttgcgcacacaacactacaggagtgcactgcgaacagtgcttgcccggattctacggtgaaccctcaagggggacccccggagactgtcaaccctgtgcttgtcccctaacaatcgcgtcaaataacttctctccaacttgtcacctcaacgatggagatgaggtggtctgtgactggtgtgcccctggttactcgggggcttggtgcgaacgctgtgccgacggctactacggaaaccccacagtgccgggagagagctgcgtcccctgcgactgctccggaaatgtggatccctctgaggcaggacattgcgactctgttaccggcgagtgcctcaagtgtctgggcaacacggacggagcccactgtgagaggtgcgccgacggattctacggggatgccgtgaccgcgaaaaactgtcgtgcgtgcgaatgccacgtgaagggcagccactccgctgtctgtcaccttgagacagggctctgcgactgtaaacccaacgtaacagggcagcagtgtgaccagtgtctccatggttactacggtctagactccgggcatggctgccgcccatgtaactgcagcgtggcaggaagtgtgtcagacggctgtacagatgaagggcagtgtcactgcgtccccggtgtagccggtaaacgatgcgatcggtgcgctcatggcttttacgcttaccaggacggtagttgcactccttgtgattgcccccatacccagaacacgtgtgatccagagaccggcgaatgcgtgtgccctccccacacccaaggagttaagtgcgaagaatgcgaggatggacattggggatacgacgctgaggtgggctgccaggcatgcaactgctccctggtcgggagcacccatcaccgctgtgatgtagtgacaggccactgtcaatgcaaaagcaagtttggcggacgggcttgtgatcagtgcagcttggggtatagagacttccccgactgtgttccctgcgattgcgatctgcgcggtacgagcggcgacgcctgcaaccttgagcaaggtttgtgcggatgcgtcgaagaaactggggcttgcccctgtaaggaaaatgtcttcggaccacagtgcaacgagtgtagagagggcacattcgcattacgggcagacaaccctctgggttgttctccctgtttttgttccggactctcacatctgtgctccgagctcgaggactatgtgcgcacacctgtcacattaggcagcgatcagcctctcctcagggttgtgtcccaaagcaacttgcgtggcacgactgaaggcgtatactaccaggcacctgatttcctcttagacgctgcaaccgtgaggcagcatattcgagccgagccattttattggcgcctgccacaacaattccaaggcgatcaactcatggcctatggagggaaactgaaatactccgtcgcattttactccttggacggggtcggcacctcgaatttcgaaccccaggttctcataaaagggggaaggattcgaaaacaggttatatatatggatgccccagcccctgagaacggggtgcgtcaggagcaagaggtggccatgcgggagaatttttggaagtactttaacagcgttagcgaaaagcctgttacccgcgaggacttcatgtctgtcctatcagatatcgagtatatcctgatcaaagcaagctacgggcagggcctccagcagtcgagaatcagcgacatttctatggaggtggggaggaaagccgagaaactgcatccagaagaggaggtggcaagcctgctggaaaattgtgtgtgcccccctggaacagtggggttttcttgtcaagactgtgctcctggataccaccgcggtaagctgcccgcaggatcagatcgcggaccacgccctttggttgctccctgcgtcccgtgctcatgtaacaaccacagtgacacttgcgatcctaacaccgggaagtgtctgaactgtggggacaacactgcaggtgaccactgtgacgtgtgcacatcagggtattacggcaaggttactggcagcgcttccgattgcgcactttgcgcctgcccacatagtcctccggctagcttcagtccaacctgcgtgcttgaaggcgaccacgatttcaggtgcgatgcctgtttgctgggttatgagggtaaacattgtgaacgctgctcctccagctattatggaaacccacagacgccgggaggttcctgccagaaatgcgactgtaacccacatggctctgtccatggagactgcgaccgcacatctggccagtgtgtctgtcgcctgggagcctcaggccttcggtgcgacgagtgtgagcctagacacatcctcatggagacagactgcgtgtcttgtgacgacgaatgcgtgggtgtgttgctgaatgacctggatgaaatcggggacgcagtgctatctctcaatcttacaggtattattcccgtgccgtatggcatattgtccaatctggaaaataccaccaaatacctccaggaatcccttctcaaagagaacatgcagaaagatttgggcaagattaagctcgagggagtcgccgaggagacagataatctccagaaaaagctgacaaggatgctggccagtacgcagaaggtgaatagggcaaccgaacgaattttcaaagagagccaggacctggctattgcaatcgaacgcctacagatgtccatcactgaaataatggaaaagacaacactcaaccagaccctggacgaagatttcctgctgccgaactccacattacagaatatgcagcaaaacggcacttccctgctggaaatcatgcaaatccgcgatttcacccagctgcaccaaaacgccaccctcgaactgaaggctgccgaggacctcctttctcagatccaggagaattaccaaaagccattagaagaactggaggtcctgaaagaagccgcaagccatgtcctcagcaagcataacaacgagcttaaagctgccgaggccctggtgcgagaagccgaggctaagatgcaggagtctaatcacctgctgctgatggtcaatgcgaatcttcgggagttttctgacaaaaagcttcacgttcaggaggagcagaatctcacatctgaacttatcgtccagggccgtgggttgatcgatgcggctgccgctcaaactgatgccgttcaagacgcactcgagcacctggaggaccatcaagacaaactcctgctctggagtgccaaaatccggcaccatatagatgatctcgttatgcatatgagccagcggaacgcggtcgacctcgtatatagagcagaggaccatgctgccgagtttcaacgactcgcggatgttctgtattccggtctggaaaacattaggaacgtatctttaaacgcaacttcagcagcatatgtgcattacaacatccagtccctgatcgaggaatccgaagagctggcccgtgacgcccatcggaccgtcaccgagacctcactgctttccgagtcgttagtgagtaatgggaaggctgctgtccaacggtcatcacgatttctgaaggagggcaacaacctgtcccggaaattgccaggcatcgcactggaactgtccgagctgagaaataagacgaatagatttcaagaaaacgccgttgaaattactcgccagaccaacgagtctctgctgatactgcgggcaattcccaagggaatcagggacaagggcgctaagaccaaggaactcgcaacctctgcgagtcagtctgctgtaagcacactgcgggatgtagctggcttatcacaggagctcctgaacacatccgctagcctgagtcgagtcaacactaccttgcgagagactcatcaactgttacaagactcaaccatggccaccttactggcaggtcgaaaggtgaaggatgtcgagatccaggccaatctgctgttcgaccgcctgaagcccctgaaaatgctcgaagagaacctgtcacgcaatcttagtgaaatcaaactgttgatttcacaggctcgaaagcaggctgcgagtattaaagtcgccgtctcagccgatagagactgtattcgtgcataccagccccagatcagcagtactaattataatacccttactcttaatgtcaaaacccaagagccagacaacttacttttctacctgggcagcagcaccgcgtcggactttctggcagttgagatgagacggggaagggtcgcatttctgtgggacctaggctcaggctcgaccaggctggaatttcccgatttcccgatcgatgataaccgatggcactccatccacgttgctcgatttggcaacatcggttctctcagtgtgaaagagatgtcatccaaccaaaagtcacccaccaaaacttccaagtcacccggaaccgcaaatgtgttagacgtcaacaactctacgctgatgtttgtcgggggtctggggggacagatcaagaagagccccgctgtgaaagtcacccactttaaaggctgcttaggagaagcctttctaaacggaaagtccataggcttgtggaattacattgagcgcgaaggaaagtgtcgaggctgtttcgggagttcccaaaatgaggacccgtctttccactttgatggctccgggtactcagtcgtggaaaagtctctgccggctacggtgacccagatcattatgttattcaacacatttagccccaacggcctgctcctgtaccttggctcttacggcacaaaggacttcttgtctatagagctttttcggggacgtgtgaaggtgatgactgacctcggctccggtccaataactctacttacagaccggaggtataataacggcacttggtataaaatcgcgtttcagcgcaatcggaagcagggagtcctggctgtgattgacgcttacaatacaagtaacaaagaaaccaaacagggagaaaccccaggcgcttcttcagatttgaatcggctggacaaagatcctatttatgtgggcggtctgccccgaagccgcgttgtccgacgaggggtgactacaaaatcctttgtggggtgtattaagaacctggagatcagcaggtccacattcgatctgctgcggaattcatatggggtcaggaaaggatgccttctcgaacccatccggtccgtctcgtttctcaagggaggctacatagagttaccaccaaaatccttaagcccagagtcagagtggctcgtgaccttcgccactacaaactcatctggcatcattctggccgctctgggaggcgacgtggaaaaaaggggcgatcgcgaggaggcccatgttccctttttcagcgtgatgctaatcggagggaacatcgaagtgcacgttaatcctggcgatggaacagggctgcgcaaggcactactacacgcacccacaggcacatgtagcgacggacaggcccactctatcagtctggtcaggaatcggaggattatcaccgtgcaacttgacgaaaataatcccgtggaaatgaagctgggaactttggtcgagtccaggacaatcaatgtgagcaacctgtacgtggggggtatcccggagggggagggtacctccctcctaacgatgcggagatccttccacggctgcattaaaaacctgatcttcaacctcgagttgctggactttaacagcgctgttggtcacgagcaagtggacctggatacatgctggctgtccgagaggcccaagcttgcccctgatgccgaggactccaagctcctaccggagccaagagcattccctgagcagtgcgtggtggacgccgcattggagtacgtgcctggcgcacatcagttcggtctgacccaaaatagccatttcatcctgccttttaatcaatccgctgtgcgcaaaaagctctccgtagagctgtcaattagaacctttgcctcaagcgggctcatttactacatggcacatcagaaccaggccgactacgcagtgctgcagttacatggcggtcgactccactttatgtttgatttaggcaagggacgaaccaaggtatcgcaccccgctctattaagcgatggcaaatggcatacagtcaagactgactacgttaagaggaaaggatttattactgtggatggtagggagagtcccatggtgacggttgtgggggacggcactatgctggatgtggaaggactgttttacctgggcggtttaccaagccagtaccaagctagaaagatcggaaacattacacactctataccagcctgcattggcgacgtgacagtcaattctaagcagttggacaaagattctcccgtgtccgcatttactgtgaatcgctgctacgccgttgcccaggagggtacatacttcgacggctccggatatgccgctctcgtcaaagaggggtacaaggttcagtccgacgtgaacatcacactagagttccgcacgagcagccagaacggcgttctgttaggcatttcaactgccaaagtggatgcaattggcctggagctggtggatggaaaggttctgtttcatgttaacaacggtgctggacgcattaccgccgcttatgaacctaaaacagcaacggtgctttgcgacggtaagtggcacaccctccaagctaataaatcaaagcacaggatcacacttattgtcgatggcaacgctgtcggggctgagagtccccacacgcaatccacatcagtggacacaaacaaccccatttatgtgggcggttatcccgctggcgtgaaacaaaagtgccttcgcagtcagaccagcttcaggggttgcctgcgcaaactggcactgattaaaagcccccaggtccagagtttcgacttctctcgggcattcgagttgcatggcgtctttctgcattcctgccccggtaccgagtccta

SEQ ID NO: 228072 - DNA, 9365 bp, synthetic construct
  misc_feature 1..9365: note = Description of Artificial Sequence: Synthetic coding sequence
  source 1..9365: mol_type = other DNA
atgcccggagcagcaggtgtgctgctgctgcttctgttgagtggcggtttgggtggagttcaggctcaacggcctcaacagcagcgccagtctcaggcccaccaacagagaggcctttttcctgctgtgttaaacctcgcttccaacgctctcattacaacgaacgctacctgcggggaaaagggccctgaaatgtactgcaagcttgtcgagcatgtgccaggccagcccgtgcgtaaccctcagtgtcgcatctgtaatcaaaactcgagtaatccaaaccagcgacaccccatcacgaatgccattgatggaaagaacacatggtggcaatcaccgagcattaagaatggaatcgaataccattacgttaccataaccttagacctgcagcaagtctttcagatcgcctacgtgatagtcaaagctgccaattcccccagacccggtaattggatcctcgaaagatccttggacgacgtggagtataagccatggcagtatcatgccgtaacagatacagagtgcctcacactgtacaatatttatcccaggactggtccaccatcttacgctaaagatgatgaagtaatctgtacctcattctactcgaagatccaccccctcgagaacggcgaaatccacattagtctcattaatgggagacccagtgctgacgatccgtcccctgaactgctcgagtttactagcgcacgatacatcagattgcgctttcaaagaatacggactctcaatgctgacttaatgatgtttgcacataaggaccccagagagatagatcccatagtcacccggaggtactattactctgttaaagatatctctgtcggtgggatgtgcatctgttatggacatgcccgagcatgcccacttgaccctgcgacaaacaagagtaggtgcgaatgcgagcacaatacgtgcggggatagctgtgatcagtgttgccctgggttccaccaaaagccatggcgcgcaggcacttttctgaccaagacggagtgcgaggcgtgtaattgccatggtaaagcagaggagtgttactatgatgagaacgttgcaagacgcaacttgtctctgaatatccgcggaaagtatataggaggcggagtctgcattaattgcacacagaacaccgcaggaatcaactgcgagacttgcacagatggcttcttcaggcctaaaggagtgagtccaaactacccacgtccatgtcagccttgtcactgtgatcctatcggctcccttaatgaagtatgtgtcaaagacgaaaagcatgccagacgcggactggctcccggtagttgtcattgcaaaactggctttggaggagtcagttgcgaccggtgtgcccgtggttatacaggttatccagactgcaaggcctgtaactgttcaggtttggggtcaaaaaatgaggatccgtgttttggaccatgcatatgcaaggagaatgtggagggcggagactgcagtagatgcaaatccgggttttttaacctccaagaggacaactggaaaggttgtgacgaatgcttttgcagtggagtgtctaataggtgtcagagctcatattggacctatggaaaaattcaggacatgagcgggtggtacctgactgatctgcccggtaggatcagggtggcaccacagcaagacgatctggactcccctcagcagatctctatatcaaacgccgaggcaagacaggcactaccacatagttactactggtcagctcccgctccataccttggaaacaaactgccagcagtggggggacaattgacttttaccatctcatacgatctggaagaggaggaagaagataccgaacgggtcctgcagttaatgatcattcttgaggggaacgacttgtctattagcactgcacaggatgaagtataccttcatccttccgaggagcatactaatgtgctgttgctgaaagaagaaagcttcacaattcacggaactcatttcccggtgaggaggaaggagttcatgactgttctggcaaacctgaaaagggtgcttctgcagattacctatagttttggtatggatgcaatctttcgcctgtcatcagtcaacctggagagcgctgttagttaccctaccgacggaagcatcgcagctgccgttgaagtctgccaatgcccgccaggatataccggctcatcctgcgaatcgtgttggcctaggcacagacgggtgaacggcactatcttcggcggaatctgtgaaccgtgccagtgtttcggacacgccgaatcctgcgacgatgtcaccggagaatgtctcaattgtaaggaccatacggggggtccctattgcgataaatgcttacctggcttttatggtgagcccacaaaaggtacaagtgaggattgtcagccctgtgcttgcccacttaacattccttcaaataacttttctcctacctgccatctggaccgaagccttggacttatctgcgacggatgccccgtcggatacactggcccacgttgtgagcgctgtgccgaaggatattttggccaaccctctgtacccggagggagctgccagccatgccagtgcaacgataacttggatttcagcatccccggatcttgcgacagccttagcgggtcctgcctcatatgtaagcctggaactacaggcaggtattgtgagttatgcgctgacgggtattttggagacgcagtcgacgctaagaattgtcagccatgtcggtgcaatgcaggtggtagcttctcagaggtctgccacagccagaccggacagtgtgagtgcagagcgaacgtacaggggcagcgttgcgataaatgtaaagccggaacttttggccttcagtccgcacgagggtgtgtgccttgcaactgcaacagttttggctctaaatcttttgactgtgaagaaagcggccaatgttggtgccagccaggggtgaccggaaaaaagtgcgacaggtgtgcgcacggttacttcaattttcaggaaggaggttgcacagcatgtgaatgctctcaccttggcaataattgtgaccctaagacggggaggtgcatatgccctccaaacaccattggtgagaaatgttctaaatgtgctcccaatacttggggtcacagcattactaccgggtgtaaggcctgcaactgctcaacggtgggatccctggatttccagtgtaacgttaataccggtcagtgcaactgccaccctaagttctcaggtgctaagtgcacagaatgttcccggggtcattggaattacccacgatgcaacctgtgcgactgcttcctgcctggcactgacgcaacaacttgtgattcggaaacgaagaaatgtagttgctcagatcagacagggcaatgcacatgtaaagtcaacgtcgagggcatacactgtgatcgctgcaggcctggcaaatttgggttggatgcgaagaaccccctcggttgcagcagctgttattgttttggcacaacaacccagtgctccgaggcaaaggggctgatacgaacctgggtgacactcaaggccgaacagaccattctgcccttggtcgacgaagctctgcagcatacaaccacgaagggcatcgtctttcagcaccccgagatcgttgcacacatggatctgatgcgagaggatcttcatctggagcccttctattggaaactccccgaacagttcgaaggcaaaaagctgatggcttatggcggaaaactgaagtatgccatttactttgaggctcgagaagagaccggattttctacatataatcctcaggtgatcattagaggaggcacaccaacccatgccaggatcatcgtgcgccacatggccgctcctcttattggccagctcacacgtcatgaaatcgagatgactgaaaaggaatggaagtattatggggacgacccgcgtgtccaccgcactgtgactcgagaggacttcctggatatcctgtatgacatccactacattctgatcaaagccacctacggaaattttatgcgtcagtctcgcattagtgagatttctatggaggttgcggaacaaggtcgcggtacgaccatgactccccctgcggacttgatagagaaatgtgattgtccgctgggctactctggtctgtcatgtgaagcgtgcctgcctgggttttacagactaaggtcccaacctggaggaaggactcctgggccaacgttgggcacctgtgtgccctgtcaatgcaacggacacagcagcctgtgcgaccctgaaacttctatctgtcagaattgccagcaccacacagctggggatttctgcgaaagatgtgcgctcggctactatggaatcgtcaagggtttgccaaatgactgccagcagtgtgcgtgcccattgatctcgtcctctaataacttctccccttcttgcgtggccgagggcctagacgactatagatgtactgcctgcccgagaggctatgagggccaatactgcgaacgctgcgccccaggttacactggaagccctgggaacccaggcggatcttgtcaggaatgcgaatgtgacccctatggttccctcccagtgccctgtgatcctgtcaccggtttttgcacatgccggcctggtgcaaccggccgaaaatgcgacgggtgcaagcactggcatgcccgagagggttgggagtgcgtattttgcggcgacgagtgcacaggcctgcttctcggggaccttgctaggctcgagcagatggttatgtctatcaacctgactggaccacttccagctccgtacaagatgttgtacggcctcgagaacatgactcaggaactcaagcatctcctctcgccacaacgggcacccgagcgactgattcaattagccgaggggaatctgaatacgctggtcacggagatgaatgagctactcacccgcgctacgaaggtcaccgctgatggagaacagacaggccaggacgccgagaggaccaatactcgtgccaaaagcttgggagaattcatcaaggaattagcgcgtgatgccgaagctgtgaatgagaaggccataaagctcaatgagaccttgggtactagggatgaggcctttgagcggaaccttgagggactacagaaggagatcgatcaaatgatcaaagaacttcggcgaaagaatcttgagactcagaaggagatcgccgaggatgaacttgtcgctgcagaggctctactgaagaaggtgaaaaaactgttcggggaatctcggggagaaaatgaagagatggagaaagatctaagggagaagctcgcagactacaagaacaaagttgatgacgcctgggacttgcttagggaagcgaccgacaaaatcagagaggccaatcggctttttgccgtgaaccagaagaacatgaccgctttagagaaaaagaaagaagctgttgagtccggcaagcgacagatcgagaacactcttaaagaagggaacgacatcctggacgaagcaaaccggctggccgatgagatcaattccatcattgattacgtggaggacatccagacgaagcttcccccaatgtctgaggagctgaacgacaagattgacgatctgagtcaggaaattaaagaccgaaaacttgccgagaaggtttcccaggctgaatcccacgcagcccagctcaatgattcctccgcagttctggatggaattttggacgaagcaaagaatatctctttcaatgccacagctgccttcaaggcatacagcaacataaaagactatatcgacgaagctgaaaaggtggccaaagaggcaaaagatctggcccacgaagccacaaaattggccaccggtccacgaggactgctaaaagaggacgccaagggatgcctgcagaagtcctttaggatcttgaatgaagccaagaaactggccaatgatgtgaaggagaacgaggaccatctgaacggattaaagacccgaattgaaaatgcagacgctaggaatggagatctccttcgcacactaaacgatacgcttgggaaactgtccgctattccaaatgatactgccgctaaactgcaggccgtcaaggacaaggcgaggcaggccaacgacacggcaaaggacgtcctcgcacagatcacggaactgcaccagaatctcgacgggttaaaaaaaaactataataagctcgcagacagcgttgccaagacgaacgctgtagtgaaggatccctctaagaatacggttgcggatgctgatgctaccgtgaagaacctagagcaggaggcggaccgactgattgataagcttaagcctattaaggaattagaggacaatctgaagaaaaatatttctgaaatcaaggaacttatcaaccaggcgcgaaaacaggctaatagcattaaggtgtcggttagtagcgggggagattgcataaggacctacaagcctgaaataaagaagggcagctataacaacattgttgtgaacgtgaagaccgcagtggccgataacctacttttttacctgggaagcgccaaatttatcgattttttggcaattgaaatgcggaaaggcaaggtgtcatttttgtgggacgtgggatcaggcgtcgggagggtggagtatccagacctcaccatcgatgattcttattggtacaggattgttgccagcaggactggcaggaacgggaccatctcagtgagggctctcgacggtccaaaagcttccattgtgccttcaactcatcactccacctcacctccgggttacacgatactcgatgtcgacgctaatgccatgctgtttgtcgggggactcaccggcaagcttaaaaaagcagacgcggttcgagtgatcacgtttacaggctgcatgggtgagacgtattttgacaacaaacccatcggactgtggaattttcgcgagaaagagggggactgcaagggatgcacagtgtcacctcaggtggaagactctgagggaacaatacagtttgacggtgagggttatgccctggtgtcccgccctattcgatggtacccaaacatcagtacggtgatgttcaaattcagaacttttagctccagtgctctactgatgtacctggcaacccgtgatctgcgcgatttcatgagtgttgagctgactgatggacatatcaaggtctcctatgacctggggtctggcatggccagcgtggtctctaatcaaaatcacaatgacggcaagtggaagagtttcacactcagtcgcattcagaagcaagctaacatctctattgtggacatcgacactaatcaagaggagaacattgccacatctagcagcggtaataactttggcctggatctgaaagccgatgacaaaatttacttcggtgggctgccaactctcaggaacctgagcatgaaggcacgtccggaagtaaacctgaagaagtactccggttgtcttaaggacattgagatatcaagaaccccatataatattctctcttcaccggactatgtgggggtaacaaaaggatgcagcctcgaaaacgtgtataccgtgtcctttcctaagcctgggtttgtagaactttctcccgtgccaattgatgtgggaaccgagataaatctgtctttctcaactaagaacgagtccgggatcatcttattgggcagcgggggaactccagcaccacctcgcaggaagcgccgacaaactggacaggcatactacgcgatcctattaaatcgtggtaggcttgaagttcacctttccaccggagccagaaccatgcggaaaatagtaatcaggcctgaacccaatctatttcatgacggccgtgaacacagcgtccatgtggagcgcactcggggaatcttcaccgtgcaggtcgatgagaatcgcaggtacatgcaaaatttgaccgtggaacagccaatagaggtgaagaagctgttcgttgggggagcccctcctgagttccagccgagccccctgcgtaacatcccaccattcgagggttgtatttggaacttggtgattaactcagtgcctatggatttcgcccgacccgtctcctttaaaaacgccgatataggcaggtgtgcacaccaaaagcttagggaagatgaagacggagccgctcccgcagagattgtcattcaaccagagccagtgcccacacctgcgtttcctactcctacaccagtcctgactcatggtccctgcgccgctgagtccgaacccgctctgctaatagggtctaagcagtttgggcttagcagaaactcccatattgctatcgccttcgacgacacgaaggtgaagaataggctcacaattgagctggaagtgcgcaccgaggcggaaagcgggcttttgttttacatggcccgaataaaccatgcagatttcgccacagtgcagctccgcaatggcctgccgtacttttcatatgatttgggatccggagacacccacactatgataccaaccaaaatcaatgacggtcagtggcataagattaagatcatgcgctcaaagcaagagggcatcctctatgtagacggggctagtaatcgcacaatttcccctaagaaagccgatattttggacgtggtcgggatgctgtacgtcggaggccttcctattaattatacgacgcggcgaattggtcctgtgacttattctatcgacgggtgcgtccgaaacctgcacatggccgaggctccggctgatctagagcagcctacatcttctttccacgtggggacatgttttgcgaacgcacagagaggtacttattttgacggcaccgggttcgcaaaagccgtcggcggattcaaggtaggtctggacctgttagtcgaattcgagttcaggactactacaacaaccggcgtgttactgggcattagtagtcaaaaaatggatggcatgggcattgagatgatagatgaaaaactgatgttccatgtggacaatggcgcaggaagattcaccgctgtatatgatgctggtgtgccaggacacctctgtgacggtcagtggcacaaggttaccgctaataagattaaacaccgcatcgagctgaccgtggacggtaatcaggtggaagctcagtcccctaaccccgctagcacctcagccgacactaatgatccggtgtttgtgggaggatttccagatgatctcaaacagtttggactgaccacctccatcccttttcgaggttgcatccggtctcttaagctcacaaaagggacaggaaagcctctggaggtcaatttcgctaaagccctggaactgagaggcgtgcagccagtgtcctgccccgcaaatta

SEQ ID NO: 228073 - DNA, 9368 bp, synthetic construct
  misc_feature 1..9368: note = Description of Artificial Sequence: Synthetic coding sequence
  source 1..9368: mol_type = other DNA
atgccaggcgctgccggagtgctgctgttgctgctgttatccgggggattaggaggcgtgcaggctcagcgccctcaacagcagcgccagtcccaggctcatcagcagaggggtttatttcctgccgtgctaaacctcgccagtaacgctctgataacaacaaacgccacttgcggagaaaagggccctgaaatgtactgcaagctcgtagaacatgtgcccggacagcccgtcagaaatccacaatgtcggatctgtaatcagaactcgagtaacccaaatcagagacaccctattacaaatgcaatagatggcaaaaacacttggtggcagtccccatcaatcaaaaacggcatcgaataccattacgttacaataaccctggacctacagcaggtctttcaaatcgcctacgtaattgttaaggccgcaaatagccctagaccgggaaattggattctggaacggtcactggatgacgtggagtacaagccatggcagtaccatgcagtaaccgatacagaatgtctcacattgtataacatctatcctcgtactgggcctccatcatacgccaaggacgacgaagttatctgtaccagcttttattctaaaatccacccattggagaatggggagattcacatctcattaattaatggtagacccagtgccgatgatccatcacccgagcttctggagttcacatccgcccgatacattcgcctgagattccaaaggatccgcacactaaacgccgacctcatgatgtttgcacacaaggacccaagagaaatcgaccccatagtcacccggcgatattactattcagtgaaagacatctctgttggagggatgtgtatttgctacggccacgcgagagcatgcccactggatcccgctacgaacaaatcccggtgcgaatgtgagcataatacatgtggtgacagttgtgaccagtgttgccccggattccatcaaaagccgtggcgcgcagggactttcctcaccaagacagagtgcgaggcctgcaactgtcacggcaaggctgaagagtgctattatgatgaaaatgtggcacgtcgtaacttgagcctgaatattcgagggaagtatattggcggaggcgtttgtattaactgtacacagaatacagccggtataaactgcgaaacgtgcaccgacgggttttttcggcctaagggggtcagcccaaattacccacggccttgccagccttgccactgtgatccgattggatccctaaatgaggtatgcgtcaaggatgagaagcacgctaggagaggcctggcgccaggttcttgccactgcaagacaggctttggtggggttagttgtgatcgctgtgctagaggttatactggctaccccgactgcaaggcgtgcaactgttctggtctgggtagtaagaatgaagacccatgcttcggtccttgcatctgtaaagaaaacgttgaggggggtgattgtagccggtgcaaaagtggcttcttcaatctgcaggaggataattggaaaggatgcgatgagtgcttttgctcaggagtgtcaaataggtgtcagtccagctactggacttacggaaaaatccaagacatgtctggatggtacctgaccgatctacctggtcgtataagagtggcacctcagcaggatgacctggattctccgcagcagatcagcatcagcaatgcggaagcaaggcaggcactgccgcattcttactactggagcgccccagcaccttacttggggaataagctcccagcagttggtgggcagcttactttcactattagttacgatctagaggaggaagaggaggataccgaacgagtgctgcagctgatgattatccttgagggaaatgatctgtccatctccacagcacaggatgaagtgtaccttcatccatctgaagagcacaccaacgtgctattgttgaaggaggagagtttcaccattcacgggacacattttccagtgcgcagaaaagagttcatgacagttctagcaaaccttaagagagtactgcttcagataacttattcattcgggatggatgctatctttaggcttagtagcgtcaacctggaatccgcggtcagttatccaacagatggatcaatcgccgcagcagtcgaagtatgtcagtgtccgcctggttatactgggtcctcctgcgaatcatgttggccacggcataggcgagtgaacggaactatctttggcggtatctgtgaaccctgtcagtgtttcggtcacgcagagtcttgtgatgatgtaaccggcgagtgcctgaattgtaaggatcatactggcggaccttattgtgataaatgtctcccaggtttctacggcgagccaaccaaaggtaccagcgaggattgccaaccctgtgcttgtcctctgaatatcccttctaataatttcagcccaacatgccacttagaccgaagcctgggcctaatttgcgacgggtgcccagtgggatataccggtcccagatgcgaacgttgcgctgaaggctattttggccagccctctgtgccaggagggtcatgccagccctgccagtgtaacgataacctagacttttccattccaggatcttgcgactcattgtcaggatcctgcctgatatgcaagccgggaaccacagggagatattgtgaactgtgcgctgacggatatttcggcgacgccgtagatgccaaaaattgtcagccatgtcgctgtaacgccggaggctccttcagcgaggtctgccactctcagaccgggcaatgtgagtgtagagccaatgtacagggtcaacgatgcgacaagtgcaaagcaggaacatttggactgcagtcagcccgaggctgcgtgccctgtaattgcaacagtttcgggagcaaatcctttgattgcgaggagagcgggcaatgttggtgccagcctggggttactgggaagaagtgcgatcgctgcgcacatggctacttcaatttccaagaaggaggatgtaccgcatgcgaatgttctcatctggggaataactgcgacccaaagacgggtcgctgcatctgccccccaaatacaattggtgagaagtgcagcaagtgcgcaccaaatacctgggggcattccataactacaggatgtaaggcttgcaattgctcgacggttgggagcctggatttccagtgtaacgtgaacactggccaatgtaactgtcaccctaagttttcgggagctaaatgcaccgaatgctccagaggccattggaactaccctagatgcaacctgtgcgattgtttcctcccaggcaccgacgccacaacatgcgacagcgaaacaaagaagtgtagctgtagtgaccagaccggccaatgtacttgcaaagtgaacgtggaggggattcattgtgaccgctgcagaccgggaaagtttggcctggatgccaaaaatcccctcggctgctcgagttgctattgcttcggtaccactacgcagtgtagcgaagccaagggattgataaggacttgggtgacccttaaggccgaacaaactatcttgcccctggtggacgaggccctccaacatacaaccactaaaggaatcgtcttccaacatcctgagatagtggctcacatggatttgatgagagaagatttacacttggagcctttttattggaaattgcccgaacaatttgagggaaagaagcttatggcctatgggggaaagttaaagtacgctatttactttgaggccagggaagaaacagggttctccacctataatcctcaagtgatcatcaggggaggcactcccactcacgctcgtattattgtcaggcatatggcggcacccctgatcggccagcttacccgtcatgagatcgagatgaccgaaaaggagtggaaatactatggagatgatccacgggttcatcgaaccgtgacccgcgaagactttctggatattctctatgacattcactacatcttgattaaggctacctacggaaacttcatgcgtcagtcccgcatttccgaaataagtatggaagtggctgagcagggtcgaggtactactatgactcctcctgcagatttgatcgaaaagtgcgattgtccgctgggatacagtggtctttcatgtgaagcttgtcttccgggattttaccgacttagaagtcagcccggaggacgcactccgggacccacactcgggacctgcgttccttgtcagtgtaatggtcacagttccctctgcgacccagagactagtatctgccagaattgccagcatcacactgcgggtgacttctgcgagcgctgtgctttgggctattacggaattgtgaaggggcttcccaatgattgtcagcagtgcgcatgccccctgatatcctcgtcaaacaatttttctccaagttgtgtcgccgaaggcctggatgactaccgttgtactgcttgccctaggggatacgagggtcagtactgcgagaggtgcgccccaggctataccggctctccgggtaaccccggaggatcatgccaggaatgcgagtgcgacccatacggtagcttacccgtgccctgcgaccctgtgactggattctgcacctgcagacccggagctaccggcaggaaatgtgacggctgtaagcattggcacgccagagagggatgggagtgtgttttctgcggtgacgaatgcactggcctgctacttggcgacctcgcgagactggaacagatggtgatgtctattaatttgacggggccactaccagccccatataaaatgctgtatggcctggagaacatgactcaggaactgaagcacctgttgtctccacagagggcgccagagcgcttaatccaacttgctgagggaaatcttaacacgctcgtcacagagatgaacgaactgctgactcgcgcaacaaaagttacggcggacggtgagcagacaggccaggacgccgaacgtaccaatacgagggccaagtccctcggagaattcataaaggagcttgccagagatgccgaggccgtcaacgagaaagctatcaaattgaacgaaacactcggaacccgtgacgaggcattcgagcgtaatttagagggtctccaaaaagagattgatcagatgataaaggaattgaggcggaagaatcttgaaacacagaaagagatagccgaggatgaattagtcgccgcagaggccttgctgaagaaggttaagaaattgtttggcgagtcacgaggggaaaatgaagagatggagaaggacctgagggagaaactcgccgattacaagaacaaggtggatgatgcctgggacctgctccgagaagctactgataaaattcgagaagcaaaccgcctctttgcggtcaatcagaagaacatgaccgccctagagaaaaagaaggaagccgtggagagtggcaaacggcaaattgaaaacacactgaaggaaggcaacgatattctggacgaagccaatcgcctcgccgatgaaatcaacagtatcattgattatgtggaggatatccaaacgaagctgccccctatgagtgaggagctcaatgataagattgatgacctctcgcaggagatcaaagatcggaagctcgctgaaaaggttagccaggccgagagccacgccgctcagctgaacgacagttccgctgtgctcgatggaatcctcgatgaagccaagaatatttctttcaatgcaaccgctgcgttcaaggcttattctaacatcaaagattatattgatgaggctgagaaagtcgcgaaagaggctaaagaccttgcccatgaggctacgaagctcgctacaggtcccaggggattgctgaaggaagacgccaaagggtgcctccagaaatccttccggattctgaacgaggccaagaagctcgccaacgatgtgaaggaaaacgaagatcatctgaacggactaaagacccggatcgagaatgctgacgcacggaatggagacttgctcagaaccttgaatgacaccctgggcaagctcagcgcgatccccaacgatacggcagccaagctgcaggcagtgaaggacaaagctcgacaggcaaatgacacagccaaggatgtactggcacaaataaccgagctgcaccagaatctagacggcttgaagaagaactacaacaagctagccgactctgttgccaagactaacgccgtggtcaaagatccctcaaagaacaaaatcgtggcagacgccgacgcaactgtgaaaaatctggaacaggaagcagacagacttatcgataaactcaagcctatcaaggagctagaggacaacttaaaaaaaaacatctccgaaattaaggaactgattaaccaggccagaaagcaggctaacagcattaaagtcagtgtaagctctggcggagattgtataagaacctataagcccgagatcaaaaaaggctcctataacaacattgtagttaacgtgaaaactgcagtggctgacaacctgctgttttacttaggcagtgctaaattcatcgatttcctcgcaatcgagatgaggaagggaaaggtcagtttcctctgggacgtggggtccggtgttggcagagtggagtatccagatttgacaatcgatgattcttattggtatcggattgtggcctccaggaccggccgaaacggcacaatcagtgtgcgtgctctcgatggacctaaggcaagtatcgtgccatctacacaccacagcacttccccacctggatataccatcttagacgtagatgccaatgccatgctcttcgtagggggattgacaggcaaattaaaaaaggcagacgcagtccgggtaataacatttaccggctgtatgggcgagacatatttcgacaataagcctattgggctgtggaattttcgtgagaaagagggcgactgtaaaggatgtacagtgtcgcctcaagtcgaagatagcgaggggactattcaatttgatggtgaggggtatgccctcgttagtcggccaatcaggtggtacccaaacatttctacagtgatgtttaagttcagaaccttcagctcgtccgcacttcttatgtaccttgcaacaagggatttgcgcgactttatgtccgtggagctgacggatggccacattaaggtatcctacgatcttggatccggcatggccagtgtggtgtctaaccagaatcacaatgacggcaaatggaagtcttttaccttatctcggatccagaaacaggctaatatctcgatcgtcgatatcgacacaaatcaggaagaaaacatcgccacctccagttccggaaataatttcggactggacctgaaggcagatgacaaaatctactttggagggctgcctaccttgcgaaatcttagattattcaacaggccagaggtgaatctgaagaagtatagcggctgcttaaaagacattgagatatcccggacaccctacaacatcctttcgtcccctgactatgtcggagttactaagggatgctctctcgagaacgtgtataccgtgagtttccccaaaccagggtttgtcgagttatccccggttccaatcgatgtgggcacagaaatcaacctgagcttttcaaccaagaacgagtctggcattatcttgctgggcagcggaggcaccccagccccacccagacggaagcggcgacagacaggtcaagcctattatgcaatactgctcaatcggggaaggctcgaggtgcacctgagtacgggcgctcgaaccatgcggaaaatcgtgattaggcccgaacccaatctgttccacgacggtcgcgaacattcagtacatgtcgagcggacacggggaattttcactgttcaggtggatgaaaacaggaggtatatgcaaaatttgacagtagagcagccaattgaggtaaaaaagctctttgtggggggagcaccaccagagttccagccgtccccacttcggaacattccaccctttgagggctgcatatggaatctagttatcaattctgtgccgatggattttgcacgcccagtgagcttcaaaaatgctgatatcgggcgatgcgctcaccagaaacttcgggaagacgaagacggcgcagcccctgccgagattgtgatccagcccgaacccgtgcctaccccagccttcccgactccaactccggttctgactcatgggccatgtgctgctgagagcgaacctgccctgcttattggcagtaagcagttcgggctgtctcggaactcccatattgctattgcctttgacgatactaaagttaagaaccggctcacgattgagcttgaggtccgcactgaggcagaaagcggcttactcttttatatggccaggatcaaccacgcagacttcgcgacagtccaactcaggaacggattgccatatttttcttatgatctgggatccggcgacacccacaccatgatacccactaagatcaatgacggccagtggcataaaatcaagattatgcggagcaagcaggaggggatcctgtatgtggacggggcttcgaatcgcaccatcagcccgaaaaaagctgacattctggacgtggtaggcatgctctatgtcggcggacttccaattaactatacaacacgtcgaatcggaccggtgacttactcgattgacggatgcgttcggaacctgcatatggcggaagctcccgcagaccttgaacaacccacttctagctttcacgtgggtacgtgcttcgcaaacgcccagcggggtacatacttcgatggtacagggttcgctaaggccgtggggggattcaaagtggggctcgatctgcttgtcgagttcgagtttcggaccacgactacaaccggagtgctgttaggcatcagcagccagaagatggacggaatggggattgaaatgatcgatgagaagcttatgttccatgtggataacggggctggcaggtttaccgctgtctacgacgccggagtgccagggcacctttgtgacgggcagtggcataaagtcacagctaacaagatcaaacatagaattgagctcacagtggacggaaatcaggtggaggcccagagtccaaatccggcatctacctccgcagacacgaacgaccctgtgttcgtggggggttttcctgatgatctaaagcaattcgggctgacaacaagcattcccttccgaggctgtattcggtccctgaagctgaccaagggcacggggaaaccattggaagtgaactttgctaaggccctggagctccgtggcgtccagccagtgtcctgtccggctaatta

SEQ ID NO: 228074 - DNA, 9368 bp, synthetic construct
  misc_feature 1..9368: note = Description of Artificial Sequence: Synthetic coding sequence
  source 1..9368: mol_type = other DNA
atgcctggagccgctggcgtgctgttacttctgctcctttccggcggactcgggggtgtgcaagcccagcggcctcaacagcaaagacagagccaagcacatcagcaaagagggctgttccccgctgtgctcaacctggcttctaacgccctgatcacaacaaacgccacttgtggggaaaaagggccagaaatgtactgtaagttagtggagcacgttcccggacagccggtgaggaatccccaatgcaggatatgtaaccagaatagctccaatccgaatcagcggcatcccattacaaatgctatcgacggaaaaaatacatggtggcagtctccgtctatcaagaacggcatagagtaccactatgtcactattacgcttgatctacagcaggttttccaaatcgcttacgtgatagtgaaggctgccaactctccaagacccggaaattggattctggaacggtcactggacgacgtcgagtacaagccatggcagtatcatgctgtgacggacactgagtgcctgacactgtataatatatatcccaggaccgggcctccatcctatgcgaaagatgacgaagtcatatgcacatccttttatagtaaaatacacccactggaaaatggggaaatccacatctcactgatcaatggacgacccagcgccgacgatccatcccctgagctcctggagttcaccagtgcgcgatacataaggctgcgcttccagaggatccgcacattgaacgccgaccttatgatgtttgcacacaaagacccaagagaaatagatcctattgtaacccggcgttactattactcagtcaaggacataagcgttggaggtatgtgtatttgttacgggcacgcaagggcatgccccctggatcccgcaactaacaagtcccggtgtgaatgcgagcataacacctgtggggactcctgtgaccagtgctgccctggatttcatcagaaaccatggcgcgcaggcacatttctcactaagacggaatgtgaggcctgtaattgccatggtaaagcggaggaatgctattatgatgagaacgtggcccgaagaaatctatccctgaatatcagaggaaagtacataggaggtggcgtgtgtattaactgcactcaaaacactgcgggtatcaactgcgagacctgtactgacggattctttagacctaaaggagtgtcccccaactacccaaggccgtgtcagccatgccactgtgatccgatcggtagtctcaacgaagtgtgtgtgaaagacgaaaaacatgctcgtagaggtcttgccccagggtcctgtcactgcaagaccggatttggaggcgtgtcctgcgatcggtgcgcgcgtggatacacgggctatcctgattgcaaggcttgcaactgttcagggcttgggtctaaaaatgaggacccatgttttggtccttgcatttgcaaggagaacgttgagggcggagactgctcacggtgtaagagcgggtttttcaatctccaggaggacaactggaaaggctgtgatgagtgtttttgtagcggtgtatctaaccgatgccagagctcttactggacttatggaaagattcaagacatgtccggatggtatttgacagatctgcctggtcgaatacgggtggctccccagcaagacgacttggatagtccacagcagatctcaattagcaacgcagaggccaggcaggctctgccccactcatattactggtccgcccctgccccatatctcggcaataagcttccagctgttggaggccaacttacgtttactatctcctacgacctggaagaagaagaggaggacacagaaagggtgctacagctgatgattatactcgagggaaacgatctgtccatttctactgcgcaggatgaggtctatctgcacccctctgaggaacacacgaatgtgctcctcctgaaagaggagtcattcacaattcatgggacacacttccccgtaaggcggaaggagttcatgaccgtgttggcaaacctaaagcgggttctcctgcagattacgtacagctttggaatggacgcaatcttccgcctaagcagcgttaatttagagtcagcagtatcctatccaactgacggttctattgcggctgctgtggaggtctgccagtgccctcccggatatactggctcttcttgcgaatcttgttggcctcggcacagacgcgtgaatggtacaatattcggtgggatttgcgagccctgtcagtgctttggccatgccgagagctgcgacgatgtgaccggggagtgtctgaactgtaaggaccacaccgggggaccgtattgtgacaagtgccttcctggattttatggtgagcctactaaaggcacatcagaggactgtcagccctgcgcgtgtcccctgaacattcctagtaacaactttagcccaacatgccatctcgatcggtcattaggactgatttgtgacggctgccctgtgggatatacggggccacggtgcgagcggtgcgctgaaggttacttcggccagccttctgtaccgggagggagttgccagccatgtcagtgcaacgataacttagacttctctatcccaggctcttgtgactccttatccggcagctgcttgatctgtaagcccggaacaaccggaaggtactgtgagctatgcgcagatggttacttcggcgatgccgtggatgcgaagaattgccagccttgtcggtgcaatgcaggcggttcgttcagcgaggtgtgccacagccagacgggtcaatgtgagtgccgagcaaatgtgcagggccagcggtgtgataaatgcaaagcaggcacatttgggctgcagagtgcgaggggctgcgttccttgtaactgtaattcctttggatcaaagagcttcgactgtgaagagagcggccagtgctggtgtcagcccggtgtgaccgggaagaaatgcgatagatgcgctcacgggtactttaactttcaagaagggggttgcacagcttgcgagtgcagtcacctgggaaacaactgtgatcctaagaccggaagatgcatttgccccccaaatacaatcggcgagaaatgtagcaaatgtgcgcctaatacctgggggcacagcatcacaactggttgtaaagcctgcaactgttccacagtgggatctcttgattttcagtgcaacgtgaatactggtcagtgtaactgtcacccaaaatttagcggggcaaaatgcaccgaatgtagccgcggacactggaactaccccaggtgtaacctgtgtgattgctttcttcctggaacggacgccacaacatgtgattctgaaacgaagaaatgctcttgcagcgaccagaccgggcagtgtacctgcaaggtcaacgtcgaggggatacactgcgacaggtgcaggccaggtaaattcgggctggacgccaagaaccctctgggctgttcatcctgctactgcttcggcacgactacgcagtgtagtgaagcgaaaggcctcattcggacatgggtgaccctgaaggccgaacagactatcctcccgctggttgacgaggcattacagcacacaacgacgaaggggatcgtgttccagcaccctgagattgttgctcacatggacctcatgcgcgaggacctccacctagaaccattttactggaagctgcctgaacaatttgaggggaagaaacttatggcctatggaggcaaacttaaatacgcaatttattttgaggcgagagaggagacaggcttttctacttacaaccctcaagtgatcatcagaggcggtacacccacccacgcccgaataattgtgcgtcacatggcagcacctttgataggacagcttactaggcacgaaattgaaatgacggaaaaagaatggaagtactacggggatgatccgagagtgcacagaactgtcacaagggaggattttcttgacatcttatacgatattcattatatcttgatcaaggcaacctacggaaattttatgcggcagtcgcgcatttcagaaataagtatggaggtggctgaacaggggcgaggaaccactatgacaccgccagcagatttgattgagaagtgtgactgccccctcggctacagcgggctgtcttgtgaggcctgcctgccgggtttctaccgactgcgaagccagccaggcggacggactcccggtcctacattggggacctgtgtcccctgccagtgcaatggccattcctctctttgcgacccagagacaagcatttgtcagaactgccaacatcatacagccggtgatttctgtgaacgatgcgccctaggctactatgggatcgttaaaggcctgcctaatgattgccagcagtgtgcatgtccccttatctcaagcagtaataacttcagcccgagctgtgttgccgagggactggatgactatcgctgtaccgcttgccctcgtgggtatgaaggacagtactgtgagcgctgcgcacctggctacactggctcccccggaaatcccggtggatcatgccaagagtgtgaatgcgatccctatggctccctaccagtaccctgcgatccggtgacaggattttgcacctgtcggcctggcgctaccgggcgaaagtgtgacgggtgcaaacattggcacgctagagaaggctgggagtgcgtcttctgcggggatgagtgcacagggctcttgcttggcgacttggctcggctcgagcagatggtgatgagcatcaatctgacaggtcccttgccagctccctataagatgctttacggcttggaaaatatgactcaggagttaaaacacctgctctccccgcagagagcccctgaaaggctgatccagctagcggagggcaatctgaatacgcttgttaccgagatgaatgagttgctgacacgggcaacaaaggtcacggccgacggagagcagaccggccaggatgccgagcgaaccaacacacgggctaaatcattgggggagtttataaaggaactagcaagagatgccgaagctgttaacgagaaagctatcaagctgaacgaaactcttgggactagggacgaggcttttgaaaggaacctggaaggactgcagaaagaaatagatcagatgatcaaagaactgagacgaaaaaatttggaaacccaaaaggagattgcagaggacgagcttgtcgccgcagaggcccttctgaaaaaagtgaagaaactatttggggagtcccggggtgaaaacgaggagatggagaaagatcttcgggagaagttggcagattacaagaacaaagtcgatgacgcttgggacctgcttcgtgaggctacagataagatcagagaggccaatcggctttttgcggttaatcagaagaacatgaccgcacttgaaaagaagaaagaggcggtggagagcggcaagcgccagattgaaaataccctgaaggaaggtaatgacattctcgacgaagcgaacagattggcagacgaaatcaattcaataatcgattacgttgaagatattcagacaaaactgcctccgatgtcggaagaattgaacgataaaatcgacgacctgtctcaagagatcaaggataggaagctggctgaaaaggtgtctcaggccgagagccatgcggctcagcttaacgatagctctgctgttttggacggcattttagacgaagctaagaatatctcctttaacgctacagcagctttcaaggcctactcaaacatcaaagactatatcgacgaagccgaaaaagtggcaaaagaggcaaaagatttagcccacgaagcaactaagcttgctaccggcccacggggacttctgaaggaggatgccaaagggtgcctccagaaatcgttccgaatcctgaatgaagccaaaaaactggctaatgacgtcaaggagaatgaggatcacctgaacggtctgaaaaccagaatcgagaatgctgacgcaagaaacggtgatcttctgaggaccctcaacgacactttgggaaagctttcggctatcccgaacgacactgcagctaagctccaggcagtcaaggacaaagcccgtcaagccaacgatacagctaaagacgtgttagcccagatcactgagctgcatcagaacctggacggactcaaaaagaattataataagctggcagattcagtcgccaagacaaacgcagtggtgaaagatcctagtaaaaataaaattatcgctgacgctgacgcgactgttaagaatctcgaacaagaggctgatcgcttgatcgacaagctaaagccaattaaggaactcgaggataacctcaagaaaaacatcagtgaaattaaagagttaattaaccaggctcggaagcaggccaacagtatcaaggtctccgtctctagtggcggtgactgcattagaacatataagcctgagatcaaaaaaggctcatataacaatatcgttgtgaatgtgaaaacggctgttgctgacaatctgcttttctatctgggatccgctaaattcatcgatttccttgccattgaaatgcggaaagggaaagtttcgttcctgtgggacgtaggttctggggtgggacgggttgagtatcccgatttgactattgacgacagctattggtatagaattgtggccagcaggactggccgaaatgggactatttcagtgcgcgctctggacgggcctaaagcctccatcgtgccttctactcaccactccacgtcgcctccaggctacaccatcctggacgttgatgccaacgccatgttatttgtgggcggactgacaggcaaactgaaaaaggctgacgccgtgagagtgattacatttacaggctgtatgggggaaacctacttcgacaataaaccaatcgggctgtggaacttccgagaaaaagagggcgactgcaaggggtgtacagtgagcccccaggtggaggattctgaaggaaccatccagttcgatggggagggatatgctctggtcagtcggcctatcagatggtacccaaacattagcacagtgatgttcaagttccggactttttcttcttcagcattgctcatgtatctggcgaccagagatttaagagattttatgtctgtcgagctgacggacggacatatcaaagtgtcctacgatctggggtcgggaatggcatcagtcgtatcaaaccaaaaccacaatgatgggaaatggaaaagcttcaccctttccagaatccagaagcaagctaacattagcatagtggatatcgatacaaatcaggaggaaaacatcgcaacatcctctagtggcaacaatttcggcctggatctcaaagccgatgataaaatatacttcggtggactccccacgctccgaaatttgtcaatgaaagccaggcctgaagtgaacctcaagaaatatagtggatgtttgaaggacattgaaatctctcgtacaccgtataacattctatcatcacccgattacgtgggtgtaaccaagggctgctctttggaaaatgtatacactgtctctttcccaaaacctggtttcgtggaactctccccagtccccatagatgtgggcacggagatcaacctaagcttttccacaaaaaacgagtccggtatcatcctgttggggtctggagggactccagcacctcctcgaaggaaaaggcggcagaccgggcaggcgtattacgctattcttctgaatcgcggacgcctcgaagtacacctgagtacaggcgcacggacaatgcgcaaaattgtgatccgtcccgaacccaatctgtttcacgatggaagagagcactcagtccacgtcgaaagaacgcgagggatcttcaccgtgcaggttgacgagaaccggaggtacatgcaaaatctcactgtcgagcagcccatagaggtaaaaaagctatttgtgggcggtgcaccccctgagttccagcctagtccattgcgcaacatacccccattcgaaggatgtatctggaatctggtgataaattctgttccaatggattttgcacggccagtgtctttcaaaaacgcagacataggcaggtgcgctcaccagaagctgcgtgaagacgaagatggcgcagcccctgctgagattgtcatacaaccagagccagtgccaacaccagccttccccacccccacgccggttctgacccatgggccatgtgctgcggagagcgaacccgcactgttgatcgggtctaaacagtttggtttgagcagaaatagtcatatcgctattgcattcgatgacacaaaagtcaagaatcgcctgactattgagttggaggtgcgcaccgaggcagaaagcggtctgcttttttatatggcacggatcaatcatgccgacttcgctaccgtgcagctccggaatggtctgccttatttcagctatgacctgggatcaggtgatacacacaccatgattcctacaaagattaacgacggacagtggcataaaataaagatcatgagaagcaaacaggagggtatattgtatgtggatggggcaagtaatagaaccattagtccaaaaaaggcggatattctggacgtggtgggcatgctatatgtggggggactccctatcaattacacaactagacggattggaccagttacctatagtatagatgggtgcgtaaggaacctacatatggctgaagcccctgccgacctggagcagccaacatcttccttccacgtaggcacatgttttgctaatgctcaacgcggaacctatttcgacggtactggctttgcaaaagcagttggcggattcaaagtgggtctcgatctattagtggaatttgagtttagaaccacaaccaccaccggagttctcttgggcatctcttctcagaagatggatggcatgggaatcgagatgattgacgagaaactgatgttccatgttgacaacggggctggccgttttacagcagtgtacgatgcaggcgtgcccggacatttgtgtgacggacagtggcataaggtcactgctaataagataaaacacaggatcgaattaacagtggatggaaatcaggttgaagcacagtccccaaatcctgccagtaccagcgcagacactaatgatcccgtatttgtcgggggtttcccagacgatctgaagcaatttgggcttaccacctctatcccatttcgcggatgtattcggagcctgaaattgacaaagggtacaggcaagcccctggaggtgaatttcgctaaagcgctggaactgcgcggtgtgcagccggtgagctgccccgctaacta

SEQ ID NO: 228075 - DNA, 3387 bp, synthetic construct
  misc_feature 1..3387: note = Description of Artificial Sequence: Synthetic coding sequence
  source 1..3387: mol_type = other DNA
aaaaaactggctaatgacgtaaaagaaaacgaagaccacctgaacgggttaaaaacgcgcattgagaacgccgatgctcgcaatggtgaccttcttcgtaccctgaacgacacattgggcaagttatctgcaattcctaacgacaccgcggctaagctgcaagccgtgaaggacaaagcacggcaagccaacgatacagcaaaggatgttctagcacagatcaccgaactccaccagaacctggatggcttgaaaaaaaattacaataagctggcggacagcgtggcaaaaaccaacgctgtggtcaaggacccatccaaaaataccgttgctgacgctgacgctaccgtcaaaaatctggaacaggaagcagacagactcattgacaaacttaagcccatcaaggagttagaggataatctgaaaaaaaatatttctgagatcaaagagctaattaatcaggcacgcaaacaggcaaacagtatcaaagtgtctgttagttctgggggtgactgcatcaggacgtacaagccagagataaagaagggatcatataataatattgtcgtaaatgttaagacagccgtcgctgacaatttgctgttctacctgggttccgccaagtttattgatttcctggccatcgagatgagaaaagggaaggtgagttttctgtgggatgtggggagcggtgttgggagagtggaatatccagacctgacgatagacgactcctactggtaccgtattgttgcatccagaactggacgtaatgggacaatttccgtacgggctttggacggtcccaaggcgagcattgtccccagcacccatcatagcacctcacccccagggtatacgattctggacgttgatgctaacgcaatgttatttgtgggcggtctgaccggtaagctcaaaaaagcagacgccgttagggtgatcacttttacagggtgcatgggcgagacctatttcgacaacaaaccaatcggcctttggaactttcgagagaaagagggcgattgcaaggggtgtacagtgagccctcaagtggaggacagcgagggaaccatacagttcgacggtgaagggtatgcacttgtgagccgtcctatcagatggtatcccaatattagcactgtgatgtttaagttccgaaccttcagttccagtgctttgctgatgtacctggcaaccagggacctccgggacttcatgtctgtagagctgacggatgggcacataaaggtttcatacgatctgggaagcgggatggcgtctgtcgtgtctaaccaaaatcacaacgatggtaagtggaagtcatttacccttagcagaatacagaagcaggccaatatttccatcgtagacattgacacgaatcaagaagagaacattgccacctccagctcgggcaataactttggcttggatctcaaggcagatgataagatttactttgggggtctgcctacccttaggaatctcagcatgaaggccaggcccgaagtgaatcttaagaagtattctggttgtctgaaggatatcgaaatctccagaactccctataatatcctctccagccccgactatgtaggtgtgaccaaagggtgttcccttgagaatgtctacactgtgagcttccccaagcccggttttgtagagctgtccccggtcccaatagatgttgggacagagatcaacctgtccttcagcaccaagaacgagtccggaattatcctcctgggctccggcggaacacccgctccacctagacggaaacgacggcagaccggacaggcatactacgccattctacttaatcggggacgcctggaagtccacctgtcaaccggcgctcggacgatgagaaagattgtgattcggcctgaacctaacttattccatgatggaagagagcatagtgtccatgtcgagcggactcgaggaatctttacagtccaggttgatgagaatcggagatatatgcaaaatttaaccgtcgagcaacccatcgaagtgaagaagctattcgttggtggcgcacccccagagttccaacccagtccactgcggaacatacccccattcgaaggatgcatctggaacctggtcatcaacagtgtgcccatggactttgctcgcccagtatcttttaaaaacgcagacatcggacggtgtgcccaccagaagctgagggaagacgaggatggcgctgctcccgctgagatagtgatccaacctgagccagtgccaacccctgccttcccaacgcccactcctgtgttgacccacggcccttgcgcagccgagagtgagcccgcactcttaattggttccaagcagtttgggctgtcgcgcaattctcacattgccatagctttcgacgacacaaaagtaaagaacagattgaccatcgagcttgaagttcgcactgaagctgagtccggcctgctattctacatggcccgtattaaccacgccgacttcgcaacggtacagttgcgaaacgggttgccttactttagctatgatttgggtagcggagacactcatacaatgataccaaccaaaattaacgatggtcaatggcataaaatcaaaataatgcgctctaagcaggagggaatattgtacgttgatggagcgagcaataggaccatttcacccaagaaagctgatattcttgatgtagtcggaatgttgtatgtcggcggactgcccatcaactacacaacccggagaatagggccagtcacgtactccattgacggatgcgtgcgtaatttacatatggccgaagcgcctgccgatctggaacagcctacaagtagctttcatgtgggcacctgcttcgccaatgcacagcggggaacgtatttcgatggtacaggtttcgctaaggccgttggaggattcaaggttggactggatttactggttgagttcgagttcaggaccactactactaccggagtgcttctggggatctctagccagaagatggatggtatgggcattgagatgatagatgagaaactgatgtttcacgtggataacggcgctgggaggtttacagcagtgtacgatgccggagttccaggccacttatgcgacggtcagtggcacaaagtgactgccaataagatcaaacatcgtatcgaactgactgtggatggaaatcaggttgaggctcaaagccccaaccccgcttcgactagtgccgacacaaatgatccagtttttgtgggcggtttccccgacgaccttaagcagtttggcttgacaacatctatcccatttcggggttgtatacgttcgctgaaactcactaaaggcacagcctcacattggcgactgattctgcctcgtccctggaactag

SEQ ID NO: 228076 - DNA, 5174 bp, synthetic construct
  misc_feature 1..5174: note = Description of Artificial Sequence: Synthetic coding sequence
  source 1..5174: mol_type = other DNA
atgccccctgcagtcaggaggtctgcatgttctatgggatggctttggatcttcggcgcagcgttagggcagtgtctcggctacagctcacagcagcagagggtaccttttctgcaacctcccggacagtctcaactgcaggccagctatgtggaattccggcctagccaggggtgtagtcctggttactacagggatcataaaggcttatatactggacggtgcgttccctgtaactgcaatggccactcgaatcagtgtcaggacggttcgggcatctgcgtcaattgtcaacacaacacagcaggggaacattgtgagcgatgccaggagggatattatggcaacgcagtgcacggcagttgccgtgcgtgcccgtgcccacacacgaactcgttcgccaccggctgcgtcgtgaacggtggagacgtgcggtgttcttgcaaagcagggtatacaggtactcagtgtgaacgctgcgcccctggatactttggtaatccgcagaaattcggcggttcatgccagccttgctcctgtaattcaaatggccagctcgggtcttgccacccactaacgggcgattgtattaaccaggaaccgaaggactcatcacccgctgaggaatgcgacgactgcgactcttgcgtgatgacacttttgaatgacttggcaaccatgggtgagcagttgcggcttgttaagagtcagctgcagggcctgagcgccagcgctggactgctggagcagatgaggcacatggagactcaggcaaaagacctgcgcaatcagttgcttaactataggtctgccatttcaaatcacggatcaaagatagagggcttagagcgcgaactgaccgacctgaaccaggagtttgagacccttcaggagaaagcccaggtaaacagtcgcaaggcgcagaccctcaataacaacgtgaacagggccacgcaatctgcaaaagaattagacgttaagatcaaaaacgttattcggaacgtgcacattctgcttaagcaaataagcggcaccgatggggaggggaataatgtgcccagcggagatttctccagggagtgggcagaagcccaaagaatgatgagggaattaaggaaccgcaacttcggcaagcatcttcgggaagccgaggctgataagcgcgagagccagctcctccttaatagaatcaggacctggcagaagacacatcagggagagaataacggactggccaactcaattcgggattccctaaatgagtatgaggcgaaattgtcagacctacgagctcgcctccaagaggctgctgctcaggccaagcaggccaatggactcaatcaggagaatgagcgagccctgggggcaatccagcgtcaggttaaggaaattaacagtctgcagagtgatttcactaaatacctgactacagccgatagtagtctgctgcagacgaatatagccctgcagcttatggagaagagtcaaaaggagtacgaaaaactagctgcaagtttgaacgaggctcgtcaggagttgtcggataaagtccgcgaacttagccgcagtgcaggaaaaaccagtctggtggaggaagcagagaaacacgctagaagtttgcaggagctggcgaaacagctggaggaaattaaacggaacgcctccggcgacgaattggtgcgatgtgcagttgacgcagcaacagcctacgaaaacatcctgaacgcaataaaagctgcggaagatgcagcaaatcgagcagcctcagcatccgaaagcgcactgcaaactgtcattaaagaagacctgcctaggaaagctaagacactgtcaagcaacagcgataagttgctgaatgaagcaaaaatgacgcagaagaaattgaaacaagaggtttctccagccctcaataacctgcaacagacgctgaatatagttaccgtgcagaaggaggtcatcgataccaatctgacaacccttagggatggactacatggcattcaaaggggcgatattgatgcaatgatctcttctgctaaaagcatggtgcgcaaagccaatgacattaccgacgaagtcctggatgggcttaatccgatccagactgacgtcgaaagaatcaaggatacctatggacgaacccagaacgaggactttaagaaggcgttgacagatgcggataactctgtgaacaaattaactaacaaactgcctgatctttggcgaaagatcgagagcattaaccaacagctgctgcctttgggtaacatttccgataacatggaccgcatccgggagcttattcaacaggccagagacgcagccagtaaggtggctgtgcctatgcggttcaacggcaagtccggagtcgaagttcgactccccaacgacctggaagacttgaaaggctatacttccctgtccctgttccttcagcgccctaactccagagagaatggagggacagaaaatatgttcgtgatgtacctggggaacaaagacgcatcacgcgactacattggaatggccgtggtggacgggcagctgacatgcgtttacaacctgggagatcgcgaggcagagcttcaagtggaccagatccttactaagtctgaaactaaagaggccgtcatggacagagtgaagttccagagaatctaccagtttgcaaggctcaactacactaaaggtgccacctcaagtaagccagagacgcctggggtttacgacatggatgggcgaaactccaacacgctgttgaaccttgacccagagaacgtggttttctacgtggggggttatcccccagactttaaactaccttcgaggctctcttttcccccatacaagggctgtatcgagcttgacgacttgaacgaaaatgtgctctccctttataatttcaagaaaacatttaatcttaacaccacagaggtggaaccgtgcaggcggcgtaaagaggagagtgataagaattacttcgaggggacaggttacgctagagtgccaacacagccgcacgcgccaattccaaccttcggccaaacgattcaaactactgtcgataggggcctgctattctttgctgagaacggagacagattcatcagcctgaatatagaggatggcaagcttatggtgcgctataagttgaacagtgagctacccaaggagcgcggagtaggggatgctataaataatggacgagaccacagcatccagattaagatcggaaagctgcagaagaggatgtggataaatgttgatgtgcagaatacgatcattgacggggaggtgttcgattttagcacttattaccttgggggtatccctattgctattagggagcgttttaacatttctactcccgcatttcgcggttgcatgaaaaaccttaaaaagacatcaggtgtggtgcgactcaatgataccgtgggtgttacaaagaagtgcagcgaagactggaaattagtgaggtccgctagcttttcacgtggtggtcagctctcctttactgacttgggactcccaccaaccgaccaccttcaggcctctttcggattccagacattccaaccaagcggaatactcctcgatcaccagacatggacacgcaatctgcaggtgacccttgaggacggatacatcgagttaagtacaagcgactccggctcaccgatctttaagtcgccacagacgtatatggacggactgctccattacgtgtctgtaattagtgacaatagtggattacgattgctgatcgatgaccagctccttcgtaattctaagcgacttaagcatatttcatcctcccgccagtccctcagactggggggatctaacttcgagggatgcatttctaatgttttcgtccagagactctccttgtccccagaagttctggatctgacttccaacagcttaaagcgggacgtctctctggggggatgtagcctcaataaacccccatttctgatgttgctgaagggatccacccggtttaataagactaagacctttagaattaaccagctgctccaggatacgccagtcgccagtccacggagcgttaaggtctggcaagacgcctgctcaccgctcccgaagacacaggcgaaccatggagccctgcagtttggggatatcccaactagtcatctgttatttaagctcccacaagagttgcttaagcctagatctcagtttgccgttgatatgcagactacctccagccgaggactggtgtttcacactgggaccaagaattctttcatggcactgtatctctctaagggcaggcttgtgttcgcactcgggactgacggcaagaagttgcgcatcaaatccaaggagaagtgtaacgatggcaagtggcacactgtggtctttggccacgacggagaaaagggaagactggtggtggatggtcttagggctcgggaaggcagcttgccaggtaactcaactatctcaatccgagccccagtttacttgggcagcccaccgtctggtaaacccaagagcctccctacaaacagtttcgtcgggtgcctgaaaaacttccagctcgactcaaaacctctctatactccctcttctagctttggcgtgagctcgtgcctggggggacctctcgagaagggaatctattttagtgaggaggggggacatgtggtgttagcgcattccgtgctgctgggcccagagttcaaactagtttttagcatacgaccgaggagcctgaccggcattctaatccacatagggagtcagcccggaaaacatctgtgcgtgtatttagaagctggcaaggtgacggcatctatggattctggcgcaggtggaacatctactagcgtgacaccaaaacagagcttgtgcgacggccagtggcattccgttgcagtcactatcaaacagcacatcttacaccttgagctggatacggactcctcctacactgccggacaaatccctttccctcctgcctctactcaagaacctctccatcttggcggagcaccagccaacctcacgactctgcgcatacccgtgtggaagagtttctttggatgcctgaggaatatccatgtgaatcatatccccgtccctgtgacagaagccctggaggtccagggccctgtcagcctcaacggttgtcctgatcaata

SEQ ID NO: 228077 - DNA, 10001 bp, synthetic construct
  misc_feature 1..10001: note = Description of Artificial Sequence: Synthetic coding sequence
  source 1..10001: mol_type = other DNA
atggccgctgccgcaaggcccaggggtagagcactgggaccagtcctaccacctacacctttgctactgctggtgctgagggtactccccgcatgcggtgcaacggccagggatcctggagctgccgctggtctgagcctccaccccacctatttcaatttggccgaggctgcacggatttgggctaccgctacctgcggcgaaagggggcctggcgagggcaggccccagccggaactgtactgtaaattggtgggaggccctaccgcccctgggtccgggcatactattcaggggcagttctgcgactactgcaattccgaagacccgcgtaaagcccatcctgtgaccaatgcaattgatggctccgagcggtggtggcagagcccacccctcagctccggcacacaatataaccgggtcaacctcactctggacttgggacaactgttccacgtggcatatatcttaatcaagttcgccaactcacctcggccagacttatgggtactcgaaagatccgtggacttcgggagcacatactccccgtggcagtacttcgcccattcaaaagtagattgtcttaaagagtttgggcgagaggccaatatggctgtgacacgcgacgacgatgtgctctgcgttactgagtatagcaggatcgtccccctggaaaatggcgaggtggtggtcagcctgataaacggaagaccaggagcaaagaactttacattctctcataccttacgcgagtttaccaaggcaactaatatccgactgcggttcctccggactaatactcttctcggacatctgatcagcaaagcacaacgggacccaaccgtgacccgacggtactactattctatcaaagatatttctatcggcggtcaatgcgtctgtaacggacatgccgaagtgtgcaatataaacaaccccgagaagttgtttcgttgcgagtgtcagcaccacacctgcggcgaaacatgcgacagatgctgtaccggttacaaccagcggagatggcggccagcagcttgggaacagagccatgagtgcgaagcctgtaattgtcatggccacgcctccaactgctactacgatcccgacgttgaacgacagcaggccagtctgaatactcagggtatttatgcaggaggaggagtgtgcatcaactgccaacacaacaccgccggtgtcaactgcgagcagtgtgccaagggctattatcgcccttacggagtgccagtggatgctcccgatggatgtataccatgttcttgtgaccctgagcacgccgacggctgcgagcagggcagtggacgctgccattgcaagccgaacttccacggtgacaattgcgagaagtgcgctattgggtattacaattttcctttctgcctgcgaatcccaatcttccctgttagcacaccttcaagcgaagacccagtggcaggggatataaaagggtgtgattgcaacctcgagggagtgttgcccgagatctgcgatgcccacggacggtgtctgtgtcgcccaggtgtcgagggtccgagatgtgatacctgccgctctggcttctactcctttcctatttgtcaggcgtgctggtgttccgccctcggcagttatcagatgccctgctcttcggtgactggccaatgtgaatgccgaccaggcgtgactgggcagagatgcgatcggtgtctgagcggagcctacgatttcccccactgtcagggctccagcagtgcatgtgaccctgccggtaccataaactctaacctgggctattgtcagtgcaaactccacgtcgaagggcctacttgtagcagatgtaagctgctttattggaacttagacaaggagaatccctccgggtgtagtgagtgtaagtgtcacaaagctgggactgtctccggcacaggcgagtgtcggcagggcgatggcgactgccattgtaagagccacgtgggcggtgactcttgtgacacttgcgaggacgggtactttgcattggaaaaatctaactacttcggatgccagggctgtcaatgcgacatcggaggcgctctctcatccatgtgttcgggaccctcaggcgtgtgtcagtgccgggaacatgttgtaggtaaggtgtgtcagaggcccgagaacaattactacttccccgacctacatcatatgaagtatgaaatcgaggatggcagcacgccaaacggcagagatctgcggtttggattcgacccactggcctttcctgagttttcttggagaggatacgctcagatgacatccgtgcagaacgacgtaaggatcaccctcaacgtcggaaaatcctctggatctctctttcgcgtcatcctacgctatgtgaacccgggaactgaggcagtgtctggacatatcaccatctacccaagctggggtgcagcccagtcaaaagagattatttttctgccctccaaagaaccagcatttgtaacagtacccggaaacggattcgcggaccctttctctatcacccccggaatctgggtcgcttgtattaaagctgaaggtgtgctgctggactatctcgtcctgttgcctcgagattactatgaggcctctgtcctgcagttgccagttaccgaaccttgcgcctacgccggtccccctcaggagaattgccttctgtaccagcatttacctgtgacaaggttcccatgtaccctggcttgcgaagccaggcactttcttctggatggagagcccaggcccgtggcagtccgacagcctaccccagctcacccagtgatggtggatctcagcggaagggaggtagaacttcacctccggcttcggattccacaggtgggccactacgtcgtggtcgttgaatatagcactgaggccgctcagctcttcgtagtggacgtcaatgtgaagtccagcggaagcgtgttggccggtcaggtaaatatctattcttgtaactactccgtgctttgtcgttcagctgtaattgatcatatgagccgcatagcaatgtatgagttactcgccgacgccgacatacagctgaaaggtcacatggctcgctttcttcttcaccaagtgtgtattatcccgattgaagaattttctgccgaatacgtcaggcctcaggtgcactgcatagcatcttacggacgcttcgttaaccaatctgccacatgtgtcagcctggcccatgaaaccccgccaacagccttgattctggacgtactcagcggacggccatttccacacctgccacagcagtccagccctagcgttgatgtcttaccgggtgttactctgaaagccccacagaatcaggtgacgctgagaggccgagtgcctcacctgggcagatatgtgtttgtgatccacttttatcaggccgctcacccgacatttcctgcccaggtcagcgtggatggcggatggccacgggcagggagctttcatgccagtttttgtccccatgtgttgggctgtcgggaccaggtgatcgccgagggacaaattgaattcgacatttccgagcccgaagtggcagccactgtgaaagtccccgaaggtaagtcactcgtccttgtcagggtgctggttgtgcccgctgagaactacgactatcagattctgcacaagaagtccatggacaaaagcctggagtttatcaccaattgcggaaagaattccttttatctggatccgcagaccgccagtaggttctgcaagaactccgcacgcagtctggttgctttctaccacaagggggctctgccctgtgagtgtcatccaactggagcaactgggccacattgttcaccggagggaggacagtgtccctgccagcctaatgtcatcggtcgccagtgcacaagatgcgcaacaggccattacggctttcctagatgtaaaccttgcagctgcggcagacgactgtgtgaggagatgaccgggcagtgcagatgtccccctcgtaccgtgcggcctcagtgcgaggtgtgcgaaacacattctttttctttccatcctatggcaggctgcgaagggtgcaattgttctcggagggggacaatcgaagccgcaatgcccgaatgcgacagggacagtggacagtgtcgttgcaagcccagaatcacaggcaggcagtgtgataggtgcgcctccggcttttaccggttccccgagtgcgtcccttgcaactgtaacagagacggtaccgaaccgggagtttgtgacccgggtaccggcgcttgtctgtgcaaagaaaatgtggaaggcaccgagtgcaacgtgtgccgggagggcagtttccaccttgaccccgcaaacctgaagggctgcacttcttgcttctgcttcggtgtgaacaatcagtgccatagtagtcacaagcggagaaccaaattcgtggacatgctgggatggcacttggagacagcagatagagttgatatccccgtgagttttaaccccggatccaattctatggttgctgatcttcaggagctccccgctaccattcattccgcgagctgggttgctccgacatcctatctcggtgataaggtgtcttcctacggcggatatctgacataccaggctaaatccttcgggctgccaggagacatggtgctcctcgagaaaaagcccgacgtacagctgaccgggcagcacatgtcaatcatttacgaggagaccaatacccctagacctgatcgcctccatcacgggcgtgtccacgtcgtggaaggcaacttccggcacgcttcttcccgggctcccgtctcacgggaggaactcatgacagttttgagcaggctggcggacgttcgtatccaggggctgtacttcaccgagacacagagactgactctttcagaagtgggtctcgaagaagcctcagacacaggcagtggccgaatcgcactggctgtcgagatttgcgcctgccctcctgcttacgccggtgacagctgtcagggatgcagccctggttactacagggaccacaagggcctttataccggaagatgtgtcccttgcaactgtaacggccacagtaatcagtgtcaggacgggtcaggcatctgtgtaaattgtcagcacaataccgcaggagagcattgtgagagatgccaggaaggctactacggaaacgccgtacatggtagctgtcgggcatgcccttgtcctcacaccaactcattcgccaccggatgtgtggtgaacggaggagatgtgcgctgtagttgcaaagcaggatacaccggtacacagtgtgagaggtgtgctccaggttactttggaaacccacaaaagttcggcggatcatgtcagccttgctcatgtaacagtaatggccagctgggcagctgccatccacttactggggattgtattaaccaagaaccaaaagattctagccctgcggaggagtgcgatgattgcgattcttgcgttatgacactgcttaacgacctcgctacaatgggagagcagctcaggttggtgaaaagtcagctccaggggctatctgcctcagcgggtctgctggagcaaatgaggcatatggaaacacaggctaaggatctgcgcaatcagctcctcaactacagaagcgcaatatcgaaccatggctctaaaatagaaggtcttgaacgggaactaaccgacctaaatcaggagtttgaaaccctccaggaaaaggctcaagtgaattctcgcaaggcccagacgcttaacaataacgtcaatcgcgctactcaatctgcaaaggagctggacgtgaaaatcaaaaacgtgattagaaacgtccacattttgctgaagcagatttctggcaccgatggcgaaggaaataatgtgcctagcggagacttttcccgcgagtgggcagaagctcagaggatgatgagagaattgaggaacaggaatttcggaaagcacctgcgtgaggccgaagccgataagcgagagtctcagcttctcctgaacaggatacggacgtggcagaagactcaccagggcgagaacaatggcctggccaactcaatccgcgacagcttaaacgagtacgaggctaaactgtcagacttaagggcgcgtcttcaggaagcggctgctcaggccaagcaggctaacggcctgaatcaggaaaacgaaagagcactgggagcgatacagcgacaggtcaaggagatcaactcactccagtccgatttcactaaatacctgacaaccgcagattccagcttgctccagactaacatcgccctgcagctgatggagaaaagccaaaaggagtatgagaaactggctgcctccctaaacgaagctcggcaagagttgtcagataaggtaagggagctgtcccgatccgcgggtaaaacctcgctggtcgaagaggccgagaaacatgcaagatctcttcaggagcttgctaagcagctggaagaaattaagaggaatgcaagcggggatgagctcgtgcggtgtgctgtagacgctgccaccgcgtatgagaacattctgaacgctatcaaggccgctgaagacgccgcaaatagggctgcctcggcctcagagagcgccctgcagactgtaatcaaggaagatcttccaaggaaggctaagacgctaagctctaacagtgacaagcttctgaatgaggcgaaaatgacgcagaagaagctgaagcaggaagtgtctccagcgctcaataatttacagcagactctaaatatcgttacagtacagaaagaggtcatcgataccaatttgactacactccgagacgggcttcacgggatccaaagaggggatatcgatgccatgatatcatctgccaaatccatggttaggaaggctaatgacatcactgatgaggtgctggatggcctgaacccaatccagactgacgtggagcgcatcaaagatacatatgggcgaactcaaaacgaggatttcaaaaaagctcttacagatgccgacaactctgtcaataaactgaccaataagctccctgatttgtggcgcaagatcgaatcaattaaccagcagttgctccccctgggcaacatcagtgataacatggacagaattcgtgaactaatccagcaggcaagagacgccgcttctaaagtggccgtgccaatgcgcttcaacggcaagagcggcgttgaggtgagactgccgaacgatcttgaagacttgaagggttacacctctctaagccttttcctgcagcgacccaactctcgcgaaaatggcggaaccgaaaatatgttcgtcatgtaccttggaaataaggacgcaagtcgcgattacatcggcatggccgtcgtagatggacagctcacttgtgtttacaacctgggcgatagagaagccgaactgcaggtcgatcagatcctaacgaaatccgagacgaaggaagctgtgatggaccgcgtcaaattccagcgaatctatcaatttgcaaggctgaactatactaaaggcgctacaagtagtaagcccgaaactcctggcgtctatgatatggacggccgaaactcaaacacactccttaatctggatcccgagaatgtagtgttttacgtcggtggatacccccctgacttcaagctcccgagcaggctttcctttcctccctacaagggatgcatcgagctggacgatctgaacgaaaacgtcctctccctgtataactttaagaagacgtttaacctcaatactactgaggttgagccttgtaggagaaggaaggaggagtccgataaaaattactttgaaggtaccgggtacgcacgggtacccacgcagccacacgcccctatccccactttcggccagacgatacagacgactgtcgaccgaggactgctgttttttgccgaaaacggggatcggttcataagtctcaatatagaggacggaaagctcatggtgcgctacaaattaaacagtgagttacccaaggaacgcggtgtcggagatgccatcaacaacggacgggaccacagcatccagatcaagattgggaaactccagaagcgaatgtggatcaatgtggatgtgcagaataccataattgacggcgaggtgttcgatttcagcacctattatttggggggaattccaatcgctatcagagagagatttaacatctcaactcctgcctttcggggttgcatgaaaaacctcaagaagacgtcgggcgtagtgagactcaatgacaccgttggcgtcacaaaaaagtgcagtgaagactggaaactggtcaggtctgcctcatttagtagagggggtcagctcagcttcacagacctgggtttacctccaacagatcacttgcaggcctctttcggttttcagacctttcaaccctctgggatactgttggaccaccagacctggaccagaaacctgcaagtgactcttgaagacggctacatcgaactgagcacatctgacagtggcagccctattttcaaatctcctcaaacctacatggacggactgctgcattatgtctctgtgatcagtgacaactccggtctgaggttgctgattgatgatcagctgttgcgtaattcgaagcgcctgaagcacatttcaagtagtcgacagtccttgcgactgggtggcagcaactttgaggggtgcattagcaatgtatttgtccagcggctctccctgagtccggaggtgttggacctcacttctaattccctgaagcgagatgtgtctcttggcggatgctctctgaataaaccgccattcctgatgttgctgaaaggttccacacgatttaacaagaccaaaactttcagaattaaccaactgctgcaagacacaccagtggccagtcccaggagcgtgaaagtctggcaggatgcctgctctccactgccgaaaactcaggctaaccatggcgctctgcagtttggggacattccaacatcccatctcctattcaagctgcctcaggaactcttaaaaccacggtctcagttcgccgtcgacatgcaaaccacaagctcccgcggtctggtattccacaccggcaccaagaatagcttcatggcactgtatcttagcaaaggcagattggtatttgctctcgggacggatggcaagaagctgcgaatcaagagtaaggagaaatgtaatgacggcaagtggcataccgtggtgtttgggcacgatggcgaaaagggcagactagtggttgatgggctgcgcgcacgcgagggcagtctgccaggtaattctaccataagcattagggcccctgtgtatctgggctccccacccagcgggaaacctaaatccctacccaccaattccttcgtgggctgccttaagaacttccagctcgactccaagcccctttacacacctagctccagtttcggggtttcgagctgcctggggggtcccctggagaagggtatctacttctccgaggaagggggacacgtggtcttagcacactcagtcctcttaggacctgagttcaagcttgtcttttctatccggccacggtccctcaccggtatcctgatccacatcggctcccagcctggcaaacatctgtgtgtgtatttagaggcgggtaaggtgactgcctctatggatagcggcgctggtggcacaagcacgagcgtgaccccaaagcaaagtctgtgcgatggtcaatggcacagcgtggctgtcaccattaaacagcatattttgcacctggagctcgataccgacagcagctacacagctgggcagattcctttccctcctgctagcacacaagaaccgctacacctggggggagccccagctaatttgaccactctgcggatcccggtgtggaagagcttctttggttgcctccggaacattcacgttaatcacatccccgtgccagtcacagaagctctggaggttcaagggcctgtgtcattgaacggatgtccggaccagta

SEQ ID NO: 228078 - DNA, 9833 bp, synthetic construct
  misc_feature 1..9833: note = Description of Artificial Sequence: Synthetic coding sequence
  source 1..9833: mol_type = other DNA
atggcagccgcagccagacccagaggtagagcactgggcccagtgctgccacctacacccctcctgctgctagtactccgagtgctccccgcatgcggtgccacagccagggaccctggagcagccgctgggctgtctctccaccctacctattttaatctagcagaggctgcccgaatctgggccactgccacctgcggggagagaggtcccggtgaaggacgtccacagcccgaactgtactgtaagttagtggggggacccacggccccaggtagcggccacacgatccagggacagttctgtgattactgtaactcggaggaccctcggaaagctcaccccgtgactaacgcaatcgacgggagtgagcgctggtggcaatctccaccactgagctcaggaacacaatataatcgcgtgaatctcacgctcgatctgggccagctgtttcatgtagcatacatcttgatcaaattcgctaattcacccaggccagacctgtgggtgctggaacggagtgtcgatttcggcagcacttacagcccctggcagtattttgcacattctaaagtggactgtcttaaagagttcggcagggaggctaacatggccgtgactagggatgacgatgtcttgtgcgtgacagaatatagtcgcattgttcccctcgagaacggagaagtcgtcgtgtcactgataaacgggagaccaggtgccaaaaactttactttctctcacacactccgcgagttcacaaaggccacaaacatccgccttagatttctccgcaccaatacgttactggggcaccttatcagcaaagcacagcgggaccctaccgtgactcgcaggtattactactcgatcaaggatatttctattggcggacagtgtgtgtgcaacggacatgcggaggtatgtaacatcaacaatccagagaagctctttagatgcgagtgtcagcaccacacttgcggagagacctgtgaccggtgctgcacgggatataatcagcgccgatggcgcccagctgcctgggagcagtctcacgagtgtgaagcctgtaactgtcacggccacgcgtcaaattgctattacgatccggatgtagagcgacaacaggctagcttgaacacgcagggaatctatgcagggggaggggtgtgcatcaactgccagcacaatacagctggggttaactgtgaacagtgtgctaaaggatactatcggccttatggagtgccagttgacgcaccagacggctgtatcccatgttcctgtgacccagagcatgccgacggctgtgagcagggcagcggtaggtgccattgtaagccaaacttccacggggacaactgcgaaaagtgtgcaattggatactataattttccattttgtcttcggatcccaattttccctgtgtccactccttccagtgaggacccggttgcaggggatatcaagggatgcgattgtaatcttgagggcgtgctgcctgaaatctgtgacgcccatggacgctgcctgtgcagacctggcgttgagggaccacgatgcgacacctgcagaagcggcttctactccttcccaatctgccaggcttgttggtgttctgccctggggtcttatcagatgccctgttccagcgtgactgggcagtgcgaatgtcgtccgggtgttacagggcagcgctgtgatcggtgcttgtcaggagcttacgactttccccattgccaagggagctctagtgcttgcgacccagccggaacaataaactctaaccttggatactgccagtgtaaactgcacgtcgaggggccaacatgttctaggtgcaaactgctttattggaatcttgacaaagagaatccttcaggctgttcggaatgcaaatgccataaagctggaactgtgtccggcacaggcgagtgccgacagggggacggcgattgccactgcaaatcccatgtgggaggggatagttgcgacacctgcgaggatgggtatttcgctcttgaaaaaagcaattacttcggatgtcagggatgtcagtgtgacattgggggtgccctgtcctctatgtgctccggccctagcggcgtctgccaatgcagagagcacgtcgtcggaaaggtgtgccagcgcccagaaaataattactattttcctgatctacaccatatgaagtacgaaatcgaggacggctcaacaccaaatggtcgggatctgagattcggctttgacccactagcattcccagaattcagttggagagggtacgctcaaatgacatctgttcaaaatgacgtaagaataactctgaatgtcgggaaaagctccgggtctctgttccgggtgatccttagatacgtgaacccgggaacagaggctgtgtctggccacataacaatctaccctagctggggagccgcacaaagtaaagagattatatttctgccctccaaagaacccgcttttgtgaccgtgccagggaatgggtttgctgaccccttcagcattacaccaggaatctgggtggcatgtataaaagccgaaggcgtcctgttggattacctggtgctcctgcctcgggactattacgaagcctcagtgctgcagctccccgttaccgagccttgtgcttacgctggtcccccacaggaaaactgcttgctctaccaacaccttccagtgacccgattcccgtgtactctagcatgcgaggcaagacattttttgttggacggggagccccgtcccgtggccgtgcgccagcctacccccgcacacccagtcatggtggatttgtcgggcagggaagtcgagcttcacctccgccttcgaattccccaggtcgggcactatgtggtggtggtcgagtatagcacagaagccgcacagctgtttgtggtggacgtaaacgtaaaatcttcgggttccgtacttgcaggacaggtgaatatatatagctgtaattactccgtcctgtgcaggagcgctgtgattgatcacatgtccaggatagcaatgtacgagctgctggctgacgccgatatccagctgaagggccacatggcaagatttttgctgcaccaggtgtgcattatcccaattgaggagttcagcgccgagtacgtcagaccccaggtccattgcatcgcttcgtacgggagatttgttaatcaatccgcgacttgcgtgtccctggcccatgagaccccacctactgccctgattctcgacgttctgtccggtcgcccttttccccacctgccacagcagtcctcaccttcagtggacgtccttcccggtgtcacactaaaggctccccagaaccaagtgacgctgaggggtcgtgttccccacctggggagatatgttttcgttattcacttttatcaggcagcccacccgacattccccgctcaagtgagcgtcgatgggggttggcctcgagcgggaagcttccatgccagtttttgtcctcatgtactcggctgccgagatcaggtaatcgccgaaggccagatcgagtttgacatatcagagcctgaagtggcagccacggtgaaagtacctgagggcaaaagccttgtgcttgtccgggtgctcgttgtgcctgctgagaactacgattaccagatactgcataaaaaaagcatggataagtcactggagtttataactaactgtggaaagaacagcttctatttagacccccagactgcctcacggttctgcaagaattctgcccgatccctggtcgcattttatcataagggtgccctcccatgcgaatgtcatcctacaggcgcaaccgggccacattgttctcctgagggcggtcagtgtccttgccagccaaatgtcatcggtcggcagtgcactaggtgcgccactggacattacggattccctcgctgtaagccatgtagctgcgggcgtcgcctttgcgaggagatgactgggcagtgtcgctgtccacccaggaccgttcgtccccagtgcgaagtttgcgagacccacagctttagtttccatccgatggccggttgtgaaggatgcaattgctcccgcagagggactattgaagcagcgatgcccgagtgcgatagagattcagggcagtgtaggtgtaagccacggattactggcaggcaatgcgataggtgtgcttctggcttctaccgatttcctgagtgcgtaccgtgtaactgcaatcgtgacggcacagagccaggcgtctgtgatcccggtaccggcgcttgcctttgtaaggagaatgtggagggcaccgaatgcaatgtctgccgggagggaagcttccacctcgaccccgctaacctgaaggggtgtacgtcctgtttttgtttcggcgtcaataaccagtgccatagcagccacaaaaggagaaccaaattcgtagacatgcttggatggcacctcgagactgccgacagggttgacattcctgtatcgttcaatcccggttctaattctatggttgccgatctgcaggaactccctgctacaatccacagcgcgagctgggtagccccaactagttacttgggagataaggtttcaagctatggcggttacctcacttaccaggccaagagctttggactgccaggagacatggtcctcttggaaaaaaagcctgatgtccagctgacaggacaacatatgagcataatctatgaagaaaccaatacacccaggcctgaccgtcttcaccatgggagggtgcacgtggttgagggaaatttccgacatgcaagcagcagagctcccgtttcacgggaagagctgatgacagtgctttcacgattggctgatgtgcgcattcagggcctgtactttactgagacacagaggttaacactaagcgaagtcggactggaagaagcatcggacacaggcagcggacgcattgcccttgcagtcgaaatctgtgcatgcccacccgcttacgcaggggatagctgtcagggatgctctccagggtattatcgagatcacaaaggactgtataccggccgttgcgtcccctgcaactgcaatgggcatagcaaccagtgtcaggacggctccgggatctgtgtgaattgtcaacacaatacagccggagagcactgtgaaagatgtcaggagggctattacggtaatgccgtccacgggagctgccgcgcatgcccatgcccacatacaaactctttcgccacagggtgcgtcgtcaacggcggagacgtgaggtgcagctgcaaggcagggtataccggcacacagtgcgagagatgtgcaccgggttatttcgggaacccacagaagttcggcggtagctgtcagccatgcagttgtaactcaaacggacagctcgggagttgccatccactcaccggcgactgtatcaaccaggaaccgaaagactcatcccccgctgaggagtgcgatgactgtgacagctgtgttatgacactgttgaatgatctcgctacgatgggagaacagcttcgcctggtgaaatctcagttgcaaggactgagcgcctctgctggactcctggagcagatgcggcacatggagactcaggccaaagacctgcgaaatcagctgctgaattaccgaagtgcaatatccaatcacggcagcaaaatcgagggactggagagagaacttaccgacctcaaccaggagtttgagaccctgcaggaaaaagcccaggttaacagcagaaaagcccagacgttaaacaacaacgtcaatcgtgcaacccagtccgccaaggaacttgacgtcaagatcaaaaatgtcataaggaacgtccacatgctgaataggattaggacttggcagaaaacccaccagggggagaacaacggactcgccaactcaattcgtgacagtctgaacgagtacgaggctaagttgtctgacctgagggccagattgcaggaggccgctgcccaggcaaagcaggccaacggattgaatcaggaaaatgagagggccctcggagccatacagaggcaggtgaaggaaatcaactccctgcaatccgattttacgaaatacctgacaacagccgatagcagcctcttgcagaccaacatagcccttcagcttatggagaagagccagaaggaatatgagaaactggctgccagcctgaatgaagccaggcaggagttgtccgataaagttagagaactgtctcggtccgccggtaagaccagcttggtggaggaagcagagaagcatgcacgcagtctgcaagagttggcgaagcagttagaggaaatcaaacggaacgcaagcggggacgagcttgttcggtgtgctgtggacgcagccacagcatatgagaatattctgaacgccattaaagccgcagaggacgctgctaatagagctgccagcgcgagcgagtccgccttgcagacagttattaaggaggacctgcccagaaaagctaagactctcagctcgaacagtgataaattgctgaatgaggctaagatgacacagaaaaagcttaagcaggaggtgtcacctgcactgaataatctccagcagacactgaatatcgtaacagtgcagaaagaagtgatcgacacaaatctgacgaccttgcgtgatggcctgcatggaattcagagaggagacatcgacgcgatgatctcatccgccaagagtatggtacgaaaagctaacgatattacggatgaggtgttagacggactgaaccctatccagacagacgtagagagaattaaggatacctacggcagaacgcagaacgaggattttaagaaggcccttactgatgcggacaattcagtgaataagctgaccaataaactcccggatctgtggaggaagattgagtctattaatcaacaactccttcccctcggtaatatctccgataatatggataggatccgtgaattaatacagcaggcaagagacgccgcaagcaaagtcgccgtgccgatgaggttcaacgggaagagtggggtggaggtaaggttgcctaatgacctggaggatcttaaggggtatacaagcctctccctgttcttgcagagaccaaatagtcgagagaacggtgggactgaaaatatgttcgtgatgtatctgggcaacaaggacgccagcagagattacataggcatggccgtggtggatggccagctgacatgcgtgtataaccttggcgatcgcgaagccgaactacaggttgaccagatcctgaccaagagtgagacgaaggaggcagttatggatcgggtgaaattccagcgaatctatcagttcgccaggctcaactatactaaaggggcaacgtccagcaaacctgaaaccccaggcgtgtatgatatggacggaagaaactctaatactcttctgaatctggatcccgagaatgtggtattctacgtgggtggatacccacccgattttaagcttccaagccgcctctcttttcccccatacaaggggtgcatcgagctggacgacttaaatgaaaacgtgctttctctttacaacttcaagaagacatttaacctgaacacaaccgaggttgagccatgccgacgaagaaaggaggaatccgacaagaattactttgaaggtaccggctacgccagggtgccgactcaaccccacgcacccattcctacctttggtcagactattcagacaactgtggaccggggactgcttttcttcgcagagaatggagaccgattcatctcacttaatattgaggacggcaaattgatggtacgatacaaactgaattccgagcttcctaaagagaggggcgtcggagacgctatcaacaacggcagggaccactccatccagatcaaaattggcaagctgcagaaacggatgtggatcaatgtggacgtgcagaacaccattattgatggagaggtgtttgacttttccacgtattatttggggggtattccgatcgctattagagaacgatttaatatctccacacccgcatttcgagggtgtatgaaaaacctaaagaagacatccggagtggtgcgattaaacgacactgttggcgtgacaaagaaatgtagcgaggactggaagctcgtgcggtccgcatcattcagcaggggcggtcaactgtcctttacagaccttggcctgccccctacagaccatctgcaggcctctttcggcttccagacttttcaaccctcaggtatcctgctggaccatcagacctggacccgcaacctacaggtgacattggaagacggatatatcgagctgagcacctcagattccgggtctcctatatttaagtctcctcaaacctacatggacggtctgctacactacgttagtgtcatcagtgataactctggcctccgcttgctgatcgacgaccaactgttgaggaattctaagcgcctaaagcacattagctcctctcgccagagcttacgcctgggtgggtctaacttcgaggggtgtatttctaatgtgtttgtacagaggctgtccctgtcacctgaagttctcgatctgacgagcaactctctaaagagagatgtatccctgggtggatgttcccttaataaaccaccctttctcatgcttttgaaggggtccaccaggttcaacaagaccaagaccttccgcataaatcagctattacaggatacacccgtggcctccccccgatctgtgaaagtgtggcaggacgcatgttcccctctcccaaagactcaggccaatcacggcgcactacagttcggtgatatcccgacatcccacttgctgttcaagcttccacaggagctactgaagccaaggagccagtttgcagtggacatgcagacgacatcctcaagaggactggtatttcatacaggcaccaaaaacagctttatggccttgtatctgtctaaaggccgactcgttttcgccctagggaccgatggcaagaagctgcgcatcaagagcaaagagaagtgcaacgatggcaaatggcacaccgtggtctttgggcacgatggggaaaaaggccgactggtggtagacgggcttagggcacgagagggatccctgcctggaaactccactatatccatcagagcccctgtgtatctgggcagtcctcccagcggcaaacccaagagtctgccgactaattccttcgtgggttgcctgaagaattttcagctggattctaagcctctgtacactccttctagctccttcggcgtttcctcctgcctgggaggacccctagaaaaaggcatctacttcagtgaggagggtggccatgtggtgctagcccactccgtcctcctgggccctgagttcaaactcgtcttttccatacgacctcgctcgttgaccgggattcttatccacatcggttctcagcctggaaagcatttgtgtgtgtatcttgaagcgggtaaagtaaccgccagcatggactctggtgctggaggcacatccacgagcgtcactcccaagcagtccctatgcgatggacagtggcactcagtggcagtgaccatcaagcagcacattcttcacctggaactcgatactgacagctcatataccgctggacagatccctttcccaccagcctcaacccaggaacctctccacctgggcggagctccagcaaatctcactaccctgcggattcctgtatggaagagtttcttcggctgcctgcgtaacattcacgtaaaccatatacccgtaccagtcaccgaagccctcgaggtacagggcccagtgagcctgaatggatgcccagaccagta

SEQ ID NO: 228079 - DNA, 4559 bp, synthetic construct
  misc_feature 1..4559: note = Description of Artificial Sequence: Synthetic coding sequence
  source 1..4559: mol_type = other DNA
atggccgcagcggcaagaccacggggacgggctttgggcccagtcttgcctccaacgccactcctgcttctggtgcttagggtgctgcccgcatgtggtgccaccgctcgggatccgggagccgctgccggactcagcctgcaccccacatacttcaacctagccgaagcagcccgaatctgggcgaccgctacttgtggagaacggggaccaggtgagggaaggccccagccagaactgtattgtaaacttgtagggggtccgaccgcgccaggatctggccacactatacagggtcagttctgtgattattgtaattccgaggacccccgaaaggctcaccctgtcacaaatgctattgacgggtcagagaggtggtggcagagccctcccttgagcagcggtactcagtataaccgggtgaacctcacccttgatctcggccagctgttccatgtggcttacattctgataaagttcgccaatagcccccgacctgacctgtgggtgttagagaggagtgtggactttggatctacctactctccatggcagtattttgcccacagcaaagtcgactgtcttaaagaatttggccgagaggcaaatatggccgtgacccgggacgatgatgtgctctgcgttaccgagtatagtcgcatcgtcccactggaaaatggagaagtggttgttagtctgattaatggcagacctggcgctaaaaactttaccttctcccacactctgcgagtgtatcagggtaacaaacatccgctgtttctcagaacgaatacactgctgggtcacctgatttccaaagctcagagagatccaactgttacacgtagatattattatagcatcaaggatatctccatcggtggtcagtgtgtgtgtaatgggcacgcagaggtgtgtaatattaacaatcccgagaagttgttccggtgtgaatgccagcaccatacttgtggcgaaacatgtgaccggtgctgcacaggctacaaccagcgcagatggcgacccgctgcttgggagcaaagccacgagtgcgaggcctgtaattgccatgggcatgcctccaactgttattatgaccccgatgtggaaagacagcaggcaagcctgaacacacaggggatctacgcgggtggcggtgtctgtattaattgtcagcataatactgccggtgttaattgtgagcagtgcgctaaggggtattacagaccttacggtgtgcctgtagacgcccctgacggttgtataccttgctcttgtgaccccgagcacgcggatggctgcgagcaaggaagtgggagatgccactgcaaacctaatttccacggtgataattgtgaaaaatgtgcaatcgggtattacaactttccgttctgccttcgtattcctatctttccggtgtccaccccctccagtgaagacccagtggcgggagacatcaagggatgtgactgtaatctggaaggagtcttgccggagatctgtgacgctcatggtcgatgcttatgtaggcctggagttgaggggcctagatgcgatacatgtcgctccggattctacagctttcctatctgccaggcctgttggtgcagcgccttgggtagctaccagatgccatgctcctcagtcaccggccagtgcgaatgcagacccggagtaacagggcagaggtgtgatcgctgtctgagtggggcatatgactttccccactgccagggtagcagcagcgcctgcgatccagcaggaaccattaattctaacctgggatactgccagtgtaagctgcatgtcgaggggcctacgtgcagccggtgtaaactgctgtactggaatctcgataaagagaaccccagcggctgttcagagtgcaagtgccataaggcgggtactgtcagcgggactggagaatgcagacaaggagacggtgactgccactgtaagtctcacgttgggggagattcatgcgacacctgcgaggacggctacttcgccctggagaagagtaattacttcgggtgccaggggtgtcagtgtgatatagggggtgcccttagctctatgtgctccggtccctctggcgtgtgtcagtgtagggaacacgtcgtgggcaaggtctgtcaaaggcccgaaaataattattatttcccagatctccaccacatgaagtacgagattgaggacggctctaccccaaatgggagggatctccgattcgggttcgatcctctcgcttttcccgaattcagttggcggggatatgcacaaatgacatcagttcaaaacgatgtcagaattacattgaacgtcggaaagtcaagtggcagtctgttccgtgttattttgaggtacgtcaatcctggtaccgaagccgtgtccggacacattacaatttacccgtcctggggagcagcacagtccaaagagataatcttccttccctcaaaagaacctgcctttgtaaccgtacccggtaacggattcgcagaccctttttctattacacccggaatttgggtcgcttgtattaaagcagagggggtactgctagactatctcgtcctgctccctcgagattattacgaggcctcagtactgcagctccccgtgacagaaccgtgtgcttatgccggtcccccacaagaaaattgcctcctctatcagcacctacccgtgactcgcttcccttgtacgctggcatgtgaagctcgacactttctactggacggggaaccacgacccgtcgcagtccggcagccgacccctgcccatccggtaatggttgatttgtctggtagagaggtggaactccacctccgtcttcggattccacaggtgggccactatgtggtcgtggtcgaatatagtactgaagccgcacaattgttcgtagtggatgtgaacgtaaagtcaagcggctcagttctggctgggcaggtgaacatatacagctgtaattactccgttctgtgtcgcagcgccgtcatcgaccatatgagccgcatcgcgatgtacgagttactggcggatgccgatatccagctcaaaggccatatggctaggttcttattgcaccaggtctgcataattcccatcgaagagttctcagcagagtacgtgcgcccacaggtacattgtattgcatcgtatggcagatttgtaaatcagtcagccacatgtgtttccctggcccatgaaactcccccaactgcgctgattctggacgtcttgagcggcaggccgtttccacacttgcctcaacagagttccccaagtgtggacgtattacctggcgtaacactaaaggcccctcagaaccaggtcactctgcgtggccgagtcccgcacctcggcaggtatgttttcgtgatccacttctaccaggctgcccatccgaccttccctgcgcaggtcagcgtggacggcggatggcctagagcaggctcttttcacgcttcattttgcccacatgttctcgggtgccgcgaccaggtgattgcagagggacagatagagtttgatatcagcgagcccgaagttgctgctacagttaaagttcccgagggcaagtccctggtgttggtacgggtccttgtggtacccgctgaaaactacgattaccagatcctgcacaaaaaatcaatggacaagtccctggagtttattacaaactgtggcaaaaactcgttttatttggaccctcagaccgcatcaaggttctgtaagaattccgccagatcactggtcgctttttaccataagggtgctctcccgtgcgaatgtcacccgactggtgctaccggcccacactgcagtccagagggaggggcacatgcttctcctaccagctccggtggatctgccccagctgtccagcaagcctatggcttccccagatgcaagcgaaagtcctgcagttgtggccgtagactctgcgaggaaatgacaggccagtgccgctgtcctcctcgcactgtacgccctcagtgcgaagtttgcgagacacatagcttctcctttcaccccatggctgggtgcgaggggtgcaattgctccaggagagggactatcgaggccgctatgcctgagtgcgacagagacagtggccagtgccgctgcaaaccgcgaatcactgggcgacaatgtgaccgatgcgcaagtgggttctacaggtttccggagtgcgtgccctgcaactgcaacagggacggaactgagccgggtgtgtgcgaccccggaactggcgcttgcctgtgtaaggaaaacgtggaaggcacagagtgcaatgtatgcagggaaggcagttttcacttagatcctgctaacctcaagggatgcaccagttgcttttgctttggcgtcaataatcagtgccactctagccataaaaggcgtactaaattcgttgatatgctcggttggcacctggaaaccgccgaccgggtggacatacccgtgtcttttaaccctgggtctaactccatggtggctgatctgcaggagctccctgccactatccatagcgccagctgggtggcgccata

SEQ ID NO: 228080 - DNA, 1743 bp, synthetic construct
  misc_feature 1..1743: note = Description of Artificial Sequence: Synthetic coding sequence
  source 1..1743: mol_type = other DNA
atggccgcagccgcacgacccagaggcagagcgcttggtcccgtattgcccccaacaccattgctattactagtgttgagggttctccccgcttgtggcgcaaccgctcgggatcctggcgcagcagcaggtctgagcctgcaccccacttactttaaccttgcagaagccgcaaggatttgggcaacggccacttgtggcgagcgcggacccggagaaggaagaccccaacccgaactctattgtaagcttgtcggcggaccgacggcgcctggttccggccacactatccagggacagttctgcgactattgtaactcagaggatccaaggaaggcacatccagtgaccaacgccattgacggttccgaaagatggtggcagagccctcccctctcatctgggacccaatacaaccgggtgaacctcaccctagatctaggccagctgttccacgtggcctatatcttgattaagtttgccaatagtcccaggccagatctgtgggtcctcgaaaggtctgtggactttggaagtacatatagcccctggcagtactttgcgcactctaaagtggactgcctcaaagagtttggtcgcgaggccaacatggccgtgactagagatgacgacgtgctctgtgtgaccgaatattctcgcattgtacctctagaaaacggcgaagttgtggtctcgcttatcaatggcagacctggtgccaagaactttacattttctcatacactccgagagttcaccaaggcaaccaatatacgtctccggtttctgcggactaatacactgctcggccatctcatttcgaaggctcagcgggaccccaccgtcacacgcagatactattattccatcaaggatatctcaattggcggtcagtgcgtctgtaacggccatgccgaggtgtgtaacatcaataatcctgagaagttgttccgctgcgaatgtcagcatcacacctgcggggaaacctgcgatcgctgttgtaccggttataaccagcgaaggtggcgtcccgctgcctgggaacagagccatgagtgtgaagcatgcaactgccacggccacgcttctaactgttactatgaccccgatgtcgaacggcagcaggcgagtctcaatactcagggcatctacgccggtggcggtgtatgcattaactgccagcataatacggctggggtcaactgcgagcagtgtgcaaagggatactacagaccctacggggtgccggtggatgcacctgatggctgcatcccctgtagttgcgacccagagcacgccgatggctgtgaacaaggaagcggcaggtgtcactgcaagccgaattttcacggcgacaattgcgagaagtgcgctattgggtactacaacttccctttttgcctacggatccctatctttcctgtcagcacaccttcctctgaggaccctgtggccggagatatcaaaggcaactggtgtgattgcaacctcgaaggggtgttgcctgaaatctgcgacgctcatggaaggtgcctatgccggccaggtgtagagggccctagatgcgacacatgcagatctggattctatagcttccctatctgtcagggccctagcgagaaggtggccatttacaaacccgagtcccgccctagtgccgagaccgagccagcctcaacctggattttggactttcccgcatccagaaccggcgagataaatttttattgtctatcgccctag

SEQ ID NO: 228081 - DNA, 5007 bp, synthetic construct
  misc_feature 1..5007: note = Description of Artificial Sequence: Synthetic coding sequence
  source 1..5007: mol_type = other DNA
atgccaccggcagttcgccgatctgcgtgttctatggggtggctgtggattttcggcgctgcccttgggcaatgtttgggttactccagtcagcagcaacgtgttccgttcttgcagccgcctggccagtcacagttacaggccagctatgtcgagttccgtcctagccagggttgctcacctgggtattaccgtgaccacaaagggctgtatacaggaaggtgcgtgccctgcaactgcaacggacacagcaaccagtgtcaggatggctctgggatatgcgttaactgtcagcataataccgcaggggagcattgtgagcggtgccaggaggggtactacggcaacgcagtccacggatcatgtagggcgtgcccttgtcctcacacaaattctttcgcaaccgggtgcgtggtgaacggcggagacgttcggtgttcctgtaaagcgggatacactgggacccagtgcgaaagatgtgctccaggctattttggaaacccacagaagttcggaggaagctgccaaccatgctcatgtaattcaaatggccaactggggtcctgccatcccctcaccggagattgtattaaccaggagcccaaggactcttcccctgctgaagaatgcgatgattgtgattcctgcgttatgacacttctgaacgacctcgccaccatgggggaacagctccgcctggtcaagtcccagctgcaagggctgtcggcctctgccggactgctggagcagatgagacatatggagactcaggccaaggacctaagaaaccagctgcttaactaccggagcgcgataagtaaccatggtagtaaaattgagggcctggaaagagagctgaccgacctcaaccaggagttcgagaccctccaagaaaaggcacaagtgaactctcgaaaggctcagaccttaaacaacaacgtcaatagggcaacacagtccgccaaagagctcgatgtcaagataaagaatgtcatcagaaatgttcatatgctgaatcgcattcgcacatggcaaaagacacaccaaggggagaacaatggcttagccaacagcatcagggatagcctgaacgaatacgaagctaagctctccgacctacgagctcgactgcaagaagccgctgctcaggctaaacaggctaatggcttgaaccaagagaacgaacgcgcactgggggcaattcaacgccaggtgaaggaaattaattctttgcaatcggacttcaccaagtatttgactactgccgacagctccctgctccagaccaacattgcactgcagctgatggagaaatcccagaaggaatatgagaaattggctgcttcacttaacgaggctcgccaagaactgtctgataaggtgagagagttaagccgtagtgcaggaaagacctccctcgtcgaagaagccgagaaacacgccagatcactacaggaacttgcaaagcaactggaagagataaagcggaatgcatctggcgacgagttggtgagatgcgctgtggacgccgctacagcttacgagaatattttaaatgctatcaaggccgcagaggatgcagccaatagagcggcttcagcatctgaatccgcactccagaccgttataaaagaggacttgccacgaaaagcgaaaactctgagctcaaattctgataagcttctgaacgaggctaaaatgacccagaaaaaactcaaacaggaggttagtcctgcgctcaataacttacagcaaacgctgaatatcgttaccgtgcagaaagaagtcatcgacacaaatcttaccaccctacgtgatgggctgcatggaatacaacggggagacattgacgccatgatctcatccgctaaatcaatggtccggaaagctaacgacattactgatgaagtgctggatgggctgaaccctattcagacagatgtggagcggatcaaagacacttacggccgtacccagaacgaagactttaagaaggccctcaccgacgctgataactctgtgaataaactcaccaacaaattaccagatctgtggaggaaaatcgaatcaatcaaccagcagctcctccccctagggaacatttccgataatatggatcgaatccgtgaattaatccagcaggccagggacgctgcttccaaggtagctgtgcctatgagatttaacggaaaaagcggcgtggaagtacgactcccaaatgatctggaggacctgaagggctatactagcctgtccctgttccttcagagaccaaattcacgcgagaatggcggaacagaaaacatgttcgtaatgtacctaggaaacaaggatgcctctagggattatatcgggatggctgtggttgacggtcagttgacgtgtgtgtacaacctcggcgacagggaggctgagttgcaagtggaccagatcctcaccaagtccgaaaccaaggaagctgtcatggatcgcgtgaaattccagagaatttatcagttcgctcgattgaattacaccaagggggcaacttcgagcaaacctgaaacgccgggagtgtacgatatggatggccgtaattctaacaccctgctgaacctagaccccgagaatgtcgtgttctatgtcggagggtatccacccgactttaaactgccttcacgtctgagtttccctccttataaggggtgtatagaactagacgacctgaacgaaaacgtgctctccctgtacaattttaaaaaaacattcaatctgaacacaactgaggttgagccttgtagaaggcgtaaagaagaaagcgacaagaactatttcgagggcacaggatatgctcgggttcctacccagcctcacgccccaatcccgacatttggacaaaccattcagacaacagtagatcgaggcttactcttctttgcggagaatggcgatcgttttattagtctgaatattgaagatggcaaactcatggtgcggtacaaacttaattccgagttgccaaaagaacgcggagtaggggatgcaattaacaacgggagggatcatagtatccagattaaaataggaaagctgcagaaacgaatgtggataaacgtagacgttcagaacaccataatcgacggcgaggtcttcgacttttcaacatactacctcggcggaattcccattgcgatccgggaacgcttcaacataagcaccccagccttcagaggatgcatgaagaacctgaagaagacaagtggcgtggtgcggttgaacgataccgtcggtgtaaccaagaagtgctcagaagactggaagctggtgcgaagtgcctcgttttcacgaggcggtcagctgtccttcaccgatttggggctcccgccaactgatcacttgcaggcatcatttggcttccagacatttcaaccttccggaattcttttggatcatcagacatggacgaggaatctgcaggtcaccctggaagacggctacattgaactgagcacatccgattctggctcccccattttcaaatctccacagacttatatggacggcctcttgcactatgtcagcgtgatcagtgacaattcaggtctgcggctgctaatcgatgatcaactcttgaggaattccaagcggctgaagcacatctcgtcgagtcggcagtcactgaggctcgggggttcaaactttgaggggtgcatttccaacgtcttcgtgcaaaggctgagtttgagcccggaggtcctggacctgacttccaactctttgaagcgcgacgtatcactcgggggatgctccttaaataaaccaccattcctgatgctactgaagggctccacccggttcaataaaacgaaaaccttccgcataaaccaacttctccaggatacccccgtagcttccccaaggtcagtgaaagtctggcaagatgcctgctccccccttcctaaaacccaagccaaccatggagcactgcagttcggagatatccccaccagccacctcctgttcaagctgccccaagaattgctgaagccacgatctcagtttgccgtcgatatgcagaccaccagctccaggggcctcgttttccatacaggcacaaagaatagctttatggctttgtacctctctaaagggcgtcttgtttttgcccttggcaccgatggcaagaaattgaggatcaagtcaaaggagaagtgcaatgacgggaagtggcacacggtagttttcggacacgacggcgagaaagggcgtctggtggtcgatggcctgcgcgctcgggagggctccttgcccggaaacagcactatatcaattcgtgccccagtgtacctaggaagccctccctccggcaagcctaaatccctgcctacaaactctttcgtaggctgcttgaagaactttcagttggatagtaagcccctatacacacccagtagttcattcggagtctcctcctgtctgggcggtccgttggagaaaggaatatatttctctgaagagggcggtcacgtcgtcttggcccatagtgtgcttcttggcccagagttcaagttggtcttctcaatcaggccacggagcctgactggcattctcattcacattggttcccagccaggaaagcacctttgtgtgtatctagaagcaggcaaagtcaccgcatctatggattctggtgccggagggacatccacaagcgtaactcctaagcaatctttgtgtgacggacaatggcatagtgtagcggtaacaattaagcagcatatattacatctggaactcgataccgatagttcctatacggccggtcaaattccgtttccccctgcatcaacccaggagcccctacacctcgggggagccccagcgaatttgacaacccttagaatcccagtgtggaagtcctttttcggatgcctcagaaatattcatgtgaatcacatcccagtgcctgtgacagaggccctggaagtgcagggacccgtgtctctgaatggatgcccagaccagtag

SEQ ID NO: 228082 - DNA, 1065 bp, synthetic construct
  misc_feature 1..1065: note = Description of Artificial Sequence: Synthetic coding sequence
  source 1..1065: mol_type = other DNA
atgcaagggctgctgttctctacccttctcctcgccggactagcacagttttgttgtcgcgtgcaaggcaccgggcctctggacaccacacccgaggggcgacccggtgaagtcagcgacgcccctcagcgcaaacaattctgtcactggccttgtaaatgtccccaacaaaagccaaggtgccctccaggcgtttccttggtccgggatgggtgcgggtgttgcaaaatttgcgccaagcagcccggagagatctgcaatgaagcggatctgtgcgatcctcacaagggcctctattgtgattatagtgtcgaccgtccaagatacgagacaggcgtgtgtgcctatctggtggctgtcggctgcgagttcaaccaggtacactatcacaacggacaggtgttccagccgaacccgctgttttcatgtctatgtgtgtctggggcaattgggtgtacccctttgtttattcctaagctcgccggatcccattgtagcggtgcgaaggggggaaagaagtccgatcagtccaattgttctctggaaccactgctgcagcagttaagtactagttacaagacgatgccggcttatcgtaatctcccattaatttggaagaagaagtgcttagtccaggccaccaaatggacaccctgttcgaggacctgcggcatgggaatctcaaatagggtcactaacgagaattcaaattgcgaaatgcggaaagagaaacggctgtgttatattcagccgtgtgacagcaatatcttaaagacaatcaagattcccaaggggaagacatgtcagcctacgtttcagctgtccaaggctgagaagttcgtgttttcaggctgttcttctacccaaagctataaaccaacattctgtggtatatgtctcgacaagaggtgttgcatccctaataagagcaagatgattacgatccagtttgactgccctaatgaaggctcctttaagtggaagatgctctggattacttcttgcgtctgtcagcggaactgtcgcgaacccggtgacatcttttctgagttgaaaatcttatag

SEQ ID NO: 228083 - DNA, 267 bp, synthetic construct
  misc_feature 1..267: note = Description of Artificial Sequence: Synthetic coding sequence
  source 1..267: mol_type = other DNA
atggcactatcttcagcctggaggagtgtgctaccattgtggctcttatggtccgcagcttgtagcagagccgcaagtggcgacgacaacgcttttccttttgacattgagggatctagcgcggtgggtaggcaagacccccctgagactagcgagccacgcgtcgcactcgggaggctgccgccagctgctgaaaagtgcaatgccggtttcttccatactctgtctggagaatgcgtgccctgcgattgtaatgggaactcctag

SEQ ID NO: 228084 - DNA, 363 bp, synthetic construct
  misc_feature 1..363: note = Description of Artificial Sequence: Synthetic coding sequence
  source 1..363: mol_type = other DNA
atggcactctctagtgcctggcggagcgtcttacccctgtggttactttggtcggcagcgtgcagcagagctgcctccggagatgacaacgcgtttccattcgacattgaagggtcaagtgccgtaggacgacaggatcctccagagacttctgagccaagggttgcattgggaaggctccctccggcagccgaggtgcagtgcccctgtcactgccatcctgcaggagccccagcacctcctcgggcagtaccgcatagctctttttctctctctcctcccttatcatctccccagtgtctcgagagctttacttgggcccgtagcgttagaaagttagaaattaaatcgttccctctctag

SEQ ID NO: 228085 - DNA, 549 bp, synthetic construct
  misc_feature 1..549: note = Description of Artificial Sequence: Synthetic coding sequence
  source 1..549: mol_type = other DNA
atggcgctatccagtgcgtggcggagcgttctgcctctctggctcctgtggtctgccgcttgtagtcgggctgcttctggtgacgacaatgcttttccttttgacatcgagggctcctccgccgtaggacgtcaggacccacccgaaaccagtgaaccccgagtcgcactcggacggctaccaccagccgctgagaaatgtaacgcaggttttttccataccctgagtggggaatgcgttccctgtgactgcaacggtaatagtaacgaatgcctggacggatctggttactgtgtacattgtcagaggaacacgacaggtgagcactgtgagaagtgcctcgacggctacataggtgatagcatccgcggagcgcctcagttctgccagccctgcccctgtccgctcccgcacctagcgaatttcgccgagagttgctatagaaaaaatggggcagtcaggtgtatatgtaatgagaattacgccggtcccaattgcgaacggccttccccacagagtaccagaggatttccactgaacgattcttag

SEQ ID NO: 228086 - DNA, 537 bp, synthetic construct
  misc_feature 1..537: note = Description of Artificial Sequence: Synthetic coding sequence
  source 1..537: mol_type = other DNA
tagattttcgaagactgtgatgaagtcactggccagtgtcgtaactgcctacggaataccactgggtttaagtgtgaacgctgcgcccctggctactacggagacgcacgaatcgcgaaaaactgtgcggtatgtaactgcggtggagggccatgtgacagcgtgacaggagaatgtctcgaggaaggcttcgaaccaccaacaggaatggactgccctaccattagctgtgataaatgcgtgtgggacttaaccgacgccctgcggttggcggcactgtcaattgaagagggcaaatctggcgtgctcagcgtgagctctggagctgctgcccaccgtcacgtgaacgagattaatgctactatttacctcctgaagaccaagctctcagagagagagaatcaatatgctttacgcaaaatccagattaacaacgcggagaacaccatgaagagcctgctctctgacgttgaggagttagtggaaaagcattggaataaaccacggaggcgactggagctgcaggagggggtctag

SEQ ID NO: 228087 - DNA, 5450 bp, synthetic construct
  misc_feature 1..5450: note = Description of Artificial Sequence: Synthetic coding sequence
  source 1..5450: mol_type = other DNA
atggcattatcctccgcttggcggagcgtcctaccactctggttgctgtggtctgcggcatgtagcagggcagcaagcggcgacgataatgcttttcccttcgatatcgagggcagcagcgcagttgggaggcaggatccccctgagacctctgaaccaagggtggccttgggacgcctacctccggcagccgaaaaatgtaacgctggcttttttcacaccttatccggagagtgcgttccatgcgattgtaacggcaattcaaatgaatgtctggacgggtccggctactgcgttcattgccaacggaacacgactggagaacactgtgaaaaatgtctggatggatatattggcgattccatccgcggtgcaccacagttctgccaaccttgcccttgccccttaccacatctggctaactttgccgagagttgctaccgtaaaaacggggctgttaggtgcatctgtaacgaaaactatgccggacctaactgtgagcgttgcgcaccagggtactatggcaatccactgctcatcgggagcacttgcaagaagtgcgactgctctggcaactccgacccaaatctgatctttgaggattgtgatgaggtcactggccaatgcagaaattgtctccggaatacaaccgggttcaaatgcgagagatgcgcccctgggtattatggcgatgcccgtattgccaagaactgtgctgtttgtaattgtggaggagggccatgtgactctgtcaccggggaatgcctggaggaggggttcgagccaccgaccggctgcgacaagtgtgtctgggacctgactgatgcactgcgtcttgctgccctgtctattgaagagggcaagagcggtgtcctgtccgtgagcagcggtgctgcagcacaccgacacgtcaacgagattaacgccacaatctacctgcttaagacgaagctctctgagagagaaaaccagtatgctttacgtaaaatccaaattaataatgctgagaacaccatgaaatccctgctgagcgacgtcgaggagctggtggaaaaggaaaatcaggcatccagaaaaggccaactagtccagaaagagtcgatggatacaatcaaccatgcaagccagctggtggaacaggcccacgatatgcgggataagatccaggaaatcaacaataaaatgctatactacggcgaggaacacgaactgtcacccaaggagattagcgagaaattggtcttagctcagaagatgctcgaagagattaggagccgccagccgttctttacacagcgggaattagtggacgaggaagccgatgaggcttatgagctgcttagccaagccgagtcttggcagagactgcataatgagaccaggacgctcttcccagtggtcctggagcagctggacgattataacgccaagctgtccgatcttcaggaggcactggaccaggcactaaattacgtaagagacgcagaagacatgaaccgcgctaccgcagccagacagagagatcacgaaaaacagcaggaacgggtgagggagcaaatggaagtggtgaacatgtccttgtccaccagtgccgactccttaacgacccccaggctcactttgagcgaactcgacgacatcataaagaacgcgtctgggatatacgccgagatcgatggcgctaagagtgaactccaagtgaaattgagtaacttgtcaaatctgtctcacgatcttgttcaggaagccattgaccatgcccaggacctacagcaggaggccaacgagctgtcacgcaaattacattctagcgacatgaacggactggtgcagaaagcactggatgcatccaacgtatatgaaaatattgtaaactacgtatctgaggctaatgagacggccgaatttgccctcaatactactgatcggatctacgatgccgtcagtggcatcgacacccagataatctaccacaaagacgagagcgaaaatctgcttaaccaggctcgtgaattgcaggcaaaggctgagagctccagtgatgaagcggtggccgacactagccggagagttggcggtgccttggcaagaaagagcgcactgaagacgagactgtcagatgccgtcaagcagttgcaagccgctgagcgcggagacgcacaacaaagattgggacaatcccgactgataactgaagaagcaaataggaccacaatggaagtgcagcaggccacagcaccgatggccaacaacctaacgaattggtctcagaatctacagcactttgatagctctgcgtacaatactgccgttaacagcgcgcgagatgctgtgcgaaatctgacagaagttgtcccccagttactcgaccagctgcgcaccgtagagcaaaaaaggccagcgagcaacgtgagtgcctccattcaacggatcagggagctgatagcccagacacgctctgtcgcttctaagattcaggtatcaatgatgtttgatgggcaaagcgcggtagaggtacactctagaactagcatggacgacctgaaagccttcacaagtttgagcttgtacatgaaacccccagtcaaacggccagagctgaccgagaccgcagatcaattcatcctgtatctcggcagtaaaaacgcgaaaaaagagtacatgggtctggccatcaaaaacgacaacttggtttatgtgtacaacctggggactaaggacgtggaaatccctctggattcaaagccagtctcaagttggcccgcttatttctctatcgttaagattgaacgcgtgggtaagcacggcaaggtttttctgacggtaccgtcactcagctctactgccgaggagaaatttattaaaaagggcgagttctcaggcgatgactctctcctcgacctggaccctgaagacacagtattctatgtggggggagtgcctagcaatttcaagctccctacttccttgaacctaccgggatttgtgggctgcctcgaattggccactttgaacaatgatgtaatctccctttataacttcaagcacatttacaacatggacccatccacctccgttccatgcgccagagataagcttgccttcacacaatcacgagctgcctcgtatttctttgatggatcgggttatgctgtggtgcgtgatattactcgcaggggcaaatttgggcaagtcacaaggttcgatattgaagtgcgcacacctgcagataacgggctcatcctcctgatggtgaacggtagtatgttctttcggcttgagatgaggaacggctatctccacgtattttacgatttcggtttttctggcggtccggtgcatttagaggacactctaaaaaaggcacaaattaacgatgccaagtaccatgaaatctctatcatctaccataatgataaaaagatgatcctagtcgtggataggaggcacgtcaaatctatggacaacgagaagatgaagatcccattcacagacatttacatcggaggggctccccctgaaatcctccagtcaagggcgctgcgggcacacctgccactggacatcaactttcgcggatgcatgaagggtttccaatttcagaagaaggatttcaatttactggaacagacagagacattaggggtggggtacggttgcccggaggactctctgatatcgaggcgggcttatttcaatgggcaatcgtttatcgcctcaattcagaaaatctcctttttcgatggcttcgaggggggttttaattttcggacgctccagcctaacggcctgctgttttactatgctagcggctccgatgttttcagcatttcactcgacaacggaactgtgatcatggatgtgaaaggaataaaagttcagagtgtcgacaaacaatacaatgatgggctctcccacttcgtgatctctagtgtgtcgcccacacgctacgagttgattgtggacaaaagtcgtgtggggagtaagaatccgacgaagggcaaaatcgaacagacccaggccagtgagaaaaagttttattttgggggaagtcctatctctgctcagtatgctaatttcacaggctgtatctcgaatgcatattttacgagagtagaccgagatgtggaggtagaagatttccagcggtatacagaaaaggtccacaccagcctatatgagtgccccatcgagtccagccctctcttcctcttgcacaaaaagggaaaaaatctgtccaaacccaaggcgtcacagaataaaaaaggtggcaagtcaaaggatgcgccatcctgggaccctgtagccctgaaactgccagagcggaatactcctcggaactctcattgtcacttgtcgaacagccctcgagccatcgagcacgcataccagtatggcggtacggccaacagtcgccaggaatttgagcatctcaagggtgattttggagctaagtcccagttctcaattaggctacgaacgcggtcttctcatggcatgattttctatgttagtgatcaggaagagaacgattttatgaccttattcctagcccacggtcggctggtatatatgttcaacgttggccacaaaaagctcaaaatccgatctcaggaaaaatataatgacggactctggcatgacgtaatttttattcgggaacgcagctccggcaggctagttatagatggactgagagtcttggaggagtcgctgcccccaaccgaggccacctggaagattaaggggccaatatacttgggcggagtggccccaggtaaggccgtgaagaatgtacagataaacagcatatactctttctcaggatgcctcagcaacctccagctaaacggcgcaagcatcaccagcgcgagccaaacgttcagcgttacgccttgctttgaaggacccatggaaaccggaacatatttctccactgaggggggatatgtagtgctcgacgagtccttcaacatcggtctcaaattcgaaatcgcatttgaggtccgtcccagatcttcttcaggtactcttgtccacggtcattccgtgaacggagaatatctcaacgtgcacatgaagaacggacaggtcatagtgaaagttaacaatggaataagagacttctcgacctccgtgacgcccaagcaaagcctgtgcgatggccgttggcaccgaatcacagttatacgagattcaaatgtcgtgcagctcgatgtagactcagaggtcaaccatgtcgttggacccctgaaccctaaacccatagatcacagggagcccgtctttgtgggaggcgttccggagagcctcttgactccgaggttagcaccaagtaaacctttcactggatgcatccgccacttcgttatcgatggtcaccccgttagcttctcaaaagccgctcttgtctccggagctgtaagcatcaacagctgcccagccgcata

SEQ ID NO: 228088 - DNA, 5451 bp, synthetic construct
  misc_feature 1..5451: note = Description of Artificial Sequence: Synthetic coding sequence
  source 1..5451: mol_type = other DNA
atggctttgtcttccgcttggcgctctgtgctgcccttatggctcctctggtcagccgcttgcagtagagcggcatctggagacgacaatgccttcccatttgacatcgagggctccagtgcggtgggacggcaggacccaccagaaactagtgagccacgcgtggctctgggaagactaccaccagcagctgagaagtgtaatgcagggtttttccacacgttaagcggtgaatgtgtcccatgcgattgtaacgggaatagcaacgaatgcctagatggtagtggatattgtgttcattgtcagagaaataccaccggagagcactgtgaaaaatgtttagatggctacataggcgattccatcaggggagcaccacagttttgccagccctgcccttgccccctgccccatctcgcaaattttgccgaaagctgctatcgaaaaaatggggctgtgcgctgtatctgcaacgagaactacgctggtcccaactgcgaacgttgcgctcccggatattacggtaatccactgctgattggctctacatgcaagaagtgtgattgtagtggaaacagcgatcctaacttgatctttgaggactgtgacgaagtcaccggacagtgccgcaattgtctccgcaacacgacaggcttcaagtgtgaacggtgcgcccctggctattatggggacgccaggattgctaagaactgtgcagtgtgtaactgtggaggcggtccctgcgactctgtgaccggggaatgcttggaggagggttttgagccccctacagggtgtgataagtgtgtctgggacttaaccgatgccttgagacttgcagccctcagtatcgaagagggaaaaagtggggttctctccgtgtcttcaggagccgcagcccaccgccacgtcaacgagatcaacgccacaatctacctgttaaaaacaaagctgtcggaacgtgagaatcagtacgccctccggaagatacagattaacaacgcggagaacacaatgaaatcgctgctttcagatgtagaagagctggtcgagaaggaaaatcaagccagccggaaagggcagctggtgcagaaagagagcatggatacaattaatcacgcttctcagctagtggaacaggcccacgacatgcgggacaagattcaggagatcaacaataaaatgctgtattacggcgaggagcatgagctctcgcccaaagaaatttccgagaaactcgttctcgcacagaaaatgctggaggagatccgctcccgccagcctttcttcactcagagagagcttgttgacgaggaggccgacgaagcctacgagctcctgtctcaggccgagagctggcaacggctgcacaacgagacccgcacgttatttccagtagttctggaacagctggatgattataatgccaagctatccgatctccaggaagcgctagatcaggccttgaattatgtccgggacgcggaagatatgaaccgcgcaaccgcagcgaggcagcgagatcatgagaagcagcaagaacgggttagggagcagatggaagtcgttaatatgagtttaagcacttctgcggacagcctgactaccccacgtttgacccttagcgagttagacgatattatcaagaacgcatcgggcatctatgccgagatcgatggggctaagtctgagctacaagtcaagctttccaatctatccaacctgagtcacgacctagtgcaggaggccattgaccacgctcaggaccttcagcaggaggctaacgaactcagtcgcaagctgcatagcagcgacatgaacggcctcgtccagaaagcactggacgccagcaatgtctacgaaaatatcgttaactatgtgtctgaggccaatgagaccgccgagttcgcgttaaatactactgaccggatctacgacgctgtcagcggcattgatacccagataatttaccataaggatgagtccgaaaatcttctgaatcaggccagagagttacaggctaaggctgaatcctcatctgacgaggccgtcgctgataccagtaggcgagtcggtggcgctctcgctagaaagagtgccctcaagacccggcttagtgatgccgttaagcagctgcaggccgctgagcggggagacgcccagcagaggctgggccaaagcagattaatcaccgaggaagcaaatcgcactacgatggaggtacagcaagccaccgcccctatggcaaataatctgaccaactggtcccagaacctacagcattttgactccagcgcttataacaccgctgtcaattctgcacgagatgccgtacgcaatttgactgaggttgtgccccaacttctcgaccagcttcgcaccgtagaacagaagcggcctgccagcaacgtctccgccagcatacaaagaatccgcgagctcattgctcaaaccaggtcagtcgcatctaaaattcaagtgagtatgatgttcgatggacaatcagctgttgaagttcatagccgaacatctatggatgatctaaaggcttttactagcctgagtctttacatgaagccgcctgttaagagacctgagctgaccgaaacagcagatcaattcatcctttacttaggctcaaaaaatgccaagaaagagtacatgggtctcgccatcaagaatgataacctggtttatgtatacaacctaggaactaaggacgtggagattcctctcgactccaaacctgtgtcgtcctggccagcttatttttctatcgtaaaaatcgagagagttggaaagcacggcaaggtcttcctgacagtgccgtccctcagctcgaccgccgaggagaagttcataaagaaaggggagttcagtggcgatgactccttgctcgaccttgatccggaggacaccgtgttctacgtcggcggtgtaccctcaaacttcaagctacccacctcgctcaatctccccggattcgtgggatgcttggaacttgcaactctgaacaatgacgtcatctccctttacaacttcaagcacatctataacatggatccttctacctccgtgccctgtgcccgtgacaaactcgcatttacccagagcagagcggcttcttatttctttgatggctctggttacgccgttgtgcgcgatatcactcgtcgaggtaaattcggccaggttactcggttcgatatcgaagtcaggactcctgcggacaacgggcttattctgcttatggtcaatgggagtatgttttttagactcgaaatgcggaatggatatctacatgttttctacgacttcggcttctctggcggaccggtacacctcgaggacaccctgaagaaagcgcagatcaatgacgccaagtaccatgagatcagcatcatctatcacaatgataagaaaatgatcctggtagtagatagaaggcatgtcaagtcaatggataacgaaaaaatgaagatacccttcacagacatctacatcggtggagcacctcctgagatcttgcagtccagggccttacgggcacacctaccactcgatattaacttcaggggttgtatgaaaggctttcagttccagaaaaaggactttaatctgctggagcagactgagacactcggggtcggctacgggtgcccggaggattcacttatttcacggagagcctattttaatggtcagtccttcattgccagcatacagaaaattagttttttcgatggctttgagggcggattcaatttccggacgctccagcccaatggcctgcttttctattacgcgagcggcagcgatgtcttctccattagcctggataacggaacagtgattatggacgtgaagggtatcaaagtacagagcgtagacaaacagtacaacgacggcctgtcccacttcgtgattagttctgtttcacccacgagatacgaacttatagttgataagagcagagtcggcagtaagaatccaacaaagggcaagatagaacaaactcaagctagcgagaagaagttttatttcggtggatccccaattagcgcgcaatacgcgaatttcacaggttgtatatctaacgcatactttaccagggtggacagggatgtcgaagtggaggactttcaaagatatacagaaaaggtgcacactagcctgtacgagtgtcccattgagagctccccgctgttcctgctccacaaaaagggaaaaaacctgtctaagccaaaggccagccagaacaagaagggaggaaagtctaaagatgcaccttcctgggacccagtagccctgaagctccctgagaggaataccccacgtaattcacactgccacctaagtaattctccgagggctatagaacatgcataccagtatggaggcaccgcaaattctcgacaagaattcgagcacttgaagggcgactttggcgcaaagagccaattttccattaggctccggactcgctcctcacatggtatgattttctacgtttccgaccaagaggaaaatgactttatgactctcttcctggcgcacggtagactggtttatatgtttaacgtggggcataagaagctcaagatccgctcccaagagaagtacaacgacgggctgtggcacgacgtgatattcattagggaacggagtagcggccgactggtgattgatgggcttagagtgctggaggagagtctcccacccacagaagccacctggaaaattaaaggccctatttatttggggggagtcgctcccggaaaagccgtcaagaacgtgcagataaatagtatttactctttctctggttgcctctctaacctgcagctcaacggcgcttccatcacctcagcttcacagacctttagcgtgacaccctgtttcgaaggcccaatggagaccggcacgtactttagcaccgaagggggatatgtggttcttgatgaaagcttcaacattggattgaaattcgaaatcgcgttcgaggtcagacctcgcagctcctccgggaccttggttcatggccattccgtgaatggagagtatctgaatgtgcatatgaaaaacggtcaggtgattgtaaaggtcaataacggcattagggatttctccacgtctgtcactccaaagcagtctctctgcgatggccgatggcaccggataacagtgattcgggacagtaacgtggtccagctcgatgtggatagcgaagtgaatcatgtggtgggccctctcaatccaaaacctattgaccaccgtgagcctgtttttgtggggggagttcccgagtcactcctcaccccaagactagccccaagtaagccatttacgggctgtattaggcacttcgtcattgacgggcatcctgttagcttttctaaagccgcactcgtgagcggggcagtctccatcaatagttgtccagccgcatag

SEQ ID NO: 228089 - DNA, 390 bp, synthetic construct
  misc_feature 1..390: note = Description of Artificial Sequence: Synthetic coding sequence
  source 1..390: mol_type = other DNA
atggctttaagcagcgcatggcgtagcgtgcttcccttgtggctgctgtggagtgcggcatgctctcgtgccgcatcaggggacgacaacgcctttcctttcgacattgaggggtccagcgcagtgggacggcaggaccccccagaaacatcagagccccgtgtagctcttgggagactcccacccgctgccgaaaagtgtaacgctggattctttcacaccctgagtggagaatgcgtgccttgcgattgcaatgggaactcaaacgaatgtctggatggctctggctactgtgtgactacagacggggaggaccctggtttttcagcttctgcactgagcttcattttatcttcacaaggcgcaagagaagcccgagcgccaacatag

SEQ ID NO: 228090 - DNA, 363 bp, synthetic construct
  misc_feature 1..363: note = Description of Artificial Sequence: Synthetic coding sequence
  source 1..363: mol_type = other DNA
atggcgctgtcgagtgcctggcgctcagttctgcctttgtggctgctgtggtctgcagcgtgcagtcgcgctgcatcgggcgatgataacgcctttcctttcgacatcgaaggtagcagcgctgtcggcaggcaggatcccccagagacttccgagcccagagtggccctgggcaggttacctccagccgcagaggttcagtgtccatgccactgccatcctgccggagcccctgcccctccacgagcggtaccccactcgtcttttagcttgtcccctcccctgtcatcaccccagtgtctggagagctttacttgggctcgttctgtgaggaagctggagatcaagtcattccccctgtag

SEQ ID NO: 228091 - DNA, 1125 bp, synthetic construct
  misc_feature 1..1125: note = Description of Artificial Sequence: Synthetic coding sequence
  source 1..1125: mol_type = other DNA
atggctttgtcctccgcctggcgtagcgttctccctctttggcttctctggagtgcggcatgctctcgggcagccagtggcgatgacaatgccttccctttcgatatagaggggtctagcgccgtcggaagacaggatccgcctgagactagcgagcctcgagtggcgctcggcagattaccccctgcagcagaaaagtgtaacgccggtttcttccacaccctgagtggcgagtgcgtgccgtgtgactgtaatggaaactcgaatgagtgcctcgacggcagtggctattgcgtacactgccagcgcaacaccacaggcgaacactgcgaaaagtgtttagatggctatataggagactcgatccggggagctccgcaattttgtcagccttgcccatgcccactgccccacttggcaaacttcgcagaatcttgctatcggaagaatggagcggtgcgctgtatttgcaatgagaactacgctggaccaaactgcgagagatgcgcgcctggatactacgggaatccattactgattgggtctacatgtaagaagtgtgattgctcgggaaacagtgacccaaacctgatttttgaggattgcgatgaggtaaccgggcagtgtcgcaactgcttaagaaacactacgggattcaagtgcgagcgatgtgcccctggctactatggcgacgctaggatcgccaaaaattgcgctgtgtgtaactgcggcggaggtccttgtgacagcgtcaccggggagtgcttggaagagggatttgaaccaccgactgggatggactgcccgaccatcagctgcgacaagtgtgtttgggaccttaccgatgcactcaggctagccgcactgagcatcgaagaggggaagagcggcgtgctaagtgtttccagcggggcagctgcccaccgtcacgtgaatgagatcaatgccaccatttatctgcttaaaactaagttatctgaaagggagaatcagtatgcactccgcaaaatacagatcaataacgccgaaaacactatgaaatctcttttgagcgacgtagaagagctggtcgaaaagcattggaataagcccaggcgcagactcgaattgcaggagggggtttag

SEQ ID NO: 228092 - DNA, 363 bp, synthetic construct
  misc_feature 1..363: note = Description of Artificial Sequence: Synthetic coding sequence
  source 1..363: mol_type = other DNA
atggccctgagctccgcttggaggtccgtcctgccgctctggttgttgtggtcagccgcttgttccagggccgcttctggcgacgataacgcatttccattcgatatcgaagggtcatcagcggtcggcaggcaggatcccccagaaacgagtgagcctcgggtcgccctcggaagacttccccctgcagcggaggttcagtgcccatgtcattgccaccctgctggcgctcctgcgcctccccgagccgtacctcacagctcattttctctctctccgccattgtcttcgcctcagtgtctggaatcctttacctgggcccgaagtgtcaggaaactggagataaaaagctttcccctttag

SEQ ID NO: 228093 - DNA, 324 bp, synthetic construct
  misc_feature 1..324: note = Description of Artificial Sequence: Synthetic coding sequence
  source 1..324: mol_type = other DNA
atggcccttagtagcgcctggagaagtgtgctgcctctctggctcctgtggagcgccgcatgtagtcgcgctgcatcaggagatgacaacgcttttccgtttgatatcgagggctccagtgctgtggggagacaagaccctccagaaacctcagagcctcgtgtggctttgggtcggctaccacccgctgcagagaagtgcaatgcagggttcttccacaccctcagcggggagtgcgtcccgtgtgactgcaatgggaacagtaacgagtgtctcgatggctctgggtactgcgtccactgtcagcgcaacacaaccggctag

SEQ ID NO: 228094 - DNA, 996 bp, synthetic construct
  misc_feature 1..996: note = Description of Artificial Sequence: Synthetic coding sequence
  source 1..996: mol_type = other DNA
atggccctgagcagcgcctggcgatccgtactgccattgtggcttctctggtctgcggcatgcagccgcgcagcttccggtgacgacaatgcatttcccttcgacatcgaaggctcaagcgcagtaggcagacaggacccccctgaaacttccgaacctcgtgtggccctggggaggctcccacctgccgcagagaaatgcaacgccggtttcttccacaccttgagtggcgagtgtgttccctgtgattgtaacgggaactcaaacgaatgtctagatgggtccggctactgcgtgcattgccagcggaacacgaccggagagcactgtgaaaagtgcctcgatgggtacattggcgatagtattaggggcgcaccccagttctgtcagccatgtccttgccccctcccccatctcgcaaattttgccgaatcatgctaccgtaagaacggcgcagtaaggtgcatctgcaacgagaactatgcaggccctaactgtgaaaggtgcgccccaggttattacggcaatccgctactcattggctcgacctgtaagaaatgcgactgcagcgggaattccgatccaaatctcatcttcgaagactgcgacgaggttactggacagtgcaggaattgcttgaggaataccaccggttttaagtgtgaacgatgtgcgcctgggtactacggagacgccagaattgccaaaaattgcgctgtgtgtaactgcggcggaggcccatgtgactccgtgaccggcgagtgcctcgaggagggctttgagcctcccaccggcatggactgtccaaccatctcatgcgacaaatgcgtgtgggatcttaccgatgctctgagactggcagctctatccattgaagaggggaagagcggtgttttgtccgtctcttccggcgcagcagcacatcgacatgttaatgaaataaacgcaactatatatcttctaaagactaaattgtccgagcgagagaatcagtag

SEQ ID NO: 228095 - DNA, 246 bp, synthetic construct
  misc_feature 1..246: note = Description of Artificial Sequence: Synthetic coding sequence
  source 1..246: mol_type = other DNA
atggccctatcctctgcgtggcggtctgtgctgccactttggctgctgtggagtgcagcatgctcaagggctgcgtcaggggatgataatgccttcccctttgacatcgaaggctcttccgccgtggggcgtcaagacccacctgaaactagtgagccacgcgtcgccctgggtcgcttgccccctgccgcagagaagtgcaatgctgggttctttcatacactcagcggtgagtgcgtcccatag

SEQ ID NO: 228096 - DNA, 5450 bp, synthetic construct
  misc_feature 1..5450: note = Description of Artificial Sequence: Synthetic coding sequence
  source 1..5450: mol_type = other DNA
atggcactatcatcagcttggagaagcgtgttaccactgtggttactgtggtccgcggcttgttcccgcgctgcttctggggatgacaacgctttccccttcgatattgaagggagcagcgcagtaggtagacaagatcctcccgaaacgtccgagcctcgcgtggctctggggagactgcctccagcggctgaaaagtgtaacgcaggtttttttcacactctttcaggcgaatgcgtgccctgcgactgtaacggtaattccaacgaatgcctggacgggagcggctattgcgtgcactgccagcggaacacgaccggggagcattgcgaaaagtgccttgatggttatattggcgactcaatccgcggagccccacagttttgccagccctgtccgtgtcctctgccccacctggctaacttcgcagagtcttgctaccgcaaaaatggcgctgtcagatgcatttgtaatgagaactatgccggtccaaactgcgagagatgcgcccctggttactatggaaaccctttgctgattggaagcacttgtaagaagtgcgactgctcaggaaactcggaccctaatcttatatttgaggactgcgatgaggtgacaggtcaatgtcgcaactgtctgcgaaataccacaggttttaagtgtgagcggtgtgccccaggatattacggggatgctcggattgccaaaaattgcgctgtctgcaattgtggtggaggaccctgcgactctgttactggcgagtgtctggaggagggatttgaacccccaaccggctgtgacaagtgtgtctgggacctaactgacgccctccggctggcggctctaagcatcgaggagggtaagtcaggtgtcttgtccgtcagtagcggcgcagccgcacacaggcacgtcaatgagattaacgccaccatttatctgttaaagacaaaactgagcgaaagggaaaatcagtacgctctgcggaagatccagatcaacaacgcagagaatacaatgaagtcgttactcagtgatgttgaagagctggtggagaaggaaaatcaggctagccggaagggccagcttgtgcaaaaggaaagtatggatacaatcaaccacgccagtcagcttgtcgagcaggcccacgatatgagggataagatacaggagattaacaataaaatgctgtactatggcgaggaacatgaactttcaccaaaagagatctccgagaagctcgtactggcccagaagatgctggaggaaatacgatccaggcagccattttttacccaaagggaactagtggatgaggaagctgatgaagcctacgaactgctcagccaagcagagagttggcagaggctgcacaacgaaaccaggactctgtttcctgtggtgctggaacagcttgatgactacaatgcaaagctcagcgacctacaggaagccttggatcaggccctgaactatgttcgcgacgctgaggatatgaacagggcaactgccgcacgtcagagagatcacgaaaaacaacaagagagagttcgcgaacaaatggaggtggttaacatgtccctgagcactagtgccgactcccttacaacgccaagactgacgctcagcgaacttgacgatattatcaaaaacgcctcaggtatatatgcagagattgacggggctaagtcggagctccaggtgaaacttagcaacctttctaacctgtcacacgatctcgttcaggaggctatcgatcacgcacaagatctgcagcaggaggccaacgagctgtctcggaaacttcacagctcggacatgaacgggctggtgcagaaggctcttgacgcgtcaaatgtgtatgagaatatcgtaaactatgttagcgaagccaatgagaccgccgaatttgcattaaacacaacggataggatctatgacgctgtgagtgggattgacacgcagattatctaccacaaggacgagagtgagaacctgctgaatcaggctagagagctacaagcgaaggccgaaagcagcagcgatgaggcagtggcggacacctcaaggcgggtgggcggtgctctggccagaaagtcagcacttaaaacccgcctgtctgacgccgtcaagcaactgcaggccgcagagcgaggtgacgcccagcaacggttgggccaatcccgactgatcactgaagaagcgaatagaaccacgatggaagtgcagcaggccaccgcaccgatggctaataacctgactaattggtcacaaaaccttcagcactttgacagctctgcatacaacaccgccgttaattccgcgagagatgcagtccggaacctgactgaagttgttccccagctgttggatcagttgcggaccgtggagcagaagcggccagccagtaatgtcagtgcaagcatacagaggattagggagctgatcgcccagacccgtagcgtggcgtcaaagatacaggtcagtatgatgttcgatggacagagtgcggtcgaggtccactcccggacgtctatggatgacctgaaagcctttacatcgctttctttgtatatgaagcccccagtaaaaagaccagaactaactgagacagcggaccaattcatactctatttggggtcaaagaacgctaagaaggagtacatgggactggctattaagaacgataacctggtgtacgtgtacaatcttggcacgaaggacgtggagatcccacttgatagcaagccggttagttcatggccggcttacttcagcattgttaagatagagagagttggtaagcacggaaaggtcttcctcaccgtccccagcctgagttccacggctgaagaaaaattcattaagaaaggggagttctcaggggacgactccctcctggatctggaccctgaggataccgtgttctatgtgggcggagttccaagcaacttcaaactcccaaccagcttgaatttgccaggtttcgtaggatgcctcgagctcgccaccttaaataatgatgtaatcagcctttacaacttcaagcacatctacaacatggatcccagcaccagcgtgccatgtgcgagagataagctcgccttcacacagtccagagctgcatcctatttctttgacggatccggttatgcagtggtgcgagatatcacccgcagagggaagttcgggcaggtaacaagatttgacatcgaagtcagaacaccagccgacaacggccttatactgctaatggttaatggtagtatgtttttccgcctggagatgcggaatgggtacctccacgtcttttacgattttggattttcaggcggtccggttcacctggaggacacccttaaaaaagcccagatcaacgatgcaaagtatcatgagatttccattatctaccacaacgataaaaaaatgatccttgttgtcgatcggcgtcatgtgaagtccatggataacgaaaaaatgaaaatcccgttcactgatatatatatcggcggtgctccgccagaaatcctgcaatcacgggcactgagggcccacttgcccctggacatcaatttcagaggttgcatgaaggggttccagttccagaaaaaagacttcaaccttctggaacagacagaaaccttgggggttggatatggttgccctgaagactctctgatttcaagacgcgcttacttcaatggccagagttttattgcgagcatccagaagatcagtttcttcgacggattcgagggcggttttaatttcagaactctccagcctaacgggctgttgttctactatgcgtcagggagtgatgtcttttctatcagcctggataatggcactgtcattatggatgtgaaagggatcaaggtgcagtcagtggacaagcagtataacgatggactgtcacactttgtgatctctagtgtgtcccctacaagatacgagctcattgtcgacaagtcccgcgtgggaagcaaaaatcccacaaaaggtaagatcgagcagacccaggcatccgaaaagaaattttatttcgggggttcgccgatctcagctcagtacgccaatttcactggttgcatctccaatgcctattttactcgcgttgatcgcgatgtggaagtcgaagacttccagcggtatacagaaaaggtgcacacctctctgtatgagtgtccaattgaatcttccccattgttcctgctccacaaaaagggcaagaacctgtccaagccaaaagccagccaaaacaagaagggcggaaaatccaaagatgctccttcatgggatcctgtggctctaaagctccccgaacgcaacactcccagaaattcacattgccacctcagcaacagccctcgggcaatcgagcacgcttatcagtatggcggaactgccaacagtagacaggagttcgagcacctgaaaggggattttggcgctaaatctcagttttccatacgactcaggactagatcttcacacgggatgattttctacgtgagcgatcaggaggagaacgactttatgacgctcttcttagcgcatggccgacttgtctatatgtttaatgtggggcacaaaaaactgaaaatcagaagccaagaaaagtacaatgatggtctatggcacgatgttatctttattagggaacgatcatcaggtcgcctggtcatcgacgggctccgggttctcgaggaatcgctgccgccaaccgaagccacttggaaaattaaaggacccatttatctgggaggagtggctccaggcaaagcggtgaagaacgtgcagattaactccatctattctttttcgggatgtctgtctaacctgcagctgaatggcgcaagtattacttcggccagtcagactttctccgtgacaccctgctttgaaggtccaatggaaaccggaacttacttttctactgaaggaggatatgttgttcttgacgagagttttaatatcggtttgaaatttgaaatcgccttcgaggtccgcccacggtcatcttccggtaccctggtccacggccactcagttaacggtgagtatctcaatgtccatatgaagaacggccaggttattgtcaaagtgaacaacggaatacgggatttttctacttccgtgacacccaaacagagtctctgcgacgggcgatggcatagaattacagtgatacgagactccaacgttgtccaactagatgtagacagcgaggtaaatcatgtggttggcccactaaacccaaagcctatcgatcatagggaacccgtcttcgtaggtggcgtgcctgagtccctgcttacccccaggctggctccttcgaaaccgttcactggctgtattcgacactttgtgattgatggccatccagtcagtttctcaaaggctgcactagtttctggggcagtcagcatcaactcttgccctgctgcata

SEQ ID NO: 228097 - DNA, 975 bp, synthetic construct
  misc_feature 1..975: note = Description of Artificial Sequence: Synthetic coding sequence
  source 1..975: mol_type = other DNA
atggcactttctagcgcttggcggtcagtgttgcctctgtggctattatggagcgccgcatgctcccgggcagcctccggcgatgacaacgctttccctttcgacatcgaagggtcctccgctgtgggcaggcaggaccctcctgaaacttcggagccaagagtggcattggggaggcttccacctgcggcagagaaatgtaacgcaggattctttcacacgttgtctggggagtgtgtgccttgcgactgtaacggcaactcaaacgagtgtctagatggttcaggttactgtgtgcactgccaacgcaacacaactggggagcactgtgagaaatgtttagatggatacatcggcgactccattcgcggagcgccacagttttgccaaccgtgcccatgcccactcccccacctcgccaattttgctgaatcctgctatcgcaagaacggcgcagtacgctgcatctgcaatgagaactatgctggtccgaattgtgaacgctgcgctcctgggtactatggaaatcccctcttgataggctccacttgcaaaaagtgcgattgtagtggcaatagcgacccaaatctaatttttgaggactgcgacgaagtgaccggccagtgccgtaactgcctgagaaacaccactggcttcaagtgcgagagatgcgctcccggatattacggcgacgccaggattgctaagaattgtgcagtgtgcaattgcggcggtggtccttgcgactcagtcacgggggagtgcctggaagaaggattcgaacctccgacagggtgcgataaatgcgtatgggatctcacggatgcactccggctcgccgctctgagtattgaggaaggcaagtcaggcgtgttgtcggtttcttccggagccgctgcccatcggcatgtcaatgaaattaatgccacaatctatttgctgaaaaagacaaagcaaaagaataacaaaaaatag

SEQ ID NO: 228098 - DNA, 11088 bp, synthetic construct
  misc_feature 1..11088: note = Description of Artificial Sequence: Synthetic coding sequence
  source 1..11088: mol_type = other DNA
atggcaaaacgattatgcgccggaagcgccttgtgcgtgcgagggccacggggtccggctccactcctcctggttggcctcgctttgcttggcgctgcccgagccagagaggaggcaggcggagggttctccttacatcccccatactttaatcttgctgaaggtgccagaatagcagcatcagcgacatgcggggaggaggcgccagcccgtggatcccctaggcctacggaagacctctattgtaaattagtcggagggccagtggcagggggagaccccaatcagactattcggggacaatactgcgacatctgtactgcagcaaattctaataaggcacatcctgcttcaaacgccatcgacgggaccgaacgatggtggcagtcaccgccactgtcacggggtctggaatacaacgaggtgaacgtgacacttgacttaggacaggtgtttcacgtggcctacgtccttattaaatttgctaatagcccgaggcctgacctatgggtgctggagagatctatggactttggacgcacttatcaaccatggcaattttttgcgtccagcaagagagattgtctcgagaggtttggtcctcagacacttgagcgcataactagagatgacgcagccatctgcaccactgaatacagtagaatcgtcccactcgaaaatggagaaatagttgtgagcctggttaatggacggcctggcgcaatgaattttagctacagcccgctgctacgagagtttacaaaagcaacaaatgtcaggctgcgtttcttgagaaccaataccttgctgggtcatctgatgggcaaagctcttcgtgaccctactgtaactagacgctactattatagcataaaagacatctccatcggaggcagatgcgtctgccatggtcatgcggacgcctgtgatgctaaggacccgacagaccctttcagactgcaatgtacctgccaacacaatacgtgcgggggaacatgcgatagatgctgccctggcttcaaccaacaaccatggaaaccagccactgccaattctgctaatgaatgtcagtcctgtaactgttacggacatgcaactgattgttactatgaccccgaggtggataggcgacgcgcatcccagagtctggacggtacgtaccaagggggtggcgtgtgtatagactgtcaacaccataccactggcgtgaattgcgagaggtgcctccctggcttttataggagcccaaatcatcctcttgactcacctcacgtctgtagacggtgcaattgcgagtcagactttacagacgggacctgcgaggatctcaccggaagatgctactgtcgtccgaatttcagtggcgaaaggtgcgacgtttgcgcggaaggtttcactgggtttcctagttgctatccaaccccttcatcatccaacgacactcgggaacaggttttacccgcaggacaaatagtgaactgcgattgctccgctgcgggtacccaaggcaacgcctgccggaaagatccccgtgtgggcagatgcctgtgtaaaccgaatttccagggcacccattgcgaattgtgtgcgcctgggttctatggccctggctgtcagccatgtcaatgtagctctcctggtgttgctgatgacagatgtgaccccgacacaggtcaatgcaggtgccgtgtcggttttgaaggagccacatgcgaccgttgtgctccgggatatttccatttccccctttgtcaactgtgtggatgttcacctgccggaactcttccagagggatgtgatgaagctggtcgatgtctgtgccagccagagttcgctggaccgcactgcgatcggtgtagacccggataccacgggttcccaaattgtcaggcctgcacctgtgaccctaggggagctcttgaccagctgtgcggcgctgggggactctgcaggtgccgcccaggatacactggaactgcctgtcaggagtgcagtcccggttttcatgggtttccctcttgtgtgccctgtcactgtagcgcagaaggttctctgcacgcagcttgtgatccacgatctggacagtgttcttgtagaccacgggtgaccggtcttaggtgtgacacatgcgtgcccggagcgtacaacttcccatactgcgaggccggttcctgtcaccccgcaggattggcccctgttgacccggcactgccagaggcccaagtcccatgcatgtgtcgggctcacgtggagggcccttcctgtgaccgctgcaagcccggattttgggggctctctccctctaatccggaagggtgcacacgttgctcctgcgacctacgcggaacacttggcggtgtggccgagtgccagcctgggaccgggcagtgcttctgcaaaccccatgtgtgcggacaggcgtgtgcatcgtgtaaggacggtttcttcgggctcgatcaggccgattacttcgggtgtaggagctgtcgctgtgacattggaggggctctgggacaatcttgcgagccaagaaccggcgtatgcaggtgtcgccctaacactcagggcccaacctgctccgaacccgcaagagaccattacctgcccgacctgcaccacttaagactagagctcgaggaagcagctaccccggagggccacgccgttaggtttgggttcaaccccttagaatttgagaacttcagctggcggggatacgcccagatggctccggtacagcctaggatcgtagccaggctcaacctgacttcccccgatttgttttggctggtgttccggtacgtgaatcgcggagccatgtccgtgagtgggcgagtgagtgttagggaagaggggagatcggctacctgtgctaactgcacagctcagtctcagcccgtggcttttccccctagtacggaacccgctttcatcacggtaccccaaagggggttcggcgagccttttgtgttgaatccgggtacatgggctctgcgcgtggaggctgagggcgtcctccttgactacgttgtgttgcttccgtccgcgtattacgaggctgcacttctccagcttcgagtgactgaagcctgcacctacaggccaagcgcccaacagagtggggataactgcctcttatatactcacctgcctcttgatggtttccccagtgccgcaggtctggaagccctctgtaggcaggacaattcactgccccgtccatgccccacagaacaactcagcccttcacatcccccactgatcacatgtacaggcagcgatgtcgatgtgcaactccaggtcgccgtgccccaacccggacgatatgctttagtcgttgagtacgccaatgaagacgcaagacaggaagttggcgtggctgtacacacgccacagagggctccacagcaaggactcctttccctgcatccctgcctgtattcaacactctgtcgcggtaccgcgagggatacacaggaccacttggctgtgtttcatttggatagcgaagcctcagtgagattaacagctgaacaggcccgtttctttctccacggcgttaccttggttcccatcgaggaattttcacctgagttcgtggaacctagagtctcctgtatttctagccacggcgcttttggacctaacagtgcagcatgtctgcctagccgcttccccaagcctcctcagcctataattcttcgggattgccaggtgattcccctgcctcctggactcccactaactcatgcccaagatctcacccccgcaatgtcacccgctggaccacgcccacgcccacccactgctgtagacccagacgccgagcctacacttctacgcgagccacaggctacagttgtttttacaacccacgtgccaacgttgggacgttacgcttttctgctgcatggataccagccagcccatccgacttttccagtggaggtcctgatcaacgccggacgcgtgtggcaaggtcacgccaacgcttccttctgtccacatggttacggctgcagaactttggtggtttgtgagggacaggctctgcttgacgtgactcattccgaactgacagtgacagtcagggtccctaaaggaagatggctctggctcgattacgtcttagtggtccccgagaatgtgtactctttcggctatctcagggaggagcctctcgataagtcctacgacttcatctcgcactgcgccgctcaaggttaccatataagtccatcctccagttcgttgttttgccgcaacgcagctgcctctttatcactattctacaataacggcgcacgaccctgtggttgccacgaggtcggcgctacagggcctacatgcgaaccattcgggggacagtgcccctgtcacgcccatgttataggccgtgactgtagtaggtgtgccacaggatattggggtttcccaaactgccggccttgcgactgcggcgcacgcctgtgtgacgagttgactggtcagtgcatctgtcccccacgtacaatcccaccagactgcctcctgtgccagccccaaaccttcggctgtcaccctctggttggctgtgaagaatgtaactgttccggccctgggattcaggaattaacagaccctacgtgtgatactgactctggacagtgtaaatgtcggccaaatgtgactgggaggagatgcgatacttgttctcctggattccacgggtacccgcgatgtcgcccttgtgactgtcatgaggcaggaacggccccaggagtatgcgacccgctgacgggccagtgctactgcaaggaaaatgtgcagggtccaaaatgtgaccagtgtagcctgggcaccttctcacttgatgccgcaaatccgaaggggtgcacgagatgcttctgtttcggggcaacagaacgctgtcgctcaagctcttatacccgccaggaattcgtggatatggagggatgggttctcctctcaactgacaggcaggtggtgcctcatgagagacagcctggtactgagatgctacgcgctgatctcaggcacgtgcctgaagccgtgccagaggcttttcccgaactctattggcaagctccaccaagctacctcggtgaccgagtgtcatcgtatggaggaacactccggtatgagctgcattccgaaacccagaggggcgacgtgtttgtgcctatggaaagtcggccagacgtggtgctgcagggaaatcagatgtccatcaccttcctcgagcccgcttaccccacaccaggacacgtccatcgcggacaattgcaactcgtggagggaaacttccggcacacggaaactaggaacaccgtgtccagagaggagctaatgatggtgctcgcttccctagagcaactccaaatccgcgcattgttctcacagatctcatctgccgtgttcctcaggagggttgctcttgaagtcgcctcaccagctgggcagggagccctggccagcaatgtggagttatgtctgtgtccagcctcttaccgcggagattcctgccaggagtgcgctccaggcttctacagagatgtgaaaggattgttcctggggaggtgtgtgccttgccagtgccatggacacagcgaccgttgtctgccagggtctggggtgtgtgtggactgtcagcataacacagagggagcccattgtgagagatgtcaagccggttttgtgagctccagagatgatccatccgccccttgcgtctcctgtccttgtccattaagtgtgcctagtaataattttgcagaaggttgtgtactgaggggaggacgcacccagtgtttgtgcaagccagggtatgccggagccagctgcgaacgatgcgcacctggcttttttggaaaccctctggtgctgggaagctcctgtcagccctgcgactgcagcggcaatggcgatcccaacttactgttcagcgattgtgatcccctaacgggcgcttgccgaggatgtctgagacacacgacgggcccacggtgcgaaatctgcgctccgggtttctacggcaatgcgttgctacccggaaattgcacccgttgcgactgcactccatgtggcaccgaggcttgcgatccacatagcggccactgtctgtgcaaggctggtgtcacgggtcggaggtgcgataggtgtcaggaaggtcacttcggtttcgatggttgcggtggatgtcgaccttgcgcttgcggcccagcagccgaagggtccgagtgccacccgcaatcgggccagtgtcactgcaggcctggaactatggggcctcagtgccgcgagtgcgctcctggctactggggcctcccagaacagggatgcagacgatgtcagtgtcccggtgggagatgcgacccccacaccgggcgatgcaactgtccaccaggcctgtctggagaaagatgcgatacttgttctcaacaacatcaggtccctgttcccggtgggcctgttggtcacagcatacattgcgaagtatgtgaccactgtgttgttctgctgttggatgacctcgaaagggctggcgcactgctccccgctattcatgagcaactgcgcggtatcaacgccagctctatggcctgggcccgtctccacaggctcaacgcttccatcgccgacctgcagagccagctccgatctccacttggacctagacatgagaccgcccaacagcttgaggtgctggagcaacaatcaacaagtcttgggcaggatgcccgacgactgggtggtcaggccgtcggtacccgggaccaggcgtcacagctgctcgccggaacagaggctacactggggcatgcaaagacgctgcttgctgccattagagccgtagacaggacactatccgagctgatgagccagaccggccacctcggattggccaatgcttccgctccgtccggggagcaactgcttagaacgcttgcagaagtggagcgcctgctgtgggaaatgagggcccgtgacctcggagctccgcaggcggcagccgaggccgaattggctgcggctcagcgattgctcgcccgagttcaggagcagctatcgagtctgtgggaggaaaaccaagcactcgccactcaaacgcgagaccgcctcgcccaacatgaggccggtttaatggatctcagggaggccctgaatagggccgtggatgcaacaagggaggcacaggaactcaactcgcggaatcaagagcgcttggaagaggccttgcaaagaaagcaggagctgtctcgcgataacgcgacgctgcaggcgacactgcacgccgctagagataccctggccagtgtattccggctactccactctcttgaccaagccaaagaggagttggaaaggttggcggcttcactagatggggcacgcaccccgctactacagaggatgcaaacattcagccccgctggttccaaactgagacttgtggaagctgctgaggcccacgcccagcagctcggacagctcgcgctgaacctgtcatccatcattctggatgtcaaccaggacaggctgacgcagcgcgctatagaggcgtctaacgcatacagtcgaatcctgcaggctgtgcaggccgctgaagatgctgctgggcaggcgctgcagcaggctgaccacacttgggcaaccgttgtccggcaggggctggtggatcgcgcacagcagctgctggctaatagcactgccctggaggaggccatgctgcaagagcaacagaggttaggcttagtctgggccgctctccagggtgcaaggacccagctacgcgacgtacgtgctaagaaggaccagctcgaagctcacatacaggctgcacaagctatgcttgctatggatacagacgaaaccagcaaaaagattgcccacgcaaaggcggtggcagccgaggcacaggatacagcgacaagggtgcaatcacagctgcaggccatgcaggagaatgttgagagatggcaagggcaatatgaaggcctcagaggccaagacctgggccaggctgtgctggatgcaggccatagcgtgagcacactggaaaagactcttcctcaactgctagcaaagctgtccatcttagaaaacaggggtgtccacaacgccagtctggccctgtccgcttccatcggccgtgtgagggagctcatcgcccaggccaggggtgcagccagcaaggtgaaggtacccatgaaattcaatggcaggagcggggtgcaactgaggacaccaagggacttggccgacctggctgcttacaccgcactaaagttctatcttcagggtcctgagcctgagcctggacagggcactgaggaccgatttgtgatgtatatgggctcacgccaggctacaggggactacatgggagtgagcttgcgggacaagaaagtgcattgggtgtatcagctcggagaggctggccctgctgtgttgagcattgacgaggacatcggtgaacagtttgcggcagtgagccttgatcgcacgctccagtttggtcatatgtccgttaccgtcgagagacagatgatacaggagacgaagggcgacacagtggcccctggagcagaagggctgttaaaccttaggcccgacgattttgtattctatgtgggtggatatcccagcacttttacccctcctcccttgcttcgtttcccgggttacaggggctgtatcgagatggatacactgaatgaagaagtggtctccctgtataactttgagaggacctttcagctggacacagccgtcgaccgaccatgtgctcgctctaagagcactggagatccctggctgaccgatggcagctatttagatgggactggctttgccaggatttccttcgactcccagatttcaacaaccaaaagatttgaacaagagctgaggctggtttcatacagtggagtactgttttttctgaaacagcagagccaattcctgtgtctggcagtgcaggagggctctttagtccttctgtacgactttggagccggactgaagaaggccgtcccacttcagcctcctcccccactgacctcagccagcaaggctatacaggttttcttattagggggtagtaggaagagggtgctggtcagagtagagcgagcaacagtttactcggtcgaacaggacaacgatcttgaactcgcggacgcctattatctgggaggagtgccccctgaccagctacccccttctctgcgccgtctcttccccaccggaggatctgtccggggatgcgttaaaggtataaaggcgctggggaaatatgttgacctgaaacgcctcaatactacaggagtgtccgccggatgtaccgcagacctcctggttggcagagctatgacctttcacggacatggatttttgcgcctggcactgtccaatgtggcacctctgaccggtaacgtgtattcaggctttggatttcattctgcacaggatagtgccttactctactatagggcttccccagatgggctgtgtcaggtgagccttcagcagggtcgggtgtcactgcagctgctgcgtacggaggttaagacacaagccggtttcgcagacggggcacctcactacgttgccttctattctaacgcaaccggggtgtggttgtacgtggatgaccagctccagcagatgaaacctcaccgaggaccacctcccgaacttcagcctcagcccgaagggccacctcgactgttattaggaggactaccggagtccggaaccatttataatttcagcggatgcatatccaacgtgtttgtgcagaggctgttaggccctcagcgggtcttcgacttgcagcagaacctgggaagtgtcaacgtatccacaggatgcgctcccgctctccaggctcagaccccgggactggggcctcggggactacaggccacggccaggaaagcctcgcgacgctcacgccagcctgccagacaccctgcctgcatgctgccgccacatctgaggacaacccgcgatagctaccagttcggcggaagcttatctagtcacttggagtttgttggaatacttgcacgccatagaaactggcctagcctctccatgcacgtcctgcccagaagctcccgtggccttcttctgtttactgctcggttgagaccgggatctccgagcctggccctgtttctgagcaacggccatttcgtggctcagatggaaggactggggaccaggctgagggcccagtctagacaacgatcgcgccctgggcgttggcacaaagtgtccgttagatgggagaagaatagaatcctgctggtgacagatggggcacgagcttggagccaggaaggacctcaccgtcagcatcaaggcgctgaacaccctcagccacacacattgtttgttggtgggctgcctgcttcttcccacagtagcaaactcccagtcaccgttggattttccggttgtgtcaaacgtctgagactgcatgggaggcctctgggagcacctacaaggatggcaggcgttacaccttgcatcctggggccactggaagcagggttgttcttcccaggcagcggcggagtgattacgctggacctgcccggagccactctgcccgacgtggggctagagctcgaagttcgcccacttgctgtgaccgggcttatcttccatctcggccaagcacgaacccccccatacctgcagctccaagtcacggagaagcaggtgctgctccgcgctgacgatggggctggagaattctcaaccagtgtgaccagaccttccgtcttatgtgacggccagtggcatcgactagctgttatgaagagcggcaacgtcttacgactggaggtcgatgctcagtctaatcacaccgttggccctctgctcgcggcagcagccggagccccagctcctctgtacctaggcggactgcccgagcccatggcagtgcagccatggcctcccgcatactgtggctgcatgcgcaggctggccgtcaaccgatctcctgtcgcaatgaccagaagtgtagaggtacatggcgcagtgggggcttcaggctgccccgcagcttag

SEQ ID NO: 228099 - DNA, 1503 bp, synthetic construct
  misc_feature 1..1503: note = Description of Artificial Sequence: Synthetic coding sequence
  source 1..1503: mol_type = other DNA
atggcaaagaggttatgtgcaggctccgccctctgcgttcgcggaccccgaggtcctgcgccactgctcttagtggggttggccctgctgggcgctgcacgcgcacgagaggaggccggtggaggcttcagtttacaccccccatattttaacctggccgaaggcgcaaggattgcagccagcgccacctgcggggaagaagctccagccagaggcagcccacgcccaaccgaagacctgtactgtaagctagtcggagggcctgtagcaggaggagaccccaatcagactatccggggtcaatattgtgatatatgtacagcagcaaacagcaataaagcacatccagcgtcgaacgccattgatggtaccgagaggtggtggcaatcacctcccttatcccggggacttgagtataacgaagtcaatgtgacgctcgatctcgggcaagtgttccatgtggcttacgtcctcattaaatttgccaattcaccaaggccagacctttgggtgctcgagcgcagcatggactttggccgtacttaccagccgtggcagtttttcgcttcctcaaaaagagactgtctggaacgattcggtcctcaaaccctcgagcgtatcactcgggatgatgccgctatttgcaccacggaatattctcgcatcgtacccctggagaatggtgagatcgtggtcagtctcgttaatgggaggccgggagccatgaacttcagttactctcccctcctgcgtgagttcacaaaggccaccaacgttcgcctgagatttctgcgtacaaacactctgctgggccaccttatgggcaaagcactgagagaccccaccgtgactcggagatattattactcgataaaagatattagcatcggtgggcgttgtgtgtgtcatggtcacgctgacgcctgtgacgccaaggaccctaccgatccgttcaggctccagtgcacctgccagcacaatacatgcgggggtacctgcgaccgctgttgccctggctttaaccaacagccatggaagcccgcaacagcaaactcagccaatgaatgtcagtcttgcaattgttacgggcacgctaccgattgctactacgaccccgaggtcgacagaaggcgcgcatcccagagcttggacggcacctaccagggagggggagtctgcattgactgtcagcaccatacgaccggcgtgaattgtgagcgatgccttcccggtttctatagatctccgaatcatcccctggattcaccccacgtgtgccgacgctgtaactgtgaaagtgattttaccgacggcacgtgtgaggatctcactgggagatgctactgtaggcccaacttcagcggcgagcggtgcgacgtatgcgccgaaggcttcaccggttttccgtcatgctaccccaccccctcctcgtcaaatgatacgcgggagcaagttctaccagccggacagattgtcacaaacacaaagatctcatgggtttag

SEQ ID NO: 228100 - DNA, 1587 bp, synthetic construct
  misc_feature 1..1587: note = Description of Artificial Sequence: Synthetic coding sequence
  source 1..1587: mol_type = other DNA
atggccaagagactctgcgctggatcggccctctgtgttcggggacctcgagggccagctcctctactcctggtcggactagccctgttaggcgcagcacgggcaagagaggaagcagggggtggcttctcactccacccgccatattttaacctggctgaaggtgccagaattgctgcctctgcaacgtgtggtgaagaagcccctgcgagaggatcgccccgacctactgaagacctctattgtaagcttgtgggaggaccagtcgcaggcggagatccaaatcagacaattcgcggtcaatattgtgatatttgcactgctgccaattctaataaagctcacccggcttccaacgccatagacgggaccgaaagatggtggcagagcccccctttgagtaggggtttagagtataacgaagtgaacgtgactcttgacctcggccaggttttccatgtggcctacgtattaattaagttcgccaatagccctcgcccagacctatgggttttagagagatccatggatttcggcagaacataccagccgtggcaatttttcgcttcatcaaaacgcgattgtctggaacggtttggtccccagactctggagcggattacccgcgacgatgctgccatatgcacaacagagtacagcagaatagttcccctagagaacggtgagatcgtggtatctctggttaacggtagacctggagccatgaacttttcttatagtcccttgctcagggagtttactaaggccaccaatgttaggcttcgattccttagaaccaatacgctgctgggccatctgatgggcaaggcgcttcgggacccgaccgtgactaggcggtattattactctatcaaggacattagcatcggtggacggtgtgtatgtcacggacacgccgacgcgtgcgatgctaaggatcccacagacccgttccggttacaatgcacgtgtcaacacaacacatgcggcggaacctgcgaccggtgctgccccggtttcaatcagcagccttggaagcctgctaccgcgaattcggccaacgagtgccagtcctgtaattgttacggtcacgcgactgactgttactacgatccggaggtggacagacggagagcttctcagagcctggacggcacataccaggggggaggcgtgtgtattgactgccagcatcacactacaggcgtcaattgcgagcgctgcctccctggcttttatagaagtccaaatcaccccttagacagcccccacgtttgcagacggtgtaattgcgagagcgattttacggacgggacatgtgaagatctcaccggccgatgttactgtcggccaaattttagtggggagcggtgtgacgtctgtgccgaaggcttcactggcttcccttcctgttaccctaccccaagtagctctaatgatacacgggaacaagtgttgccggcaggccagattgttaacggcgttagcctttgcaggcctggctggtcagctgttgcacgatcccgccttacctccacgtctgccagttgggtgcaggcgattttgctgccgcagtcaccggagtag

SEQ ID NO: 228101 - DNA, 2187 bp, synthetic construct
  misc_feature 1..2187: note = Description of Artificial Sequence: Synthetic coding sequence
  source 1..2187: mol_type = other DNA
atgtgggttacgaaattgctgcccgctctgctcctccagcatgtcttgttacacttgttgttgttgcccattgccattccctacgccgaaggccaacgcaagcggaggaacacaatacatgagttcaaaaaatctgctaagaccacgctaattaaaattgatcccgcactcaagattaagactaagaaagtaaataccgcagaccaatgcgccaatcgttgtaccagaaataagggcctgccattcacctgtaaagcctttgtatttgacaaagcacgaaaacagtgcctttggttcccgttcaattccatgagcagtggagtgaaaaaagagttcggtcacgaatttgatctgtatgagaacaaggattatatccggaactgtatcatcggcaaaggaagaagttataaggggacagtgtccattacaaagtcaggtatcaaatgtcaaccgtggtcaagtatgattccgcacgagcattcttttcttccaagtagctacagagggaaagacctgcaggaaaactattgccgcaaccccaggggtgaggaaggcggtccctggtgttttaccagcaaccccgaagtcaggtatgaggtgtgcgacatccctcaatgttcagaggtagaatgcatgacatgcaatggcgaatcataccgcggtctcatggaccataccgaatccggcaagatctgtcagagatgggaccatcagacaccccacaggcataaattccttccggaaaggtatccagataagggattcgacgacaactattgtagaaaccctgacggacagccgcgtccatggtgctacaccctggatccccacaccaggtgggagtactgtgcaatcaaaacgtgcgctgacaatacaatgaacgataccgatgttcccctggaaacaactgagtgtatccagggccaaggagaggggtacagaggaactgtcaatactatttggaacggaatcccatgtcagagatgggactctcaatacccgcatgagcatgatatgacacccgaaaattttaagtgtaaagacctccgggaaaactattgcaggaacccagacggatcagaaagcccctggtgtttcacaacagaccctaacatacgagtcggatactgcagtcagattccgaattgcgacatgagccatggtcaggactgttataggggtaatgggaaaaattatatgggaaatctgtcgcagaccagatctggcctgacttgcagtatgtgggataagaacatggaggatttgcaccggcacatcttttgggagcccgatgccagtaagctcaatgagaactattgtcggaatccagacgacgacgctcatggaccctggtgttacactggaaatccattgattccgtgggattactgccctattagtagatgcgagggcgataccactcctaccattgtgaacctggatcatcccgtaattagctgcgcgaaaacaaagcagctaagggtcgttaacgggatccccacccgtacaaacatcggctggatggttagcctgagatataggaacaaacatatctgtggcggtagtttgattaaggagagctgggtgctcaccgccaggcaatgcttcccgtctagagatctcaaagactatgaggcctggttagggatccatgatgtgcatgggcgaggcgacgaaaagtgcaaacaggtcttgaacgtgtctcagctggtatacggccctgagggcagtgatctcgtacttatgaaactggccagaccagctgtcttagatgacttcgtctcaactatcgaccttcccaactacggttgtacaatcccggagaagacttcatgcagcgtatacggttggggctatacgggccttatcaattatgacggacttctcagagtggcacacttgtacatcatgggtaacgagaaatgttcacagcaccaccgaggaaaggttactcttaatgagtcggaaatttgcgctggcgctgagaaaatcgggagcggcccatgtgaaggcgattacggcggtcctttggtgtgcgaacagcacaagatgcggatggtgctcggggtgatcgtccctggtagaggatgcgccattcctaacaggcccggaatctttgtgcgagtggcctattacgccaagtggatccacaagattatcctgacatacaaagtgccacaatcctag

SEQ ID NO: 228102 - DNA, 276 bp, synthetic construct
  misc_feature 1..276: note = Description of Artificial Sequence: Synthetic coding sequence
  source 1..276: mol_type = other DNA
atgggtctactccaacttcttgcgttctccttcctggccctctgccgtgctcgcgtccgggcacaggagccggaattttcatacggctgcgcggagggctcatgctacccggctactggagatctcctgattggacgagcgcaaaaattgtcggtgacgtctacgtgtgggttacataaacccgagccctattgtatcgtatcgcacctgcaggaggataaaaagtgctttatctgtaatagccaggacccttatcacgagactttgaacccttag

SEQ ID NO: 228103 - DNA, 2553 bp, synthetic construct
  misc_feature 1..2553: note = Description of Artificial Sequence: Synthetic coding sequence
  source 1..2553: mol_type = other DNA
atggggctgctgcagctcctggcatttagctttctggctttatgtcgggctcgcgtcagagctcaggaacccgagttcagctacgggtgtgcagaggggtcttgttatcccgcaacaggagatctactcataggcagggctcaaaagctgtcagtcacaagtacctgcggcctgcataagcctgagccttattgtatagtttcacatctgcaggaggacaagaaatgtttcatttgtaattcacaggatccatatcatgaaacactgaaccctgattcacatctgattgaaaacgtggtcaccacctttgctcccaacaggttaaaaatttggtggcagtccgagaacggcgttgagaatgtaactattcaactggatttagaggctgagttccattttacgcatctcatcatgacattcaaaacttttcgacccgcagccatgttgatcgagaggtcatctgattttggaaagacgtggggcgtttaccggtactttgcctatgactgcgaagcctcttttcctgggatctcaactggaccgatgaaaaaggtggacgacatcatctgtgacagcagatactccgacatcgagccttcgaccgagggggaagtgatcttccgggctctcgaccccgctttcaaaattgaggacccttacagccccagaatccagaatctgcttaaaataacaaatttgcggattaagttcgtaaagcttcatacattaggtgataacctgctcgatagtcggatggagatacgagaaaaatattactacgccgtgtatgatatggtcgttcgaggaaattgcttctgttacggacacgccagcgagtgtgcacccgtggatggcttcaacgaggaagtagaaggcatggtccacggccactgcatgtgcagacacaacaccaaaggcctgaactgcgagctttgcatggacttttaccacgaccttccatggagaccagccgaggggcgtaattcaaatgcatgtaagaaatgtaactgcaacgagcactctattagctgccactttgacatggcggtgtacctggcaaccggtaacgtctctgggggtgtttgcgacgattgccagcacaataccatgggcaggaattgtgagcagtgtaaacccttctattaccaacaccccgaacgtgacattcgcgatcccaatttttgcgagagatgcacatgtgatccagcaggctcccaaaacgaagggatttgtgattcgtacactgacttcagcacgggtctgatagcagggcagtgcaggtgcaagctcaacgtcgagggagaacattgtgatgtgtgtaaggagggcttctacgatttgagctcagaagatccattcggttgcaagtcatgcgcatgtaatccgctgggaacgattccagggggaaatccctgcgactccgaaacgggccactgttattgcaagcgactggtcacgggacagcactgtgaccagtgcctgccggagcactggggcctgtctaacgacctggatgggtgtagaccatgtgactgtgatttagggggagcgcttaataattcttgctttgcggaatcgggacagtgctcctgcagaccacatatgatcgggaggcagtgtaatgaagtggaaccaggttattatttcgcaacattggaccactatttgtacgaagccgaagaggcaaatttgggcccaggagtgtcaatagtggagagacagtacatacaggacagaataccttcttggaccggcgctggttttgtgcgggtccccgaaggtgcctaccttgagttcttcattgacaatattccctattctatggaatacgacattctgattcgatatgagccacagctacccgatcattgggagaaagcagttatcaccgtgcagaggcctggtcgcatacccacatcatcccggtgcggaaatacaatcccagatgacgacaatcaggtggtatcactgagtcccggatctaggtacgtggttctgccacgacccgtgtgctttgagaagggcactaactatacagtcagactggaactgccacagtacacttccagtgacagcgatgtggagtctccttacaccctgattgactcccttgtgctgatgccttattgtaagagcttggatatattcactgtcgggggaagcggcgacggagtggttaccaatagtgcatgggagacctttcaaagataccgctgtctggagaacagcaggtccgtggtgaagaccccaatgaccgacgtgtgtcgcaatattatatttagtatctctgccctcctccatcagaccggcttggcatgcgagtgcgacccacaaggaagcctgtcttctgtgtgcgaccccaatgggggtcaatgtcagtgccgcccaaatgtcgtgggtaggacttgcaataggtgcgccccaggcacattcggttttggaccctctggatgcaaaagacggttcctcaaatccatcgtgatgcacagcttcagacttacccaacccttgtggcaaggctctatcgcggctgaacccatgctgcctagctag

SEQ ID NO: 228104 - DNA, 5396 bp, synthetic construct
  misc_feature 1..5396: note = Description of Artificial Sequence: Synthetic coding sequence
  source 1..5396: mol_type = other DNA
atggagctgaccagtcgggagaggggacgcggtcaacctctcccttgggagctccgcctggggctacttctgtcagtgcttgcagctactctcgcccaggccccagctcccgacgtgccaggatgcagcagaggaagttgctaccccgctaccggggatcttctggtggggcgagcagacagactcaccgcttcttccacgtgcggacttaacggccctcagccctattgtattgtgtcccacctccaggacgagaaaaagtgcttcctgtgcgactcaagacgaccattttctgctagggacaaccctcattcccacaggatccaaaatgtggtgacttcctttgcaccccagcgccgagccgcatggtggcaatcagaaaatggaatccctgccgttactatccagctggacctcgaagctgagttccatttcacacatttgatcatgacattcaaaacatttcggcctgccgctatgctggttgagaggtccgctgactttggacgtacttggcacgtataccgctactttagctacgattgtggtgccgatttccctggcgtccccctggcccctcctagacactgggacgatgtggtttgtgagtcccggtactctgagattgaaccatcgactgaaggagaagttatctaccgggtgctcgatcccgcaattccaattccggacccttacagtagcagaatccagaacctgttgaagataaccaaccttcgggtcaatctcaccagactgcacaccctcggcgataacctgctggaccctcgcagagaaatcagagagaagtactactacgccctttacgagcttgttgttcggggtaactgtttttgctacggccatgcaagcgagtgcgcccctgcgccaggggctccagcccatgctgaaggtatggttcacggggcatgtatctgcaagcataacacacgcggactgaactgcgagcagtgtcaagacttctacagagatctcccttggcgcccagccgaagatgggcacagtcacgcctgccgcaaatgtgaatgtcacggacacactcatagctgccattttgatatggccgtgtatctggcctccggcaacgtatctgggggagtatgtgacggctgtcaacacaatactgcaggccgtcattgtgaactctgccgaccattcttctacagggacccaactaaagatcttcgtgatcccgcagtttgcaggagctgcgattgtgaccctatggggtctcaggatggtggacgctgtgacagccacgacgacccggcactgggactagtgtctggccagtgtagatgtaaagagcacgtggtgggtactagatgccagcaatgtagggatggtttcttcggcctcagtattagtgaccggttaggatgccggcgttgccagtgtaatgcacgtggcacagtaccagggagtacaccctgtgaccccaattccggatcatgttattgcaagaggcttgtgaccgggaggggctgcgacagatgcttacctggacattgggggctcagccacgacttactgggctgcagaccatgtgattgtgacgttggcggagccttggatcctcagtgcgacgaaggcacaggccagtgtcactgtagacagcatatggtcggtcggcgttgtgagcaagtgcagcctggctacttccggcctttcctcgaccacttaatctgggaggcagaagatacacggggacaggtccttgatgttgtagaacggctcgtgacacccggagaaaccccatcttggactggcagtggcttcgtgcggttgcaagaaggccaaaccttggagttcctggtcgccagcgtaccaaaggcaatggattacgacctgttgctcagattagagccacaggtgcctgagcaatgggcagagcttgagctgatagtccagcgcccaggccctgtgcccgctcacagtctctgcgggcacctcgtgccaaaagatgatcgaatccagggtaccttgcagccacacgctcgctatctgatctttcctaatcctgtctgtttggagcccggaatttcctacaagttgcacttgaagctggtgcgcaccggtgggtcagctcagccagaaacaccttactccggaccaggactgcttatcgactccctggttctgctgcccagggtgctggtgctggaaatgtttagcgggggagacgccgctgccctggaacggcaggccaccttcgagagataccagtgccatgaagagggactcgtgcctagcaaaacctctccaagtgaggcctgtgctcccttgcttatctctctcagcaccctcatatacaacggagcgctcccgtgtcagtgtaacccacagggcagtctatcatccgagtgcaacccccacgggggacagtgtctgtgtaaaccaggcgttgttggacggcgatgcgatttatgcgctccagggtactatgggttcgggccaaccggctgtcaggcatgtcagtgcagtcatgagggggcactctcaagcctgtgcgaaaagacaagcggacaatgcctgtgtaggacaggtgccttcggattgcggtgcgatagatgtcagcgaggacagtggggctttccatcatgtagaccttgtgtgtgtaatggccacgctgatgaatgtaacacgcacactggggcatgtctcggttgccgagaccacactggcggtgagcactgcgaaagatgcatagccggattccatggagaccccaggctcccatacggtgggcagtgcagaccctgcccctgccccgaaggacccggtagtcagcgccattttgctacctcctgccaccaggacgaatattctcagcagatcgtgtgtcattgcagagctggctacacagggttgcgctgcgaagcctgtgctcccggacatttcggagacccctctagaccaggtggaaggtgtcagctgtgcgagtgtagcggcaacatcgatcccatggatcccgatgcttgtgatccacacacaggccagtgccttaggtgtttacaccatacggaggggcctcactgtgcgcattgtaaaccaggattccatggacaggccgctaggcagtcctgccacagatgcacttgtaatcttctgggaacgaacccacagcagtgtccgtcgccagaccagtgccactgtgaccccagctcaggccagtgcccctgtctgcctaatgtgcagggtccttcgtgtgacagatgcgcacccaatttttggaatctgaccagcgggcatgggtgccagccttgtgcctgccacccatccagagctcggggacccacctgtaatgaattcacaggccagtgccattgtcgcgcaggatttggaggtaggacctgtagcgagtgtcaggagttgcactggggcgaccccggtttgcaatgccatgcttgcgactgcgactctcgaggtattgacactccccagtgtcataggtttacaggacactgttcttgccgacctggagtgtctggagtgcgctgcgatcagtgcgccagaggcttctctggtatcttcccagcctgccacccatgccacgcttgctttggcgactgggatcgggtcgtgcaagacctggcagcccgaactcagagactggaacagcgggcacaggagttgcagcagactggagtgctaggcgctttcgaaagcagcttttggcacatgcaggaaaagctggggatagtgcagggcatagtgggcgctcgcaacacctctgcggcatccaccgcacagctggtagaagcaaccgaagaactccgacgcgagatcggtgaggccacagagcacctgactcagctagaggctgatctgacggacgtgcaagatgagaattttaatgcaaaccacgcactgagtggcctggagcgggatcggctcgcactaaacctgacgctcaggcagctggatcaacatttagacctgttgaaacacagtaattttctaggggcatacgactccattcgacatgcccatagccagagcgccgaggctgaacgtcgagcgaacactagcgcactggccgtgcccagcccagtcagtaattcagcctccgctcgacatcgcacagaggctctaatggatgcgcagaaagaagatttcaattctaaacatatggccaatcagcgcgcactggggaagctttctgcccatacacacaccttatcactgacagatatcaatgaactggtttgtggagcaccgggagacgccccttgcgcaacctccccatgtggcggagcgggatgtcgggatgaggatggccagccacggtgcgggggtctctcttgtaacggcgcagccgcaaccgcagacctggccctgggacgcgctcgacacactcaagcggaactgcagagggccctcgccgagggcggttctatattgtctcgggtcgctgagacccgcaggcaggcttctgaggcacaacagagggctcaggctgcgctcgataaagccaatgcatccagaggccaggtggagcaggctaatcaggagctgcaggagctgatacagtcagtcaaggatttccttaaccaagagggcgctgaccctgactccattgaaatggttgcaactcgggtactggagctgtcgattcccgcttccgcagagcagattcaacacctcgctggcgcaatcgcggagagggtacgtagtcttgcagatgtggatgccatcctcgccaggacggtaggtgacgtcagacgggcagagcagcttctgcaggatgcccgaagggccagaagctgggccgaggatgagaagcagaaggctgaaaccgtacaggcagcactggaagaggctcagcgcgcacagggcatagcgcagggcgcaataagaggagctgtcgccgacactcgtgacaccgaacaaaccttatatcaagtacaagaaagaatggccggagcagagcgcgctttgagttcagccggtgaaagagcgcgacagttagacgccttgttggaggctctgaaactcaagagggctggcaacagtctggccgctagcaccgctgaggaaactgccggatctgctcaaggtcgagcccaggaagcagagcagttactccggggacctttaggggaccagtatcagactgtcaaagcactggccgagaggaaagcgcaaggcgtactggccgctcaggcacgggcagaacagctgagagatgaggctagggacctgcttcaagccgctcaggacaagcttcagagactccaggaactggaggggacatatgaagagaatgagcgcgctctggaatccaaggcagcccagctagatggactagaagcgagaatgcggtctgttctgcaggcaataaatctgcaggtgcaaatttataatacttgccagta

SEQ ID NO: 228105 - DNA, 1143 bp, synthetic construct
  misc_feature 1..1143: note = Description of Artificial Sequence: Synthetic coding sequence
  source 1..1143: mol_type = other DNA
atgcaggaaaaactggggattgtccaaggcattgttggggcacggaatacgtccgccgcttcaactgcgcagctggtcgaggctacagaagaattgcgcagagaaatcggtgaagcaacagagcacctgacgcagctagaggccgatttgaccgatgtgcaggacgaaaattttaacgcgaaccatgcacttagcggcctagaacgggatcgcctcgccctgaatctcactttgcgtcaactggaccagcatctggacttgctgaagcactcaaacttcctgggcgcatacgactctattcgtcacgcacattcccagagtgcggaagccgagcgaagagcaaacacttcagcacttgcagttccttctcccgttagtaacagcgcttcggctagacatcgcacagaagccctgatggatgctcagaaagaggacttcaattcgaagcacatggctaatcagcgcgcactaggcaagctttctgcacacactcacaccctgtccttaacagacattaacgagttggtctgcggcgcacctggcgacgcaccatgcgccaccagcccatgcggaggcgcagggtgtcgtgatgaggacggacaaccacgctgtgggggactcagctgtaacggagccgctgctaccgccgaccttgccctgggacgcgctaggcatacccaggccgagctgcaaagggcactcgcggagggaggctccattcttagcagagtggcggagaccaggagacaggcgtctgaggcccagcagagggctcaagctgcacttgataaggccaatgcttcccggggtcaagttgaacaggctaatcaggagctgcaggagcttatacagtccgtaaaggacttccttaatcaggagggcgctgatcctgactctattgagatggtcgcgacacgggtactcgagctgtctatcccagcctctgccgaacagatccagcatctggccggtgctatagctgagcgtgtcagaagcctggcagacgtggacgccattttagcccaaggaattgcccagggggctattagaggagcagtagccgacacccgagacacagaacagccagtgcccggaactggagaagacgggcgttgtagagcaggaactgagttgtgtagatag

SEQ ID NO: 228106 - DNA, 5396 bp, synthetic construct
  misc_feature 1..5396: note = Description of Artificial Sequence: Synthetic coding sequence
  source 1..5396: mol_type = other DNA
atggagctgacatctagggagaggggacgtggccagcccctgccatgggaactccgcttggggttgttgctttctgtgctcgcagccaccctcgcccaggcacccgcaccagacgtgcctggatgtagccgcggtagctgttatccggcaacaggtgatctgcttgtgggacgggctgaccgactcacggcatcatccacctgcgggctaaacggaccgcagccctattgcatagtcagtcacctgcaggatgaaaaaaaatgtttcctgtgtgatagcaggcggccattcagcgcaagggataacccccatagccatagaattcaaaacgtggtcacatcctttgcaccgcaacggagagctgcttggtggcagagtgagaatggcattccagcagtcaccattcagttggatctcgaggcggagttccattttacccatctcataatgaccttcaagacatttagacctgccgctatgctggtggagaggagtgctgactttggaaggacctggcacgtctataggtattttagttacgattgcggcgctgattttcccggagtccctcttgcacctcctcgacattgggacgacgtcgtctgtgaaagtcgttattccgaaatcgagcccagcactgagggtgaagtcatctatagagtgctagatcccgctataccaatccccgacccatacagtagcagaatccaaaatttacttaagatcacaaatcttcgcgtgaaccttacacggttgcacacactgggcgataatctactggatcccaggagagaaatcagagagaagtactactatgcgctgtacgagttggttgtgagagggaattgcttttgttacggacatgcctcggaatgcgctcctgcaccgggtgcccctgcacacgcagagggaatggttcacggagcatgcatctgcaaacacaatacgcggggattgaactgcgagcagtgtcaggacttttatcgggatctaccgtggcgtcccgctgaagatgggcactcacatgcttgtcgtaagtgcgaatgtcatggccacactcactcctgtcactttgatatggcagtatacctggccagtgggaacgtgtctggcggtgtgtgcgacggctgtcaacacaacacggcagggaggcactgcgagctttgtcggccatttttctaccgcgatcctacgaaagatctgagagatccagcagtatgcaggtcttgcgactgtgaccctatggggagtcaggatgggggtcgctgtgatagccatgatgatcccgcactcggcctggtaagcggccagtgccgctgtaaggagcatgtggtggggacccggtgtcagcaatgccgcgatgggtttttcggtcttagcattagcgatcgcctgggctgccggagatgtcaatgtaacgcacggggtacagtgcctggtagcactccttgcgaccccaattccggctcctgttattgcaaaaggttggtgacagggcgtggctgcgatcggtgcttacccggtcactggggactctcacacgacctgctgggttgcagaccttgcgattgcgacgtcggcggagctctggaccctcagtgtgacgaagggacagggcaatgccactgtcgtcagcacatggtgggacgtcggtgcgagcaggttcaacctggctatttcagaccattcctcgaccacctgatatgggaagcagaggacaccaggggacaagtgctggatgtggtggaacgcctcgttacgccgggtgagacgccaagttggaccggctcaggtttcgttcgtctccaggaggggcaaaccctggaatttctagtggcctccgtgccaaaggccatggattatgatttattgctccgtctcgagccacaagtgcctgagcagtgggcagagctcgagctcatagtgcaaaggccaggtccagtgccagcacatagtctgtgcggacatctggtccccaaagacgaccgaatccagggaaccctccagccgcacgcaagataccttatcttcccaaatccagtgtgcctcgagccgggtatttcatataagctccatctgaagctggtgaggacgggaggatctgcacagccagaaactccgtattcaggcccaggcctgctgatcgactccctggtcttactccccagggtattagtcttagagatgttctctgggggagacgcagctgcgctcgaacgccaggctacttttgaacggtaccaatgtcacgaggaagggctcgtacccagtaagacatctccaagtgaagcgtgtgccccactcctcatcagcctgtccacgcttatctacaatggagccctgccttgtcagtgtaaccctcagggttccctgtcttcagagtgtaatccgcacggcggacaatgtctctgcaaaccaggggtagtggggcgaagatgcgacctgtgtgcacctggctactatgggtttggacctacaggctgccaggcttgccagtgctcccatgagggagcccttagcagcctgtgcgaaaaaacatcaggacaatgcctgtgtcgcacgggtgctttcggcctgagatgtgatagatgtcagcgagggcagtggggcttcccgtcttgccgcccatgcgtgtgtaatgggcacgcagacgaatgcaatacacatactggagcctgcctaggatgtagagatcatactggcggagagcattgtgaaaggtgcattgcaggctttcacggcgaccctaggctgccctatggcggacaatgcaggccatgcccatgtccagagggtcctggatcccagagacacttcgccacatcttgccaccaggatgaatactctcaacagatcgtgtgccactgcagagctggctataccggcctgaggtgtgaggcttgtgccccaggccatttcggggatccgagtaggccaggtgggaggtgccaactgtgcgaatgctccggcaacatcgatcctatggaccccgacgcctgtgatccccacacaggccaatgtctaagatgccttcatcacactgaggggcctcactgtgcccactgtaaacctggttttcatggacaggcagctcgacaatcttgtcacaggtgtacatgtaacctcctgggcaccaaccctcagcagtgtccatccccagaccagtgtcactgcgacccatccagcggacagtgtccatgtcttcccaacgtgcagggaccaagctgcgatagatgcgccccaaacttctggaatctaacatcgggacatgggtgtcagccttgcgcttgccacccaagccgagcacgcggaccaacatgtaatgagtttaccgggcaatgtcactgccgggcaggattcgggggaagaacctgttctgagtgtcaagaactgcactggggcgaccctgggttgcagtgccatgcatgtgactgtgatagtcggggaatcgacacacctcagtgccacagatttaccggccactgctcatgtcgaccaggagtctctggagttcgatgcgaccagtgtgcgagaggatttagcggcatattcccggcttgtcatccatgtcatgcttgcttcggcgactgggatagggtggtccaagacctcgccgctcgaacccagcggctggagcagagggcacaggagcttcagcaaaccggcgtgctgggtgcgttcgagtcctccttttggcatatgcaggagaagctgggtatcgtgcagggaattgttggcgcaaggaacaccagtgccgcaagcactgcccagctggttgaggccactgaggagttaagacgcgagattggagaggccaccgagcacctgacgcagctggaagccgacttgaccgatgtgcaggatgagaacttcaacgccaatcacgccttaagtggtctggagcgtgatcgactggccctcaacctgacacttaggcaactcgaccagcacctggacctgctgaaacattcaaacttcctcggagcatatgacagcatccggcacgctcactcccagtccgccgaagcggagcgtagagccaatacatctgcactggcagtgccctctcctgtatcaaattccgcttctgctaggcaccgaaccgaggccttgatggacgcgcagaaagaggacttcaatagcaagcacatggccaaccagagagcgctcgggaagttatccgcccacacccatactctgagcctcaccgacatcaacgagctggtgtgcggagctccaggtgatgcgccttgtgccactagtccctgtggcggagctggttgccgggacgaagatggccaaccccgttgtggcggattaagctgcaacggggctgcggcaactgctgatctcgcccttgggagagccaggcacactcaggccgagctccagcgagccttggccgaaggagggagtatcttgagcagggtggcagagacccgcaggcaagcatcggaagcacagcagcgtgcccaggctgcactcgataaggccaatgcaagtcgcggacaggtcgaacaagccaaccaggaactgcaagaactcattcagtctgtcaaggattttcttaaccaagagggggctgaccccgattcaatcgagatggtggccacaagggtactggaactgagcatcccggcttctgcagagcagattcagcatttggccggagctatagcagaacgggttcgctccctggcagacgtagacgcaatcctcgccaggaccgttggggacgtgagacgcgctgagcagctgctgcaggatgctaggcgagcacggtcttgggcggaggacgaaaagcagaaggccgaaactgtgcaggccgctttggaggaggcccagagagcgcaaggtatagctcagggggcaatccgcggagcagtggccgatactcgggacacagagcaaacgctttatcaggtgcaagagcgaatggccggtgctgaacgggctctgagctcagctggcgagcgagctcggcaactggacgcgctgctggaagccctgaaactcaaaagagccggtaatagcttggccgcttctaccgccgaagaaaccgcgggatccgcccaaggacgggcacaggaggcagagcagcttttgcgcggtcctctgggggaccagtaccaaacagtcaaagcgctcgccgagagaaaggcgcagggggtcctcgccgcacaggcccgtgcggagcaacttcgcgacgaggcgagagacctgctccaggccgctcaggacaaattgcagcgcctgcaggaactggaaggcacttatgaggaaaacgagcgtgccctggagtcgaaggctgcccagctggacggtcttgaggctcggatgcggtcagtactgcaagcgatcaatctgcaggtccagatttataacacctgccagta

SEQ ID NO: 228107 - DNA, 3519 bp, synthetic construct
  misc_feature 1..3519: note = Description of Artificial Sequence: Synthetic coding sequence
  source 1..3519: mol_type = other DNA
atgaggcctttttttctgctgtgttttgctctgcccggactccttcatgcacagcaagcgtgcagtagaggagcgtgctatccgcctgtcggcgatctgctggtgggccgaaccaggtttttgcgcgcaagcagtacctgcggactaacaaagcccgaaacgtactgcacccagtacggggagtggcagatgaaatgctgcaagtgcgactcccgccagccacacaactactattcccacagggtggagaatgtggcttctagctcaggcccaatgaggtggtggcagtctcagaacgatgtcaatcccgtatcattacagttggatctcgacaggcgatttcagcttcaggaggtgatgatggaattccaggggccaatgccggctggcatgctgattgagagatcttccgatttcggcaaaacctggcgggtgtatcagtatctagccgctgattgtacctccaccttccccagggtgagacaggggcgtcctcaatcatggcaggacgttcgttgccagtcactcccgcaacgcccaaatgccagactgaatggcggaaaagtccagctgaatctgatggacctggtgagtggcatacctgcaacacagtcccagaaaattcaggaagtcggggaaatcaccaatctgagagtgaactttactaggctggcccctgtgccccaacggggttaccaccccccttctgcctattatgccgtgtcccagctgcggcttcagggtagctgtttttgtcacgggcatgctgaccggtgcgctcctaagccaggggcaagcgcaggcccttcaactgctgttcaggtgcatgacgtgtgtgtgtgtcagcacaatactgccggaccaaactgtgaacgttgtgcaccattctataataacagaccatggagaccagcagaaggccaagatgcccatgagtgccagcgttgcgactgtaatggccactctgaaacctgccattttgacccggcagtgttcgccgcatcgcagggtgcctatggcggagtgtgtgacaactgccgagaccacacagaaggaaagaattgtgagagatgccagttgcactactttaggaaccgtagacctggggcatctatccaagagacatgcatctcttgtgagtgcgatccagacggagctgtcccaggagctccctgcgaccccgtcacgggacagtgcgtgtgcaaggaacatgtgcagggagagcggtgcgacctctgcaagccaggatttaccggcttaacttatgccaacccccagggttgtcatcgctgtgattgcaatattctcggcagtagaagagacatgccatgtgatgaggagtcaggcaggtgtctgtgcctccccaatgtggttgggccaaagtgtgatcaatgtgctccttaccactggaaactcgcttccggacagggttgtgagccctgcgcctgcgatcctcacaattcattgtccccccagtgtaatcaattcaccggacagtgcccctgtcgcgaaggctttgggggtctaatgtgttccgccgctgcgattcgtcagtgccccgaccgcacgtacggcgacgtggcgacgggctgtcgagcttgtgactgtgactttcggggaactgagggccctggatgtgataaggcgtcggggcgatgtttgtgcaggcctggccttaccggccctcgctgcgaccagtgtcagagaggatattgcaaccggtatccagtgtgcgtagcttgtcacccatgctttcagacctacgatgcggatctgagagagcaggctttaaggttcggacgtcttcggaatgccactgccagcctgtggtctggtcccggtttggaagacagaggactggcctcgcgcattttggatgccaaaagtaaaatcgagcagattagagctgtcctttcgtctccagcggtgacggaacaggaagtcgcccaggtggcctccgccatactgtcactgcgaaggacgctgcagggtcttcaactcgatttaccacttgaagaggaaaccttaagtttgccccgagacctggagagcctcgaccgctccttcaacggccttcttaccatgtatcagcgtaagagagagcaattcgagaagatttcttccgctgacccgagcggtgcctttagaatgctgtcaaccgcttacgagcagtccgctcaggctgctcagcaggtctcagacagctcccggctactcgaccaactccgggattccaggagggaggccgaaagactggtgagacaggcagggggtggtggcggtaccggctctcccaagctggtggccctgcgcctggaaatgtctagcttgccggatcttactccgaccttcaacaaattatgtggcaatagtagacaaatggcatgtactcccattagttgccctggcgagctgtgtccccaagacaacggcacggcctgcggaagccgatgtagaggggtactccccagggcagggggtgcttttctgatggcaggtcaggtggcagagcagttacgaggctttaatgcccagctacagaggacacgccagatgatccgtgctgccgaggagagcgcttcccaaatacagagtagcgcacagcggctcgaaacacaagttagcgcttccagaagccagatggaagaggatgtcaggcgcacaaggctgctgatacagcaggtgcgtgacttcttaacagacccagataccgacgctgctacgatccaggaagtttctgaggcggtgctcgcgctctggctgccgacagactccgcaaccgtgctgcagaagatgaatgagattcaggcaattgcagccaggctgccgaatgtagacctggtgctatcccagaccaagcaggatattgcccgtgcacgaaggctgcaggccgaagccgaagaggccaggagcagagcgcacgccgtggaagggcaggtcgaggatgtggttggcaatttgaggcagggaaccgtggcgcttcaagaagctcaagacaccatgcaggggacatcccgctccttacgactcatacaggatagagtggccgaagtacaacaggtacttcgccctgctgagaaattagtcacatcaatgaccaaacagctgggtgatttctggacaaggatggaagagcttagacatcaggcacggcagcaaggagcggaggctgtccaggcacaacagctggctgagggggcttctgagcaggccctttcggcccaggaaggatttgagagaatcaagcaaaaatacgcggagctgaaggacaggctggggcagagctccatgctgggtgagcaaggtgccagaattcaatccgtgaagactgaagccgaagagcttttcggagaaacaatggaaatgatggataggatgaaagacatggagttggaacttctgcgtggtagtcaggctattatgctgcgttcagccgacctgaccggactggagaaaagggtggaacagataagggaccatataaatggcagagtgctctactatgctacatgtaagtag

SEQ ID NO: 228108 - DNA, 3519 bp, synthetic construct
  misc_feature 1..3519: note = Description of Artificial Sequence: Synthetic coding sequence
  source 1..3519: mol_type = other DNA
atgcggccattttttttattgtgtttcgccctgccaggcctcctgcatgcacagcaagcttgctcaagaggagcatgctaccccccagtgggcgacttgctggtcggcaggacacgatttttgagggcctctagtacatgcggcctgaccaaaccggaaacgtactgtacacagtacggcgaatggcagatgaagtgctgtaagtgcgactctcgacagcctcacaactactactcgcacagagtggaaaacgtcgcgtcgtcctctggaccaatgcggtggtggcagtctcagaacgacgtgaacccggtgagcctgcagctggatctcgaccgcagattccagcttcaagaggtgatgatggaattccaaggcccaatgcccgctgggatgttaattgagcgaagctcggatttcggaaagacttggcgagtctaccagtacctcgcggcagattgcacctctacattcccccgtgtgcgacaggggagacctcagtcatggcaagacgtgagatgtcagtcacttccacagcgccctaacgccaggctgaacggcggaaaggttcagctgaacttgatggatctggtctctgggataccggcaactcagtcacaaaagattcaggaggtgggagagataacaaatcttcgggtcaattttactcggttggccccagttccacagcgcggataccatccaccaagcgcatattacgctgtgtcccagctacgcctgcagggctcctgcttctgtcacggccatgccgatcggtgcgccccaaagcctggtgcctccgcaggccctagcactgccgtgcaggtgcacgacgtgtgcgtgtgccagcataacaccgctggcccaaactgtgagcgttgtgctcctttctataacaacagaccctggcggccagcggaaggacaggatgctcatgagtgtcagcggtgcgactgcaatggccactcagaaacttgtcactttgaccccgctgtatttgccgcttcacaaggcgcatacggcggagtctgcgacaattgtcgtgatcacacagaagggaagaactgtgaacgctgccaattgcactacttccgtaaccgaaggcctggggcatctatccaggagacttgcatatcttgtgaatgtgatccagatggcgcagtgccaggtgcaccctgtgacccagtgacaggccagtgtgtatgtaaagagcatgtgcagggggaacgctgtgacctgtgcaaacccggattcacgggcctgacctatgccaaccctcagggatgtcaccggtgcgactgcaacatcttgggaagcagacgggacatgccttgcgacgaggaatcaggccgatgtttgtgtctgcccaatgtcgtgggccctaaatgtgaccaatgcgctccgtatcattggaagctcgccagtgggcagggatgtgagccgtgcgcgtgcgatccccacaattccctttctcctcagtgcaaccagttcacagggcagtgcccatgccgcgaagggttcggcggtctgatgtgcagtgccgcagctattcgccaatgtccagaccgtacatatggagatgtcgccaccggctgccgtgcctgtgattgcgatttccggggaactgaggggccaggctgcgacaaagccagtggccgatgcctctgtcgacccggacttactggccctcggtgtgatcagtgccagcgcggttattgcaatcggtacccagtttgcgtggcatgccacccctgctttcaaacctatgacgcagatttgagagagcaggcgctgagatttggccgactccggaatgctacagccagtctgtggtcaggccctggactggaagacagaggccttgcaagtcgaattctggatgcgaagagcaaaatcgagcaaattagggctgttctatctagtccagcagtaaccgaacaggaagtcgcccaggtggctagcgcaatcctgtcgctgcggagaaccttgcagggactgcagttagacctgcccctggaggaagagacgctaagtctacccagggatctggagagcttagatcggagcttcaacgggctgttaacaatgtaccagaggaagcgcgagcaattcgaaaagatctccagcgccgatccaagtggcgcatttagaatgctgagtacggcttatgagcaatccgcccaggccgctcaacaggtttcagattcttcacggctcctggaccagctcagggattccaggcgcgaagctgaaaggcttgtgagacaggctggagggggtgggggaacagggagtccgaaactggtggctctcaggctggagatgagctcattacctgaccttactcctacctttaataagctgtgcggcaactcccggcagatggcctgcactcccatttcttgtcctggggaattgtgcccccaagacaatggaaccgcctgcggcagccgatgcaggggagtgctccctcgagccggaggggctttccttatggcaggccaggttgctgaacagttgagagggttcaatgctcaattgcaacggacccgacagatgattagggccgcagaggagtcagcgtctcagatccagtcttctgctcaacggctggagacccaggtgagtgcatcacggagtcaaatggaagaggacgtcaggcgaactaggctcctcatccagcaggtgagggattttcttacggatccagataccgacgctgccactatccaggaagtgtccgaagcagtactggccctgtggctccccacggacagcgcaacggtactccaaaaaatgaacgaaatccaagcaatcgccgcacggttacctaatgtcgacttagtgctgtcacagactaagcaagatatagcaagagccaggaggttgcaagccgaggccgaggaggcgcgatctcgcgctcacgccgtagaaggacaggtggaagatgttgtgggcaacctccgacaaggtaccgttgctctacaggaggctcaggataccatgcagggcacatccagatctttgcgactgatccaagatcgtgtggcagaggtacagcaggtgctgcgacctgcagagaagctcgtaacttcaatgaccaaacagctgggcgacttttggacacgcatggaagagttgcggcatcaggctcgccagcagggggcagaggctgtgcaggctcaacaactcgctgagggagcttccgagcaggccctgtctgcccaagagggttttgagcggataaaacagaaatacgccgaactgaaagatcgcctggggcagtcaagtatgttaggagaacagggcgctagaattcagtccgtaaagactgaagctgaagagctgttcggggagaccatggaaatgatggaccgaatgaaggacatggagctcgagcttctgcggggatctcaggccattatgctcaggagcgcagacctcactggccttgagaaacgagtcgaacaaatcagagaccacatcaacggtcgagtcctgtactatgccacgtgcaaatag

SEQ ID NO: 228109 - DNA, 3519 bp, synthetic construct
  misc_feature 1..3519: note = Description of Artificial Sequence: Synthetic coding sequence
  source 1..3519: mol_type = other DNA
atgcgcccatttttcctcctttgttttgccctaccaggcctcttgcatgctcagcaagcttgctcccgcggagcttgttacccccctgtaggcgacctactggtgggaagaacaagattcctccgggcatcctctacctgtgggctgactaaaccggaaacatattgtactcagtatggagaatggcagatgaagtgctgtaagtgtgactccaggcagcctcataactactattctcaccgggtggagaatgtcgcatcgagtagtggccctatgcgctggtggcagtcccagaatgatgtgaaccctgtcagtcttcagctcgacttggatcggcgatttcagctgcaggaggtgatgatggagttccaaggtccaatgcctgcagggatgttgatcgaacgctcgtccgacttcggcaagacctggagagtgtaccagtaccttgccgctgactgtacatccaccttccccagagtgcgccaaggtcgccctcagagttggcaggatgtccggtgccagagcttgccccaaagaccaaatgccaggctgaacggaggaaaagtacaactcaatttgatggacctcgtaagcggaattccagccactcaatcccagaaaatccaagaggtgggcgagatcactaatctaagggtaaatttcacaaggctggcccctgtgccgcagagagggtaccatccaccaagcgcttattatgcagtatctcagctgcggctgcagggctcttgcttttgtcacggtcacgcagaccgttgtgcaccgaagcccggagcctcggccggtccgtctacggcagtgcaggtgcatgacgtgtgtgtgtgtcagcacaataccgcaggaccaaattgtgaacggtgtgcaccgttttacaataatcgcccttggagacctgcggaggggcaggatgcccacgagtgccaaagatgcgactgtaatggacatagcgagacctgtcactttgatcctgcagtgttcgccgcatctcagggcgcttatggaggcgtttgtgataactgccgcgaccacacagagggcaaaaactgtgagaggtgccagcttcattactttcgaaatcggaggcctggggcttccattcaggagacctgcatatcctgcgaatgcgatcctgacggggcagttccaggtgcgccttgcgacccggtgaccggacagtgtgtctgcaaggagcatgtgcagggggaaaggtgtgatctctgtaagcccggtttcactggactgacgtatgcgaatcctcaagggtgtcacaggtgcgattgcaacatactgggctccagacgtgatatgccttgtgatgaagagtccggaaggtgtctctgcctgccaaacgtggtgggccctaaatgcgatcagtgcgcaccgtatcactggaaactcgccagcggccaggggtgcgaaccttgtgcctgcgacccccacaatagcttatctcctcaatgtaatcagtttaccggccaatgcccatgtcgggaaggcttcggcggtctcatgtgtagtgcagccgcaatcaggcagtgtccagatcgcacctacggtgacgtggccaccggatgcagagcctgcgactgtgatttcagagggaccgaaggtcctggatgcgataaggccagcggaaggtgcctgtgtagaccagggctgacgggacccagatgcgatcagtgtcagcggggttattgcaatcgttaccctgtatgcgttgcatgtcacccatgcttccagacctacgatgcagacctgagggagcaagctctccggtttggtagattacggaatgccaccgcaagcctttggtcaggtcccggactcgaggaccgcggtcttgcttcacggatcctggacgccaagtctaagattgagcagatcagggctgtgctatcaagcccagctgtgactgaacaggaggtggcacaggtagcctctgctatcctgtcacttcgtcgaaccttgcagggcctgcagctggacctgcccctggaggaagaaaccctgtcgttaccgagagacctcgagtccttggacaggagtttcaacggtttgcttacgatgtatcagcgtaagagggaacagtttgagaagatcagctctgctgacccatcaggtgcgtttcgtatgctaagcaccgcttatgaacaaagtgctcaggcagcgcagcaagtcagcgattcttctcgattattagaccagctcagggacagtcgcagggaggccgaacgactagtgcgtcaagccggaggaggaggaggtaccggcagtccaaagctggtggcattgcgactggagatgagtagcctgcctgatctcacccctactttcaacaaattatgtgggaattcccggcagatggcttgtacccccataagttgcccgggagagctttgtccccaggacaatgggacggcttgtggatctaggtgccgcggagtgcttccccgtgccggaggtgcgtttctcatggctggccaagttgccgagcagctgaggggcttcaatgcccagctgcagcgcactcgccaaatgatacgcgctgctgaggaatctgctagccagatccagtcttccgcccagaggctcgagacacaggtgtcagcctctagatctcagatggaagaagatgttcgcagaacccggttgcttatccagcaggtccgggattttctaacagacccagataccgacgccgcaactattcaggaagtgtccgaggctgttctagctctttggctgcctacagattccgccactgtgctgcaaaaaatgaatgagattcaggccattgccgctcgcctgcccaacgtggatctggttctgagccaaacgaagcaggatattgctagggctcgcagactgcaggccgaggcagaagaggctaggagccgtgcacatgctgtggagggtcaagttgaagatgtggtagggaacctgcgacagggaactgtggccctgcaggaggcccaagatactatgcagggcacttcacggtcactgcgccttatccaagacagggtggctgaggttcagcaagtcctgaggcctgccgagaagctggtgacttctatgactaaacagcttggcgatttttggacaaggatggaggagcttaggcaccaggccaggcagcagggggcagaggcggtgcaggctcagcaactggcagagggcgctagtgagcaggccctttcggcccaggagggattcgagcggatcaaacagaagtacgccgagctgaaagatcgtttaggacagtcctctatgcttggggaacagggtgcccgaatccaaagtgtgaagaccgaggctgaggagctgttcggtgagacaatggaaatgatggatcgaatgaaggatatggagcttgagctgctgagaggatctcaagccatcatgctgaggtccgcagacctgactgggctggagaaacgcgtagagcagataagagaccacatcaacggcagagtgctctactatgcgacttgtaaatag

SEQ ID NO: 228110 - DNA, 567 bp, synthetic construct
  misc_feature 1..567: note = Description of Artificial Sequence: Synthetic coding sequence
  source 1..567: mol_type = other DNA
atgaggcccttcttcctcttgtgctttgccctcccgggtctgcttcacgctcaacaggcctgcagtcgcggtgcctgctacccaccggtgggagacctgctcgttggaagaactaggtttctccgcgcttcctccacatgcggattgactaaacccgagacctattgcactcagtatggcgagtggcagatgaagtgttgcaaatgtgatagtcgacaaccgcacaattattacagtcacagagtggaaaacgtggcctcttcttctggacctatgagatggtggcagtcacagaacgacgtgaatcccgtgtccctgcagctggacctagataggcgcttccagttgcaagaggtaatgatggaattccagggccctatgcctgctggtatgctgatagaacggtctagtgattttggcaagacgtggcgggtctatcaatatctagccgcagattgcacttcaacattcccaagagtccggcaggggaggcctcaatcttggcaggatgtgcgatgccagagtttaccgcagcggccaaacgcgagacttaacgggggaaagtag

SEQ ID NO: 228111 - DNA, 483 bp, synthetic construct
  misc_feature 1..483: note = Description of Artificial Sequence: Synthetic coding sequence
  source 1..483: mol_type = other DNA
atgaacgaaatccaggcgatagcagccagattaccaaacgtcgatctggtgctctctcagacaaagcaagacatcgctcgcgctaggcgcctgcaggcagaggccgaagaagccagatctagagcccacgccgtcgaaggccaggtggaggacgtcgttggcaacctcaggcagggtaccgttgccctacaggaagctcaggacacgatgcagggaacaagtaggagcctccgcctcatacaagaccgggtcgctgaagtgcagcaagtgttacgccctgccgaaaaactggtcacctctatgaccaagcagctgggagacttttggactagaatggaagagttaagacaccaggccaggcaacagggggcagaggccgtgcaggctcaacagttggccgagggcgcttctgaacaggccctatccgcccaggaagggttcgaaaggatcaaacaaaaatacgccgaactgaaggaccgttag

SEQ ID NO: 228112 - DNA, 4830 bp, synthetic construct
  misc_feature 1..4830: note = Description of Artificial Sequence: Synthetic coding sequence
  source 1..4830: mol_type = other DNA
atgcggggaagccaccgtgcggcacccgcactgcggcctcgaggtcgtctctggccggtgctcgctgtgctcgcagccgctgcagccgcaggatgtgcccaggcggctatggacgagtgcaccgacgagggaggacggccacagcggtgcatgccagaatttgtgaatgctgcctttaatgtcaccgtcgttgcgactaatacctgtggcactcctcccgaagagtattgtgtccagaccggagttacaggagtgaccaagtcctgccacctgtgtgacgctggccagccccacctgcagcacggcgctgcctttctaacggactataataatcaggccgataccacctggtggcagagccagaccatgttggcgggtgtgcagtacccgtcatcaattaacctcactctccacctcgggaaggcattcgacattacctacgtgagattgaaattccatacctccagaccagagtcatttgctatttataagcgcactcgggaagacggtccctggattccctaccagtattattcaggctcttgtgagaatacctactctaaggcaaacagaggattcattcggactggcggagacgagcaacaggccctctgcacagatgagtttagcgacatcagccccctcaccggcggaaatgtagcattttcgactctggaaggacggccttcagcctacaactttgacaattcgcccgtgctacaagaatgggtgacggccactgacattcgcgtgactctgaaccgcctaaatacttttggcgacgaagtgttcaatgatccaaaggtgctcaaatcttattattacgctatcagcgatttcgcagtgggcggtcggtgcaagtgtaacggccatgcctccgagtgtatgaaaaatgaatttgataaactcgtatgtaactgtaaacacaatacctatggagtcgactgcgagaagtgtctcccattcttcaatgaccgcccttggagaagggctaccgccgaaagtgcatctgagtgcttgccatgcgactgtaatggaaggtcccaggagtgttacttcgacccggagttgtaccgatctacaggccatggcggacattgcacgaattgtcaggataacactgatggagctcattgtgaaaggtgtcgcgaaaactttttccggcttggaaacaacgaagcgtgttccagctgtcactgttcacctgttggaagcttgagtacccagtgtgactcttatggacggtgctcctgtaaacccggagtgatgggggataagtgcgaccgctgccagccagggttccactccctgacagaggccggttgccgaccctgcagttgcgaccctagtggcagtatcgatgagtgcaacattgagactggtagatgcgtgtgcaaggacaatgtggagggattcaattgtgaacgatgtaagcctggtttcttcaatctggagtcaagtaacccgagggggtgtactccatgcttttgtttcggtcattcctccgtgtgcacaaatgccgtaggttatagtgtgtactcaatctcgtccactttccagattgacgaggatggctggcgagccgagcagcgcgacggaagcgaggcgtccctggaatggagctctgaaaggcaggacatagctgtgattagcgatagctacttccctcggtactttatcgccccagctaagttcctaggaaaacaagtgttgtcatatggacagaacctgagttttagtttcagggttgatagaagagatacgagactgagcgctgaagatctcgtcctggaaggcgctgggttgcgcgtgtcagtgccattgatagcccagggaaactcttatccatccgaaaccactgtaaaatacgtcttccgtctgcacgaggctaccgattatccgtggcgaccagccctcactccgtttgaatttcagaagctgcttaacaacctgactagcattaagattcgaggaacatactccgaaaggtccgctgggtacctggacgacgttacactggcatctgctcgcccagggccaggtgtgcccgctacttgggtggagtcttgtacatgtcccgtcggctacgggggacaattctgcgagatgtgcctatcaggctatcggcgagaaacaccaaatctcggaccgtattcaccgtgtgtcctctgcgcctgtaacgggcacagcgagacatgcgaccccgaaacgggagtgtgcaactgtcgagataacaccgctggtccccactgcgagaagtgtagtgatggctattatggcgacagcaccgccggtacatcgtccgattgccagccctgcccatgtccaggaggttctagttgcgccgtggtgcctaaaactaaagaagttgtgtgtacaaattgtccgaccgggactaccgggaagcgttgtgaactgtgtgacgacggatattttggagaccccctgggaaggaacggcccagtgcgtctctgtcgattatgccagtgtagcgacaatattgatccaaatgcagtaggcaattgcaaccgcctcacaggtgaatgtctgaaatgtatctacaataccgccggtttttactgtgacagatgtaaggatggcttttttggaaaccctttggcacctaatccggctgataagtgtaaggcttgcaattgcaacctttatggcacaatgaaacagcagtcatcctgcaatcctgtgaccgggcagtgcgagtgcctgccccatgttacaggccaggactgcggcgcatgtgacccagggttctacaacctccaaagcgggcagggctgcgagcgctgcgattgtcacgccctgggttcgacaaacggacaatgcgacattaggacagggcaatgcgagtgccaacccggaatcactgggcagcactgcgaacgctgcgaggttaatcacttcggcttcggccctgaggggtgtaagccctgtgactgccatcccgaaggctcgctgagcctccagtgtaaggatgacggaaggtgcgagtgcagggagggctttgtcggcaacaggtgcgatcaatgcgaggagaactacttctacaaccgttcctggcctgggtgtcaggaatgccccgcatgctatcgtttggtgaaggataaggtggccgaccatcgtgtgaagctccaggagcttgagtcactgattgctaatctggggaccggggacgaaatggtgaccgaccaggcatttgaggaccggctgaaggaagccgaacgagaggttatggatttgctgcgggaggcccaggacgtcaaggatgtggaccagaaccttatggaccggctgcagcgtgtgaataacacactgtcttcccaaatatcccgcttgcagaacattcgaaataccatagaggaaaccggaaacctggctgaacaggctagagcacacgtcgaaaacactgagcgcttgattgagatcgccagcagggagctcgagaaggctaaagtggctgccgctaacgtctccgtcactcagccggagtcaaccggggaccccaataatatgacgcttctcgccgaggaggcaagaaagttggctgagcgacataaacaggaggccgacgacattgtgcgcgtcgctaaaaccgcaaacgacacatccacggaggcttacaatctattgcttaggacattggctggggagaaccagaccgctttcgaaattgaggaactgaatcggaagtacgaacaggcgaagaacatttcacaggacctggagaagcaggccgctcgcgttcacgaggaggcaaaacgggctggtgataaagcagtggagatctatgctagtgtggcacaactatcccccctggatagcgaaacgctcgagaacgaggccaataacattaaaatggaagcggaaaacctcgagcagttgatcgatcagaaactcaaggattacgaggacttacgggaggacatgcgcggtaaggagcttgaagtgaaaaatctcttggaaaagggcaagacagagcagcagacagcagatcagctcctcgccagggcagacgctgccaaggcccttgctgaggaagcagcaaaaaaagggagggatacactgcaggaggcaaatgatatactcaataacctgaaggacttcgacaggagagtaaacgataacaaaaccgcagcagaggaggcgctgcgaaaaattccagcaattaaccagacaatcacggaggccaatgaaaaaaccagggaagcacagcaagcactggggagtgcggcagctgatgctaccgaggcaaaaaataaagctcatgaggccgagcggattgcgagtgccgtgcagaagaacgccacctcaaccaaagccgaggctgagagaacttttgcagaagtgacagatttggacaatgaagtgaataatatgctcaagcaacttcaggaggccgagaaagagctgaagaggaagcaagacgatgccgatcaggacatgatgatggccggtatggcatcacaggccgcacaggaggccgagatcaatgctcgtaaggctaaaaactctgttacttcactgctgtcgatcatcaacgacctgttagagcagcttggccagcttgacaccgtcgatttaaataagcttaacgaaatagaggggactctgaacaaggccaaagatgagatgaaggtctctgacctggacaggaaagtttcagatctggagaatgaggccaaaaaacaggaggctgctatcatggattataaccgggacatcgaagagattatgaaagatattaggaacctggaagacatccggaaaactctaccttccgggtgttttaacacccccagcatagagaagccttag

SEQ ID NO: 228113 - DNA, 3582 bp, synthetic construct
  misc_feature 1..3582: note = Description of Artificial Sequence: Synthetic coding sequence
  source 1..3582: mol_type = other DNA
atgcccgctctctggcttggatgttgcttatgcttttccctgttgctgccagcagccagggccaccagtaggagggaagtatgtgactgtaacggaaagtctagacaatgtattttcgacagagaacttcatagacagactggtaacggttttaggtgcctgaactgtaatgacaacactgatggcatccattgtgaaaaatgcaagaacgggttttacaggcatcgagaacgagatagatgtttaccatgcaactgtaactcaaaaggctctctgtctgctcggtgcgacaacagcggacgctgttcgtgcaagccaggtgttacaggtgcccgttgcgatcggtgcctgcctggatttcacatgctcactgacgccggatgcactcaggatcagagactgctggattccaaatgcgattgcgaccccgcaggcatcgccggaccttgtgatgctggtaggtgcgtgtgtaagcccgctgtgactggcgaacggtgcgaccgctgcagaagcggatattacaatctggacgggggaaaccccgagggatgtactcagtgtttctgttatgggcacagtgcctcttgccgcagctctgccgaatattccgtgcacaagattacctccacttttcaccaagatgtcgacggttggaaggcagtgcagcgcaacgggagtccagccaagctgcaatggtctcagaggcaccaagatgtgttttcttctgcgcagagattggatcccgtgtactttgttgctcccgctaaatttctggggaatcagcaagttagctacggacagtcactgtcattcgactaccgcgtcgaccgcggagggcgacacccgtctgctcatgacgtgattctggaaggagctggtcttaggattactgcccctttgatgcccctcggcaagactttgccctgcggacttactaagacctacacatttcggttgaatgaacatccaagtaataattggtcacctcagcttagttactttgagtatcggagactgttacgcaacctcactgcgctcagaatcagagctacttacggtgagtactcaactgggtatatagacaatgtgactctgatttcagccagaccggtttccggcgctcccgctccctgggtagagcagtgtatatgccccgtaggctataagggacaattctgccaagactgtgcctcgggctataagcgagattccgcgagacttgggccattcggtacctgtatcccttgcaattgccagggcggaggcgcttgcgatcccgacactggggattgttatagtggagatgaaaaccctgatatcgagtgtgcggactgccccattggattctataacgacccccatgatcccaggagttgcaaaccttgcccatgtcataatggctttagctgttccgtgatgccagaaaccgaggaagtggtttgcaataactgtccccctggggtgaccggcgctagatgcgagctctgcgccgacggctactttggagatcccttcggtgagcacggccctgttcgtccctgtcagccatgtcagtgcaacaacaatgtggaccccagtgcgtccggtaactgtgataggctgaccggaaggtgcctaaagtgtattcacaataccgcaggtatttattgtgaccagtgtaaggccggatactttggggacccacttgctcccaaccccgcagacaagtgtagggcatgcaactgtaaccccatggggtccgaacctgtggggtgcagatccgacggtacgtgcgtatgcaagcccggttttggtggtcctaattgtgagcacggtgcctttagctgtcccgcatgctataatcaggtgaaaattcagatggatcagtttatgcagcagttgcaacgcatggaagccctgatcagcaaggctcaaggaggagacggggtcgttcccgataccgagttagagggcaggatgcagcaagcagaacaagccctgcaggacattcttagggatgcacagatctccgagggagcatcgcgatccttaggcttgcagctagccaaggtgaggagtcaagaaaacagctaccagtcaaggctggatgacctcaaaatgactgtggagagggtgcgtgcgcttggttcccagtatcaaaacagagtcagagatactcacagactgatcacacagatgcagctgtctctggctgagagcgaggcaagcctggggaacactaacataccagcgagcgatcactacgtgggcccaaacggtttcaaaagcctcgcacaggaagcaacccgactcgcagagagccatgtcgagagtgcttcaaacatggagcagctcacccgagagactgaagattactcgaagcaggccctaagcctcgtgaggaaggctttgcacgagggggttggttctggatcaggctcgccagatggcgcagtggtgcagggattggttgaaaagctcgaaaaaactaaaagtcttgcacagcagctgacccgcgaggccacccaagctgagatcgaggccgatcgaagctatcaacacagcctccggcttctggattccgtgtccagactccaaggcgtgagtgatcagagcttccaagtagaagaagcgaagcgaattaagcagaaggccgacagcttaagctctttagtcacacggcatatggacgagtttaagcgtacacagaaaaatcttggcaattggaaggaagaagcgcagcagctcctacaaaatggcaaaagcggccgagagaaatcagatcagcttctgagcagggctaacctggctaagtcacgggctcaagaagccctgtctatgggcaatgccaccttctacgaggtggagagcattctgaagaatctgcgggaattcgacttgcaggtagacaacaggaaggctgaggccgaagaagcaatgaaaaggctttcgtatataagccagaaggtgtcagacgcatccgataagactcagcaagccgaacgtgcgctgggatcagccgcagcagatgctcaacgcgctaagaacggtgcaggcgaggccctggagatatccagtgagattgaacaggagatagggtctctgaatctggaagctaatgtcacagccgacggagcactggctatggagaaaggattagcctcactgaaatctgagatgcgggaggttgagggtgagctggaaaggaaggagttggagttcgatactaatatggacgcggtacagatggtgatcacagaagcccagaaggtagacactcgtgccaagaacgccggtgtcacgatccaggatactctaaacaccctggacggactcctgcacttaatggatcagccattatctgttgacgaggaaggcctcgtgctgttagagcagaagttgagtcgcgctaagacacagattaatagccagctccgaccgatgatgagcgaactggaggaacgtgcacgccagcagcgcggtcaccttcacctgctcgaaacctctatcgatggaatcctggcagacgtaaagaatctggagaatatcagagacaacctcccccctggctgctacaatacccaagccttagaacagcagtag

SEQ ID NO: 228114 - DNA, 3336 bp, synthetic construct
  misc_feature 1..3336: note = Description of Artificial Sequence: Synthetic coding sequence
  source 1..3336: mol_type = other DNA
atgccagccttatggctgggctgttgtttatgtttcagcttactgctgcccgcagcgagggccaccagcaggagggaagtctgtgactgtaacgggaagtcaagacagtgtattttcgacagagagctgcatcggcaaacgggtaatggtttccgctgcctgaactgcaacgacaacactgatgggatccactgtgagaaatgtaagaatgggttctaccgccacagagaaagagataggtgtctgccgtgtaattgtaactctaagggatccctctccgcacggtgtgataactccggtagatgttcttgtaagccaggtgtgacaggagcaaggtgcgataggtgccttccgggtttccatatgctgaccgatgccggatgtacacaagaccagagactgcttgatagcaagtgtgactgcgatccagccggaatcgcgggtccttgcgacgcgggaaggtgtgtgtgtaagcccgcagtcactggcgagcggtgcgatcgatgccggtctggctactacaaccttgatggcggtaaccccgaaggctgtactcaatgcttctgttacggtcattcagcgagctgtcgctcctctgcagagtattctgtgcacaagattacctcaacatttcaccaggatgtagatgggtggaaggccgttcagagaaatggtagcccagctaagctgcagtggagtcaaaggcaccaggatgtattctcaagcgcgcaaaggctcgaccccgtttactttgttgccccagccaagttcttgggcaatcagcaggtttcctacggccaaagtctgagttttgattaccgagtggaccggggaggcagacaccccagcgcacacgacgtgatactggagggcgcaggtctgcggatcaccgcaccactcatgcctctcggaaaaaccctcccctgcggattaacgaaaacatatacttttcgcctgaatgagcacccctcaaataattggtccccgcagttgagctattttgagtatcgcaggctgttacgcaatctcaccgcgcttcggatccgggctacttacggcgagtacagcacagggtacattgacaacgtgacacttatcagtgccaggcctgtttctggggctcctgctccatgggtcgaacagtgtatttgcccggtgggatacaaaggccagttctgccaggactgcgcgtccggctacaaaagggatagtgcccgactgggaccttttggaacctgcatcccctgcaattgtcaggggggtggcgcatgtgaccccgacacaggagattgttatagtggggatgagaaccctgacatagaatgtgcagactgcccgattgggttctacaacgacccccacgatccacgatcctgcaaaccctgtccctgccataatggcttcagctgctctgtgatgcctgaaaccgaagaggtggtgtgcaataattgtccaccaggggtgaccggcgcacgttgcgagttgtgtgccgatggctattttggcgatccctttggggagcacggacccgtgcgcccttgccagccgtgtcagtgtaacaacaatgttgatccaagtgcatctggcaactgcgatagactgaccgggaggtgcctgaagtgcatccacaatactgcaggtatctactgcgatcaatgcaaggctggttattttggtgacccactcgctccaaatccagcagacaaatgtcgtgcatgtaactgtaaccccatgggctccgagcctgttggctgtcgaagtgacgggacctgtgtttgtaagccagggttcggcggacctaactgcgagcacggtgctttctcctgtccagcatgttacaaccaggtgaaaattcaaatggatcagtttatgcaacaacttcagcgaatggaggctcttatttccaaggctcagggcggagacggggttgtgcctgacacggagctggagggccgtatgcagcaggctgaacaggccctgcaggatattctacgcgacgcgcagatctctgagggcgcaagccgcagcctaggcctccagcttgctaaggtccggagccaagaaaactcatatcaatcacgcctggatgatctgaagatgacagtggagcgagtgcgtgccctggggagtcagtaccaaaacagagtaagggatacacacaggcttatcactcagatgcagttgagtctagccgagtccgaggcgagtctggggaatacgaacatccccgcttctgatcactacgtcggtcccaacggattcaaatcactggcccaggaggcgacacgattagctgagagccatgtcgaaagcgcctctaacatggaacagctaacccgggagactgaagactacagcaagcaggctctgagtctggtccgcaaggccctgcatgaaggagtgggatcagggagtggtagtcccgatggtgccgttgtccaggggttggttgagaagcttgagaaaacaaaatctctggcgcagcagctcactagggaggcaacccaggccgagatagaagccgaccgctcctatcaacatagcctacggttgctggattcagtctcccgcctccaaggggtgtctgaccagtctttccaagtcgaggaggccaagcggatcaagcagaaagctgattcacttagtagcctcgtcacacgccacatggatgagttcaagcggactcagaaaaacctgggaaattggaaagaggaggctcagcagctactccaaaatgggaaaagtggcagggaaaagagtgaccagctgctgtcaagggcaaatctcgccaaaagtagggcccaggaggcgttgagtatgggaaacgccactttctatgaggtggagtccattttgaaaaacctgagagagttcgatttgcaggtggataacagaaaggcggaggctgaagaagctatgaagaggctctcttacatctctcagaaggtcagtgacgcgagcgataaaacccagcaagcggaacgggcactcggatcagctgcggctgatgcccagcgcgctaaaaacggcgcaggagaggccctggaaatctcaagtgagatagagcaggagataggctccctgaacctggaggccaacgtgactgcagacggggcattggccatggagaagggcctggcttctctgaaaagcgagatgagagaggtggagggggagctcgaacgaaaagaactggaattcgataccaatatggacgctgttcagatggtcattactgaggcacagaaggtggacacccgcgcaaagaacgcaggcgtgaccatacaggacaccctgaataccctggacgggctcctacaccttatgggtatgtag

SEQ ID NO: 228115 - DNA, 3033 bp, synthetic construct
  misc_feature 1..3033: note = Description of Artificial Sequence: Synthetic coding sequence
  source 1..3033: mol_type = other DNA
atgccggcactatggctcgggtgttgcctctgcttctcgctgttgttgcccgctgctagagccactagcaggagagaggtatgcgattgtaatggcaagagccgtcagtgtatcttcgatagggaactgcatcgacaaaccggcaacggctttaggtgtctaaattgtaatgataacacagacggcatacactgcgaaaagtgcaagaatggtttctatcgacaccgcgagagggacaggtgtcttccttgtaactgcaacagcaagggaagtctatccgccaggtgcgacaactccggcaggtgttcatgcaaaccaggcgtgacgggcgcacggtgcgaccgctgcttgcctggcttccatatgctcactgatgccggatgtacacaagaccagaggcttctcgattcaaaatgcgactgtgacccagcagggatcgccggaccatgcgacgccggaaggtgcgtgtgtaaaccagcagtgacaggcgaacggtgtgaccggtgccggtccggctactataacttggacggtggcaaccccgaggggtgcacccagtgcttctgctatggacactcagcctcctgccggtcgagcgcagaatactccgtgcataaaattacatccactttccatcaggatgttgacggttggaaggctgtacaaagaaatggatcacccgcaaaattgcaatggtcccagcggcaccaggacgtcttttctagcgcccagcgcctcgacccagtgtatttcgtcgcccctgccaagttcctcggaaaccagcaggtatcctatggtcaatctctttccttcgattaccgcgtagatcggggtggccgtcacccaagcgcccacgatgtgattttggagggagcgggactgaggattacagcacctcttatgccactcggcaagaccctgccgtgcgggttgacaaaaacgtataccttccggcttaatgagcacccgagcaacaattggtcaccccaattgtcatacttcgagtataggagactactgaggaacctgactgcgctgcgaatcagggctacttatggtgagtacagcacgggatacattgataacgtgacactcattagcgcgcgacccgtgagcggagccccagcaccttgggtcgagcagtgtatctgtcccgtcggatacaaggggcagttttgccaggattgcgcatctggttacaagagagactctgcgcgtctcggcccattcggcacctgtatcccatgtaattgccagggcggaggagcctgcgatcctgatacaggtgattgctacagtggcgacgaaaaccctgacatcgagtgtgctgattgccccatcggcttctacaatgacccgcacgaccccaggagctgcaagccatgcccctgtcataatgggttcagctgcagtgttatgcccgagacggaggaggttgtttgcaacaattgtccccctggtgtgaccggcgctcgatgcgagctttgcgctgacggatactttggcgacccttttggtgaacatggtcctgtgcggccatgtcagccatgtcaatgtaataataacgttgatcctagtgcatcagggaactgcgaccggctgaccggcaggtgccttaagtgcatccataatacagctggcatatactgtgatcagtgtaaagccggttatttcggcgacccactggctcctaacccggcagataaatgtcgcgcatgtaactgtaatcccatgggatccgagccagtcgggtgtcgaagcgatgggacgtgtgtgtgcaaacctggttttgggggacctaactgtgaacacggtgctttctcttgtcccgcatgttacaaccaggttaaaattcaaatggaccagtttatgcagcagctgcagagaatggaggccctcatttccaaagcccagggcggagacggagtagtccctgacactgagttggaaggtcggatgcagcaggctgaacaagccttacaagatatcctcagggacgcgcaaatttctgaaggggcttctcggtcactcgggctgcagctcgcaaaagtgaggagccaagagaatagctaccaatccaggctggacgacctaaagatgactgtggagcgggtgagggcactgggctcacagtatcaaaatcgtgtgagggatacacatcgcctgattacacagatgcagctgtctctggcggagtccgaagctagcctgggcaacacaaatattccagctagcgatcactacgtgggcccaaacggattcaaaagcttagctcaggaagctacaaggctagcggagtctcacgttgagagcgccagcaacatggaacagctcactcgggagaccgaagactattcgaagcaggcactctccctcgttagaaaagcgctccatgagggtgtgggtagcggctctggaagtccagacggcgctgtagtgcaaggactggttgagaaactggagaaaaccaagagcctggcccagcagctcacgcgggaagctacccaggccgaaattgaagcagatcggtcttaccagcacagccttcgacttctggactccgtaagccggctgcagggcgtttccgatcaatctttccaggtggaggaagctaaacggatcaagcaaaaggccgacagcctgtctagcctggtcaccagacacatggatgagttcaagaggacacagaaaaacctcggcaattggaaagaagaggcccagcaactgctgcagaatggaaagagcgggagagaaaagtcagaccagctgctcagtcgggctaacttggcaaaatctcgggcacaggaggccctctcgatggggaacgcgactttctacgaggttgagtcaatccttaaaaacctccgggagttcgacctgcaggtagataaccgaaaagccgaagccttccctagtcaggacccagatcagcagcctaccgcagcccacgacgtcagagccggtcgcgaaggaactagcgccgagggccctcccccattcgcaggggataagcacaggtgggactcgggatag

SEQ ID NO: 228116 - DNA, 1590 bp, synthetic construct
  misc_feature 1..1590: note = Description of Artificial Sequence: Synthetic coding sequence
  source 1..1590: mol_type = other DNA
atggctgccgcagccttgctgctggggctggccttattggcacccagagctgctggagcaggcatgggcgcttgctacgatggagcaggtcgtcctcagcggtgtcttccggtgttcgaaaacgccgcatttgggagactggcgcaggcctcacatacatgcggctcccccccagaggacttctgccctcatgtgggggcagcaggcgcaggcgcacattgccagaggtgcgacgctgccgaccctcaacgccaccacaatgcctcatacttaaccgattttcactcacaggatgagtcaacttggtggcagtcaccctcgatggccttcggtgtccagtaccccactagcgttaatatcacactcaggcttgggaaagcgtacgaaattacctacgttcgtctaaaatttcacacctcgcgtcctgagtctttcgcaatttataaaagaagcagggccgacggcccttgggaaccctatcaattttactccgcatcctgccagaagacgtacggacgaccagaaggccagtatctcagaccaggtgaggatgagcgagtcgccttctgtaccagtgaattttctgacattagccccctctccggcggaaacgtggcattttctaccctcgaaggcagaccgagtgcttataatttcgaggagtcgcctggcctgcaggagtgggtcacatctactgagctgctgatcagtctcgaccgcctcaacaccttcggtgatgacatttttaaagaccctaaggtcctgcaatcgtactactacgccgtgtctgatttcagtgtgggcggacgttgtaaatgtaacggccacgcctccgagtgcggtccagacgtggccggacagctcgcctgcaggtgccagcacaacaccacaggcaccgattgcgaaagatgtctacccttttttcaggaccgaccctgggctcgcggaaccgctgaggccgctcacgagtgtctgccttgcaattgctccggacgaagcgaggagtgcacatttgatcgagagctgttccggtccaccggtcacggcggaagatgccaccattgtagggaccatacggctggtcctcactgtgagagatgtcaggagaatttctaccactgggatcctcggatgccttgccagccatgtgactgtcagtcagccggttctctgcacctgcagtgtgacgatacaggtacatgcgcctgcaaacctaccgtcactggctggaagtgcgatagatgtctgccaggctttcatagcctctcggaaggtggctgtaggccgtgcacctgcaatcctgccggaagcctggatacctgtgatccgagaagcggaagatgtccctgtaaagagaatgtagaaggaaacttgtgtgaccgctgccggcctggcacctttaacttacaaccccacaatcctgccggtcgttcctgtagatcaagggcttctagagtgaccagtcccaggtcagctccaactaatcgcacgtggagacccttctgcacagcctgccccagaactgtgcccgctggtagcgagggttgccctgatccacggcataccctgccgcaccttctcttcacgtag

SEQ ID NO: 228117 - DNA, 4728 bp, synthetic construct
  misc_feature 1..4728: note = Description of Artificial Sequence: Synthetic coding sequence
  source 1..4728: mol_type = other DNA
atggccgctgccgcactgctccttggccttgctctgctggctccacgggcagcgggagctggcatgggggcttgttacgatggagcaggacggccacagcgttgtttgcctgtgtttgagaacgcagcatttggcaggctagcacaggccagccatacgtgcggatcacctcccgaggatttttgtcctcacgtgggagctgccggtgcgggagctcactgccagcgttgcgacgcagccgaccctcaaaggcaccacaatgctagctatttgactgactttcattcgcaagatgagtctacttggtggcagtctccaagcatggcctttggcgtccaataccccacaagcgtgaacatcactctccgtttgggcaaggcgtatgagattacatacgtgcggctgaagttccatacttcccggcctgagtcctttgccatctacaaaagaagtcgcgcagatgggccatgggaaccctatcagttctactctgcttcctgccaaaaaacctacggacggcctgaaggccagtatctgcgacctggggaggacgagcgcgtcgccttctgtacaagcgagttttcagatatctctcccctgtccgggggaaacgtggcgttctccacgctagaggggagaccatcagcctataattttgaagaaagccctggtctgcaggagtgggtgacatccacagaactgcttatctctctggaccggctgaacacatttggagacgacatatttaaggatcctaaagtgctgcagtcatattactacgctgtatccgacttcagcgtcgggggtcgatgtaaatgtaatggacatgccagcgagtgtggacccgacgttgccggacagctggcttgccggtgtcagcacaacactacagggaccgactgtgagcgctgcctgccgttcttccaagatagaccctgggcaaggggcacagccgaagctgcacatgagtgtctgccatgtaactgtagcgggagatccgaagaatgtacctttgaccgtgagctcttccgctccacagggcatggcggacgctgccaccactgcagagaccacacagccggaccacattgcgagagatgccaagaaaatttttaccactgggatcctcggatgccatgccaaccttgcgactgccagagcgctggatcgttgcatctgcagtgtgatgataccggtacgtgcgcctgcaaaccaacagttaccggctggaaatgtgacaggtgcctgcccggattccatagtctgtccgaaggtgggtgtcggccttgtacctgtaatcccgcaggctcactggatacctgcgatcctaggtccgggcgatgtccttgtaaggaaaacgttgagggaaatctgtgtgatcggtgccgccctgggacttttaatctgcaaccacacaaccctgcgggatgcagtagttgcttctgctatggtcactctaaggtctgcgcatcaactgctcagttccaagtccaccatattctgagcgactttcatcagggcgctgaagggtggtgggcaaggagcgtaggcggtagtgagcatcctccacaatggtctcccaacggggtgctgctgagcccagaggacgaggaagagctgactgcccctgagaaattcttgggagatcagaggttcagttacggccagccactcatcttgacttttcgagttcccccaggcgactccccactccctgtacagctgagactagaaggaaccgggttggctttaagcctgagacactctagcctttctggaccacaggatgcgggacacccaagagaagtcgaactacgcttccatctacaagagacgtcggaggacgtggcaccccctctgccgcctttccactttcagcggctcctcgctaatctaaccagtttaaggctgagggtctctcccggtcccagccccgcaggcccagttttccttactgaggtgcgcctgacctcggcacggcctggtctatctccccctgcgtcctgggtggaaatttgttcctgtccaacaggatacaccggacagttttgcgaaagttgcgcacccggttacaagagagagatgcctcagggaggcccatacgccagctgtgtgccctgcacatgcaaccagcatggaacctgcgatcccaacaccggaatttgcgtttgttcacaccacactgagggccctagttgtgaacgctgcctgccaggattttatgggaaccccttcgcaggccaggcagatgattgccagccctgtccctgtcccggacagagtgcctgcacaaccattccagagtctcgtgaagtcgtgtgtacacattgtccgcctggccagcgcggaaggcggtgcgaggtatgcgacgatggattcttcggagatcccctgggcctcttcggccatccccagccctgccatcagtgtcagtgcagcggaaacgtcgatccaaatgcagttggaaactgcgatccgctgtctggccactgcctcagatgtttgcacaataccaccggggatcactgcgaacactgccaggagggcttctacggcagcgcccttgcgcctcgcccagcggacaagtgtatgccatgtagctgtcatcctcagggttcagtgagcgaacaaatgccttgtgatccagtgactggacagtgttcatgcctcccccacgtcactgccagagactgtagccgttgctatccgggattctttgacctccagcccggacggggatgtcggtcatgcaagtgtcaccctctggggtcccaggaggatcagtgccacccaaaaaccggccaatgcacttgtaggccgggagttaccgggcaagcttgcgacaggtgccaattgggtttttttggatttagcatcaagggatgcagggcatgtcgatgctcaccgctcggggcagcctccgcccaatgtcacgagaatggtacctgcgtgtgtcgacccggatttgagggctacaaatgcgataggtgtcatgataatttttttctcacggctgacgggacacattgtcagcagtgtccttcttgttacgctctcgtgaaggaagaagctgctaagctgaaagctagactgaccctgacagaaggttggcttcaaggttcagattgcgggtcaccttggggcccactggatatcttgctgggcgaagctcctcgaggagacgtgtatcaaggacatcatctcctgcctggtgcacgggaggcctttctggaacagatgatgagtctggagggtgctgtcaaggccgctcgggagcagctgcagaggctgaacaagggtgccagatgtgctcaagctgggagccagaaaacttgcacacaattagccgatttagaagctgtgctggagtcttctgaagaggagatattacacgccgcagccatactggcctctttggaaatcccccaggagggcccaagccagcctacaaagtggtcccacctcgctacagaagctcgcgctctggctcggtctcatcgcgacaccgctaccaagattgccgctaccgcttggcgcgctttgttggcttccaatacctcttatgcccttttatggaacctgctcgagggccgagtcgctctggaaacccagagagatctggaagaccgataccaggaggttcaggctgcccagaaggcgctgcgaacggctgtagctgaagtgcttccagaggctgagtctgtccttgccacagtccagcaggtgggcgcagacactgcaccttatctggcactgctggccagccccggagctcttccgcagaaaagtcgcgcagaggatttaggactgaaggccaaggctctcgaaaagactgtggccagctggcagcatatggcaaccgaggccgctcgcaccctccagaccgcggctcaggccactctccgacagacagagcctcttacaaagctccaccaggaagctcgagcagccctcacacaggcttccagtagcgtgcaggcagctacggtgaccgtgatgggtgctcgcacgctgctggcagatctcgagggtatgaaattgcagttccccaggcccaaggatcaggctgccttacagagaaaggccgacagcgtgagcgaccggctgctggccgacaccagaaagaagacaaaacaggcggaacgaatgctgggaaacgccgcaccactaagttcctcggctaaaaagaaaggacgggaggcggaagtgctagccaaggatagcgccaaactggcaaaggcgcttctgagagaacgcaagcaggctcatagacgtgcatcaaggctaacatctcagacccaggccacgctccaacaggcttctcagcaggttctggcgtcggaggctaggaggcaagagctggaggaggctgagcgcgtgggtgccggtctgtccgaaatggagcaacaaatccgggaatctcggatatcattggaaaaggacattgaaacactaagcgagctcctcgcgagactcggtagcttagatacacatcaggctcctgcccaggctctgaacgagacgcagtgggccctcgagcgcttacgactccaactgggaagtccaggcagtctccagaggaagctgagcttactcgaacaagagtcacagcagcaggagctgcagattcaggggtttgagtcggacctggccgagatccgagccgataagcagaatctcgaggctattctgcactctctccccgagaattgtgcgtcgtggcagtag

SEQ ID NO: 228118 - DNA, 459 bp, synthetic construct
  misc_feature 1..459: note = Description of Artificial Sequence: Synthetic coding sequence
  source 1..459: mol_type = other DNA
atgcggctgccattgtcacattcacccgaacacgtcgagatggcacttttgagcaacattttggctgcctattcctttgtcagcgagaatcctgagcgcgcagcgctctactttgtgagcggggtgtgcatcgggctggtgctaaccctcgccgctctggtgatcaggatttcctgccacactgactgcaggagacgaccgggaaagaagttcctccaagatcgtgagtcctctagtgactcatcggactctgaagatggaagcgaggacacggtctcagatctctccgtcagaaggcataggaggtttgagcgcacacttaacaagaatgtgtttacatccgcagaagagttagaaagagcacagcgcctggaggaaagggagaggattataagagagatatggatgaacggtcagcccgaagtgcctggcacgcggtctttgaatagatactactag

SEQ ID NO: 228119 - DNA, 1200 bp, synthetic construct
  misc_feature 1..1200: note = Description of Artificial Sequence: Synthetic coding sequence
  source 1..1200: mol_type = other DNA
atggctcaacgcgctttcccaaacccttacgcagattataacaagagcctggccgaaggctatttcgatgctgccggtagactgactccagaattctctcagaggttaacaaacaaaattagagaactgctgcagcagatggagcgcggactgaaaagcgccgaccctagggatgggacaggatacactgggtgggcaggtattgcagtcttgtatcttcacctgtatgatgtgttcggggaccctgcttatcttcagctggcccatggctacgttaagcaatcactgaactgcttaacaaaacgctctattacctttctgtgtggagacgcaggcccacttgcggtcgcagccgtgctgtaccacaagatgaacaatgaaaaacaagcggaggattgcatcacccgtctgatacatttgaataagatagatccacatgcacccaatgaaatgctctacggtcgaattggctatatctatgccctacttttcgtgaataagaattttggcgtggagaaaatcccgcagtctcatatacagcagatctgtgaaaccattctgactagcggtgaaaacctggctcgcaagagaaatttcaccgccaagagtcccctgatgtatgagtggtatcaggaatactacgttggcgcagcacacggactcgcaggcatctactactacctgatgcaaccctctcttcaggtgagtcaggggaaacttcactcgttagttaaaccgagcgtggactacgtgtgccaattgaagttcccctccggtaattaccccccatgcattggcgacaatagagatctactagtccactggtgccacggagcccctggcgttatttatatgcttatccaggcgtacaaggtattccgggaggaaaaatatctgtgtgatgcatatcagtgcgcggatgtgatctggcagtatggcttgttgaaaaagggttacggattgtgccacggatctgccggtaatgcctatgcgtttttgaccctttacaatctcacccaggatatgaaatacttatatagagcctgtaagttcgcagagtggtgcctggagtatggagaacatggctgcagaacccctgatacccccttttctctcttcgaaggcatggcgggtactatctactttctggccgatttgctcgtgcccaccaaggcgcgttttccagccttcgaactctag

SEQ ID NO: 228120 - DNA, 1200 bp, synthetic construct
  misc_feature 1..1200: note = Description of Artificial Sequence: Synthetic coding sequence
  source 1..1200: mol_type = other DNA
atggcccagcgcgcatttcctaatccatacgctgattacaataagtcactggctgagggatacttcgacgcggctggtaggctcaccccagagttctcacagaggctgaccaacaagatccgagaattactgcagcagatggagcgcggtctcaagtctgccgatcctcgggatgggacagggtacaccggatgggctgggatcgccgtgctatatcttcacctgtacgacgtgttcggcgatcctgcctacctacaactcgcccacgggtatgtcaagcagtcgctcaattgcctaactaagagatcaattactttcctatgtggagacgctggccctctggcagtagcagctgtgctttatcacaaaatgaataacgaaaagcaggcagaagactgcataacaaggcttatccatctcaataagatagacccgcacgccccaaacgagatgctgtacggcagaatcgggtatatctatgctctgttgtttgtgaataaaaatttcggggttgaaaaaattcctcaaagccatatccagcagatctgcgaaacgatactcacctcaggagagaacctggcacgtaaacgaaattttactgccaagagcccgcttatgtacgaatggtaccaagagtattacgtcggcgctgcccacggactggctggaatttactattacctgatgcagccctctctgcaggtcagccaggggaagcttcactcactcgttaaaccatctgtcgattatgtatgccaattaaagtttccctctgggaactatcctccatgcattggggacaatagagatctcctggtccactggtgtcatggcgcaccaggtgttatttacatgcttatccaggcgtacaaagtgttcagagaagaaaagtacctctgtgatgcctaccagtgcgccgatgttatctggcagtatggccttcttaaaaaagggtatggtctctgccatggcagcgccggaaatgcttacgcctttctgacattgtataatctaactcaagatatgaagtatttgtaccgtgcatgcaagttcgcagagtggtgtctggaatatggcgagcatggttgcagaactcctgataccccattctcactgtttgaggggatggccggtacgatttatttcttagcagacctgttggtcccaaccaaagctagatttccagcattcgagctctag

SEQ ID NO: 228121 - DNA, 1200 bp, synthetic construct
  misc_feature 1..1200: note = Description of Artificial Sequence: Synthetic coding sequence
  source 1..1200: mol_type = other DNA
atggcgcagagagcctttcctaacccgtacgccgactacaacaagtcgctcgctgagggttacttcgacgccgctgggaggctgacacccgagttttcacagcggctgacgaacaaaattagggagctcttgcagcaaatggagcgaggactgaaatctgccgatcctagggatgggactgggtatacgggttgggcgggaattgctgtactctatttgcacttgtacgacgtgttcggcgaccctgcctatctgcagcttgctcatgggtatgttaagcagagccttaattgcctgacaaagcggagcatcacatttctctgcggggacgctggccctttggccgtcgccgcagtgctttatcacaaaatgaataatgagaagcaggccgaggactgtattacacggctgattcacctgaacaagattgacccacatgcgccaaatgaaatgctctacggtagaatcgggtatatttacgccctactctttgtaaataagaacttcggcgtggagaaaattccacagtcgcacattcaacagatctgtgaaacaatactgactagtggggagaacctcgcaaggaaaagaaacttcacagccaaaagtcccctgatgtatgaatggtaccaggagtattacgttggagctgcgcacggtctggctgggatttactactacttgatgcaacccagtctgcaggtttctcagggcaaactgcatagtcttgttaaacccagtgtcgattatgtttgccagctgaagttcccttctgggaactacccgccatgcattggtgacaacagggacctgcttgtgcactggtgccacggggctcctggcgtaatctatatgctgattcaggcatataaggtcttcagagaagagaaatacctgtgtgacgcctaccaatgtgcagacgtgatctggcagtacggcctgctgaaaaaggggtacggactgtgccacggcagtgcaggtaacgcctacgcctttttgactctttacaatctgactcaggatatgaaatatctgtatcgagcatgcaagtttgctgagtggtgtctcgagtatggagagcacggatgtagaacacccgatacaccattttccctcttcgagggcatggctggcactatttattttctggccgacctgcttgtgccaaccaaggccaggtttcctgccttcgaactctag

SEQ ID NO: 228122 - DNA, 591 bp, synthetic construct
  misc_feature 1..591: note = Description of Artificial Sequence: Synthetic coding sequence
  source 1..591: mol_type = other DNA
atggcgcagagagcattccctaacccgtacgccgattacaataagtctcttgctgagggttactttgatgcggctggaaggctgacccccgaattctcacaacggctcaccaataagatacgcgagctactgcagcagatggagcggggtctaaagtctgcggacccacgtgacgggaccgggtacacggggtgggccggaatcgctgtgctttatttgcacctttacgatgttttcggggatccagcttatttgcagctcgcccatggttacgtcaagcagagcctcaactgtctgaccaagaggtctataacgtttttgtgcggtgatgctggaccactcgctgtagcagctgtgttatatcataagatgaataacgagaagcaagccgaggattgtatcacgcgattaatccatcttaacaagatcgaccctcacgcccctaatgaaatgttgtacggcagaatcggctatatctacgcattgttattcgttaataagaatttcggcgtagagaagatcccccagagccatatccaacagatatgtgagacgattctgacgagcggcgagaatctggccaggaagtag

SEQ ID NO: 228123 - DNA, 1200 bp, synthetic construct
  misc_feature 1..1200: note = Description of Artificial Sequence: Synthetic coding sequence
  source 1..1200: mol_type = other DNA
atggcccagagggcatttcccaacccctacgccgattataataagtcgctcgccgaaggctatttcgacgccgctggtaggctgaccccggaattttcgcagcggctgaccaacaagattcgggagttgctgcagcagatggagcgagggttgaagagcgctgacccacgcgatgggactggctacaccggatgggcaggcatcgctgtgctgtatctacacctgtacgacgtcttcggagaccctgcatacctgcaacttgctcatggctatgttaaacaatcactgaattgtctcacaaaaagatcaatcactttcctgtgtggcgatgccggacccctcgccgttgccgctgtgctctaccataaaatgaacaatgagaagcaggccgaagattgcataaccaggttaattcacctgaataagatcgatcctcacgcacccaatgagatgctgtacggtcggatcgggtacatttatgccttgctgttcgtcaataagaatttcggtgttgaaaagatccctcagtctcacattcaacaaatctgcgagactatactcacgtcaggggagaacctggccagaaagcgcaacttcaccgcaaaatcccccttaatgtacgaatggtatcaggagtattacgtcggggcagctcacggactcgctggcatatattactatctgatgcagccctctttgcaggtcagtcaggggaaactgcattccctggtgaaaccttccgtggattatgtgtgccagctgaaatttccgtccggcaattacccaccttgtattggggacaatagagatttgctggtgcattggtgtcacggggcacctggcgtgatatatatgctcattcaggcctacaaagtcttcagagaggagaaatacctgtgtgacgcatatcagtgcgctgatgtcatctggcagtacggtctgcttaagaaaggctacggtctctgccacgggagcgctggtaatgcctatgccttcctcaccttgtacaacctgactcaggatatgaagtatttgtatagagcatgcaaatttgcagaatggtgcctcgagtacggcgagcatggttgccgtacgcccgacactcccttcagcctgtttgaaggcatggctggaaccatttactttctggccgacctcctggttcctactaaggccagattcccagcattcgagctgtag

SEQ ID NO: 228124 - DNA, 1353 bp, synthetic construct
  misc_feature 1..1353: note = Description of Artificial Sequence: Synthetic coding sequence
  source 1..1353: mol_type = other DNA
atgggcgaaacaatgagtaagcggctgaagctgcacttgggaggggaggctgaaatggaggaacgcgcatttgtgaacccttttccggattatgaggcagccgctggcgctctacttgcttcaggcgctgcagaggagacagggtgcgtgaggcctccagccacaacggacgagcctggcctgccttttcatcaagatggaaagatcatccacaactttatccggaggattcagactaaaataaaggacctgctacagcaaatggaggagggactgaaaaccgcggacccacacgattgctccgcttatactggatggactggtattgctctgctttatctgcagctgtaccgagtgacttgtgatcagacatacctgctgaggtccctagactacgtcaagcgaactttacgtaatctcaacggaagaagagtcaccttcctctgcggagatgctgggccactggccgtcggggcagtgatttatcataagctcagatccgattgcgaaagtcaagaatgtgtgacgaagctgctgcagcttcaacggtccgtcgtttgccaggaatccgacctgcctgatgagctgctgtatggccgagctggttacctttacgcactcttatatttgaatactgaaattgggccagggaccgtttgtgagtcagctatcaaagaggtggtgaatgcaatcattgaatctgggaagaccctttctcgagaagagaggaaaactgagagatgcccactgttgtatcaatggcataggaagcagtacgtcggcgctgcacatggcatggctgggatctactatatgctgatgcagccggctgccaaagttgaccaggaaacacttaccgaaatggtgaaaccgtccatcgactatgtgagacataagaaattccgaagcggcaactacccatcctccctgagcaacgaaaccgaccggctggttcactggtgtcacggcgctccaggagttatacatatgctcatgcaggcctacaaagtgtttaaagaagagaagtacttaaaagaggcgatggagtgctcggatgtgatatggcagcgcggtcttctgcgcaagggatatggtatctgtcacgggactgcaggcaacggatatagtttcctgtccctgtatcgcctgacacaggacaagaaatacttatatagagcctgtaaattcgccgagtggtgcctggactatggcgctcacggctgcagaatcccagacaggccgtacagcctgtttgaaggtatggctggcgcaatacatttcctgagtgatgtgctgggtccagagacctcaaggtttccggctttcgagctggactcttccaagagagattag

SEQ ID NO: 228125 - DNA, 2199 bp, synthetic construct
  misc_feature 1..2199: note = Description of Artificial Sequence: Synthetic coding sequence
  source 1..2199: mol_type = other DNA
atgacggagggcacatgtttgcgcaggcgtggaggcccttacaaaacagaacccgctactgacctgggcaggtggaggctgaactgcgagagaggtcgacaaacatggacatacctccaggacgagagagctggaagggaacaaacagggctggaggcctatgccctggggctcgatacaaagaactattttaaggacctcccaaaggcacataccgcgttcgaaggagccctaaacggaatgactttctatgtgggactgcaggcagaagacggacactggacaggagactacggcggacctttgttcctgctccccggtctgctcattacttgtcacgttgccaggattcccctccctgccggatatcgggaagagatagtcagataccttcgctccgtgcagttacccgacggcggatggggactacatattgaggacaagagcacggtattcggcactgccctaaactatgtaagtctaaggatcctgggggtgggccctgacgatcctgatctcgtgcgggcacggaacatcctgcacaaaaaagggggtgcagttgctatccctagctggggcaaattctggttggctgtgctgaacgtatatagttgggaggggcttaatactttgttcccagagatgtggctgtttcctgattgggcccctgcccacccgtccactctgtggtgtcactgcaggcaggtctaccttccaatgagctattgttatgctgtgcgtttaagtgcagcagaagacccgttggtacaaagcctgcgtcaggaactgtatgtggaggacttcgccagcatcgattggcttgcccagcggaacaatgttgcaccagacgagctgtatacccctcatagctggctcctacgggtggtatatgccttgctgaatctatacgaacaccatcactcagctcacctaagacaaagggctgtccagaaactatacgaacacatcgtggcggacgataggtttaccaagtctatcagcatcggtcccatttcaaagacaatcaacatgcttgtgaggtggtatgtggacgggcctgcctccactgcgtttcaagaacacgtgtccagaattcccgactacctttggatggggttagacgggatgaaaatgcaagggaccaacggcagccagatttgggatactgcgtttgctatccaagcccttctggaggcgggtggacaccatagaccagaattttcatcttgcctgcagaaggcacatgaattcttgcgtttaagccaggtccctgacaaccctccagattatcagaaatattacagacaaatgagaaagggcggtttctcatttagtacgctcgactgtggctggatcgttagcgactgcaccgcagaggcgctaaaagcagtgttgttgctgcaagagaaatgtcctcatgtgactgaacacataccaagagaacggctatgcgatgccgtggcggtcctcctgaatatgagaaaccctgacggcggatttgcaacttacgagacaaaacggggtggacatttacttgagttgttgaatccctccgaagtgttcggggatatcatgatcgattatacctacgtggagtgtacatcagcggtgatgcaggcgttaaagtatttccacaagcgctttccagaacaccgtgctgcagaaatacgcgaaacgctgacccagggtctggagttctgccgtaggcaacagcgggctgacggtagctgggagggctcgtggggtgtctgcttcacatacggtacgtggtttgggctggaggctttcgcttgtatgggccagacctaccgagatggcaccgcatgtgctgaagtttcccgtgcgtgtgactttcttctttcgcggcagatggctgacggcggatggggagaggatttcgagtcatgtgaggaaagacgctacctgcaatccgcccagagccagatccataatacctgctgggccatgatgggcctcatggccgtccgacaccctgacatcgaggcacaagagcgcggtgtaagatgtcttcttgagaaacagctgccaaacggtgattggccgcaggagaacatcgccggagtctttaataagagttgtgcaataagttacacatcgtacagaaacatatttcctatatgggctcttgggagattttctcaactctatcccgaacgcgctctcgcgggacacccgtag

SEQ ID NO: 228126 - DNA, 2199 bp, synthetic construct
  misc_feature 1..2199: note = Description of Artificial Sequence: Synthetic coding sequence
  source 1..2199: mol_type = other DNA
atgaccgagggaacatgcctcaggagaaggggcggtccctacaagaccgaacctgctactgatctgggaaggtggagactaaattgtgaaaggggaaggcagacatggacctacttgcaagatgaacgtgccggtcgggagcagaccggcctggaggcttacgccctgggtctcgataccaagaactatttcaaagacctgccgaaggcccataccgcattcgaaggcgctctcaatggtatgacattctacgtaggcttgcaggccgaagacgggcactggacaggcgattatggaggccctcttttcctcctcccaggcctgctgatcacatgccatgttgccaggattcctctgcccgctgggtaccgggaggagattgtccggtatctgcgtagcgttcagttgccagatggagggtgggggctgcacatcgaagacaaaagcaccgtgttcggcacagcactgaactacgtcagtctgagaatcctgggagtggggccagacgacccagacctggtccgcgcacgcaacatcctccacaaaaagggcggtgctgttgctatcccgagctggggcaaattttggctggccgtgctgaatgtgtattcctgggagggacttaatactctcttccccgagatgtggctctttccagattgggctccagctcaccccagcactctgtggtgccattgcaggcaggtgtatcttcccatgtcttattgctacgcggtcagactgagtgccgcagaagatcccctggtgcagagcctcagacaggaattatacgtggaagactttgcaagcattgactggcttgcacaacgtaataacgtggcaccagatgaattgtacacgccacactcctggctgctccgcgtggtgtatgctcttctgaatctgtatgagcaccatcactccgcccatcttcgtcaaagggccgtgcagaagttgtacgagcacattgtggcggatgacaggttcacaaaatcgatctcaatcggccctatcagtaaaaccattaacatgcttgtccggtggtacgttgatggtccggcaagtacagctttccaggagcatgtgtctcgcataccagattatctctggatgggcttggacgggatgaagatgcaaggaaccaatggcagtcagatctgggatactgcatttgccatccaggcgttgctggaggctggtggccaccatcggcctgagttcagttcctgcttgcagaaggcccatgagttcctccgcctgtcccaggtgcccgacaacccccctgattaccagaaatactaccggcagatgcggaaaggcggattctctttcagtacgcttgattgcggctggatcgtgagtgattgcacagcagaagcgctgaaagccgtcctactgctccaggagaagtgtccccatgtaaccgagcacattccgagagagcgcctttgcgacgcagtggctgtgcttctgaatatgagaaatcccgatggagggttcgctacttatgaaaccaaaaggggaggacacctgctggagctactgaacccctccgaggtgttcggagacattatgattgactacacgtatgtggagtgcacatccgcagttatgcaggccctgaaatatttccataagcgatttcctgagcatcgggcagcagagattcgcgagactctgacacagggcttggaattctgccgaaggcagcagcgagccgatgggtcttgggaagggagctggggcgtgtgctttacatatggaacctggtttggcctggaagcctttgcctgcatggggcagacatacagggatggaactgcttgcgctgaggtatctagggcctgcgattttctgcttagccgccagatggctgacggaggatggggggaggacttcgagtcgtgcgaagagcgacgttacctgcagtccgcccagagtcagatacataacacctgctgggccatgatggggcttatggctgtacgccacccagatatcgaagcccaagagaggggtgtaaggtgcctccttgagaagcaactgcccaacggtgattggccccaagagaatatcgctggcgtgttcaataagtcctgtgctatcagctatacatcgtacagaaatatctttccgatttgggcattgggcagattctctcaactgtatcccgaaagggcgctcgccggacacccatag

SEQ ID NO: 228127 - DNA, 1959 bp, synthetic construct
  misc_feature 1..1959: note = Description of Artificial Sequence: Synthetic coding sequence
  source 1..1959: mol_type = other DNA
atgactttctatgtcggattacaggcggaagacgggcactggaccggggattatggagggccattgttcctgttacccggactcttaatcacatgccacgtagcgaggattcccttgcctgccggataccgcgaggagattgtgcgttatctgcggtccgtgcagcttccagacggaggatggggattgcatattgaagacaagtccactgtctttgggaccgcgttaaactacgtgtctctgaggatcttgggagtgggcccagatgatccggacttggtgcgggctcggaatatactgcacaagaagggaggcgcagtggccattccttcatggggcaagttctggttggcagtcttgaacgtgtacagttgggagggcctgaacaccctgttccccgaaatgtggctatttccggattgggcacccgctcatccctcgaccctgtggtgtcattgccgtcaggtctacctgccgatgtcctattgctacgccgttcgtttatccgcagcagaagaccctcttgttcagtctttgagacaagagctttatgtggaggatttcgcatccatcgattggttagctcagcgaaacaacgtggcaccagacgaattgtacaccccacacagttggctactgagggttgtttatgcccttctgaacctgtacgagcaccaccattctgcccatctccgacagcgggctgtgcagaagctgtacgaacacattgttgcagatgatcggttcactaagagtatcagtatcggccctattagtaaaactatcaacatgcttgtgaggtggtacgtggatggaccggctagcacagctttccaggagcatgtgtcgcgcatccccgactacctctggatgggattggacgggatgaagatgcaaggaaccaacgggagtcagatctgggacaccgcttttgcgattcaagccctgctggaggccggtggccatcatcggcctgagtttagctcctgcttacagaaagcacatgagttcctgcggctaagtcaggtacccgataaccccccagactaccagaaatactatcgccagatgcgcaagggagggttttccttcagcacacttgactgcggctggatcgtatccgactgcaccgccgaagccctgaaggccgtcttactcctgcaggagaagtgcccccatgttacagaacatatcccaagagaaaggctgtgcgacgctgtggcggtcctgcttaatatgcgcaaccctgacggaggattcgctacctacgagactaagcggggtggccacctgctggagctgctcaacccatcagaggttttcggcgatattatgattgattacacttatgtggaatgtactagcgcagtgatgcaagccttgaaatactttcacaagcgctttcctgagcatcgcgctgcggaaattcgggagacgctaacccagggcttagagttctgtagacggcagcaacgggcagatgggagctgggaggggagttggggggtttgcttcacgtatggaacatggtttggactcgaggcatttgcttgtatggggcaaacctaccgggatgggactgcgtgcgccgaggtttcacgggcttgtgactttctgttatcgaggcagatggcagacggtgggtggggcgaggacttcgagtcctgtgaagaacgtagatatctgcagagcgcacaaagtcagatccacaacacctgttgggcgatgatgggtctcatggccgttcgccaccccgacatcgaagcgcaggagcggggtgttcgatgcttactggagaaacagctgcccaacggtgactggcctcaagagaatatcgcaggagtgtttaacaaatcttgcgccattagttatacctcttaccgcaacatcttccctatttgggccctgggccgtttcagtcaactctaccccgaacgggctctagcgggacacccatag

SEQ ID NO: 228128 - DNA, 2166 bp, synthetic construct
  misc_feature 1..2166: note = Description of Artificial Sequence: Synthetic coding sequence
  source 1..2166: mol_type = other DNA
atgacagagggcacctgcttaaggcgcagaggcggtccttacaaaaccgaaccagccaccgacctggggagatggcggttgaattgtgaaagaggacggcaaacatggacctatctccaagatgagagggccggaagagagcaaactggcctggaagcttacgccctgggacttgataccaaaaactactttaaggacctgccaaaagcccacaccgcctttgaaggcgcactcaacgggatgacattttacgtcggtctgcaggccgaggacggtcattggacgggggattacgggggacccctcttcctgctaccaggcctgctgataacttgccacgtagcgagaattccactacctgccggatacagggaggagatagtgcgatacctgcggcacatcgaagacaaatcaacagtcttcgggacagccttaaattacgtttcccttagaatcctgggcgttggccctgatgacccagatttggtgcgggctcggaacatccttcacaagaaaggcggtgctgtagcaatcccctcttggggcaaattttggctcgccgtgctaaatgtatattcttgggagggcctcaacacgctgtttcccgaaatgtggctgttccctgattgggccccagcccatcccagcactctctggtgccattgtcggcaggtctatctgcccatgtcctactgctacgccgtgcgtctaagcgccgctgaggaccctctggttcaaagtttgagacaggaattgtacgtcgaagacttcgctagtatcgactggctcgctcagcgcaacaacgttgctccagacgagttgtataccccccactcatggctgctgcgcgtggtgtatgccctgcttaatctttacgagcatcaccacagcgcgcatctgagacagagggctgttcagaaactctacgaacacatcgtcgctgacgaccgcttcactaagagcataagtatagggcctatctctaagactataaatatgctggtgagatggtacgttgacggcccagcaagcactgcctttcaagaacacgttagcaggatccctgactacttgtggatgggcctggacggtatgaagatgcaggggactaatggatcccagatctgggataccgcatttgcaatacaggcgcttcttgaagcgggaggccaccaccggcctgagttcagctcatgtctgcagaaggcccatgagtttcttcggctgagccaggttcctgataatccgccagactaccagaagtactaccgtcagatgagaaagggcggtttctctttttccacccttgactgtggttggatcgtctcagactgcacagccgaagcgctgaaggccgtcctcctgctgcaggaaaaatgtccgcatgtgaccgaacacattcccagggagcgtctgtgtgacgccgtcgccgtgctgcttaacatgagaaatccggacggtggcttcgccacgtatgagacaaagcgtggaggccacttactcgaattgctgaacccatctgaagtgtttggcgacatcatgatagattatacttacgtggagtgcaccagcgccgtcatgcaggccctcaagtactttcataagcgattcccggagcatagggctgctgaaatccgcgagacactcacccaaggattggagttttgcagacgtcagcagcgcgcagatggcagctgggagggctcctggggggtgtgctttacatacggcacctggtttgggctggaggcgtttgcgtgtatggggcagacttatagagatgggacagcctgcgctgaagttagccgtgcgtgtgatttcctgttgtcccggcagatggcagacgggggttggggagaagattttgagtcctgtgaggagcggcgatacctccagagcgcacaaagccagattcataatacatgttgggccatgatggggctgatggctgttcgacatcctgatattgaggcccaagaacgcggtgtgcggtgtctgttggagaaacaactgccgaacggagactggcctcaggagaatatcgctggggtgttcaataaatcgtgcgctatcagctacacatcttaccggaatatttttcctatctgggccctcggcagattcagtcagctgtaccctgaacgggcactcgccggacatccttag

SEQ ID NO: 228129 - DNA, 1977 bp, synthetic construct
  misc_feature 1..1977: note = Description of Artificial Sequence: Synthetic coding sequence
  source 1..1977: mol_type = other DNA
atggggagaaggagggctcctgcaggtggaagtttaggtcgggcacttatgagacaccagactcaaaggtcgagatcacaccgtcacaccgattcatggctgcacacatcggagctcaacgacggctacgattgggggaggctcaaccttcagagtgtgacggagcagtcaagccttgatgactttttggcgacggccgagctggctggaacggaattcgtagccgagaagctgaatatcaagtttgtgcctgcggaggcccgtaccggcttgctgtccttcgaggaatcccaaaggattaaaaagcttcacgaagaaaataagcagttcctgtgcattcctagacgccctaactggaatcagaacaccacccctgaggagctcaagcaggctgagaaggacaattttctcgagtggcgacgccagctagttcggctggaagaggaacagaagctgatccttaccccctttgaaagaaacctcgatttctggcgacaactttggagagtgatagagcggtcagatatcgttgtccagattgtcgacgcacgcaatccactgctgtttagatgcgaagatctggaatgctacgtaaaggaaatggatgcgaataaagagaatgtgattttgatcaacaaggccgacctgctaactgctgaacagcgaagcgcctgggcaatgtacttcgaaaaggaggatgtcaaggttatcttctggtccgccttagccggagccattcccctcaacggagactctgaggaagaagcaaatcgggacgaccgtcagtcaaataccacaaagtttgggcactcaagtttcgaccaggccgaaattagtcactctgagtcagagcatctcccagcccgagattccccatctttgtcagagaaccctacaaccgatgaggacgatagtgagtatgaggattgtcccgaagaggaggaagatgattggcagacctgttccgaagaagatggccctaaggaagaggactgcagtcaggactggaaggaatcttcgaccgccgatagcgaagcacgcagccgaaagaccccacagaagaggcagatccataatttctcgcacctcgtcagcaagcaggaactgctggaactattcaaggaactccatactggcaggaaagtcaaggatggccaactgaccgtcggccttgtagggtatcctaacgttggtaagtccagtactatcaacacaatcatgggaaacaaaaaagtgtcagtgtccgcaacccccggacacactaaacactttcagacgctatacgtggagcccggattgtgtctttgtgattgccctggcctggtcatgccatccttcgtaagcaccaaggcggaaatgacctgcagcggcattcttcctattgatcaaatgagggaccatgtgccgccagtgagcctggtgtgtcagaatatccctaggcacgttttggaagctacctatggcattaatataattacccctagagaagatgaggatcctcaccgaccgcctaccagcgaggagctcctcacagcatacggatacatgcgcggtttcatgaccgcccacggacagccggatcagcctcggtccgcccgttatattcttaaggactacgtcagcggcaagctcttgtactgccatccaccccctggccgtgacccagtgaccttccagcaccaacaccagcgtttactggaaaataaaatgaactcggacgagattaagatgcagctcggccgaaacaaaaaagccaagcagattgagaacatcgtcgacaaaacattctttcaccaggaaaatgtccgcgctctgacgaaaggcgtccaggctgtaatggggtataagcctggatccggagtggtgactgcgtctaccgcctccagcgagaatggagccggaaaaccttggaaaaagcatggtaatagaaataagaaggagaagtctaggaggttgtataagcaccttgatatgtag

SEQ ID NO: 228130 - DNA, 333 bp, synthetic construct
  misc_feature 1..333: note = Description of Artificial Sequence: Synthetic coding sequence
  source 1..333: mol_type = other DNA
atgagctgtcagcagtcccagcagcaatgtcaaccccctcccaagtgtacgccgaagtgccctccaaaatgtcccactccaaagtgcccacccaagtgtcctccaaagtgcccgcctgtatccagctgctgctctgtgtcgtctggtggttgttgtgggtcttcctccggcggagggtgtagctctggtggcggaggctgttgtctgtctcatcatagacgacacaggtcccaccggcacagactccagtctagtgggtgctgcagtcagccgagcgggggatcatcttgttgtggcggtgactccgggcagcattccggaggatgctgctag

SEQ ID NO: 228131 - DNA, 333 bp, synthetic construct
  misc_feature 1..333: note = Description of Artificial Sequence: Synthetic coding sequence
  source 1..333: mol_type = other DNA
atgtcctgtcaacagtcacagcagcagtgtcagccgcctccaaagtgcacacccaaatgccctcccaaatgccctacgccaaagtgcccacccaagtgtccgccaaaatgccctcccgtctcatcctgctgcagcgtgagtagtggcggatgctgcggttcatcatctgggggagggtgctcaagcggcggtggcggatgctgtttgtctcaccatcggagacaccgctcgcaccgccaccgcctccaatctagcggatgttgctcccagccgtccggcggtagcagttgttgtggaggtgactccgggcagcacagcggtggctgttgttag

SEQ ID NO: 228132 - DNA, 357 bp, synthetic construct
  misc_feature 1..357: note = Description of Artificial Sequence: Synthetic coding sequence
  source 1..357: mol_type = other DNA
atgtcttgtcagcaaaatcaacagcagtgtcagcccccacccaaatgcattcctaagtgcccccctaagtgtttgaccccacggtgtcctccaaagtgtccgcctaaatgtccgccagtatccagctgttgcagcgtttcttccgggggatgttgcggttcatcctctggcggaagctgtgggagctcatcaggcggttgttgttcctctggaggcggaggttgctgtctgtctcaccatcggcgtcgtagatcccattgccaccggccacagagctctggctgttgcagtcagccttccgggggaagtagttgttgcgggggtggttcaggacagcactctggtggctgctgttag

SEQ ID NO: 228133 - DNA, 333 bp, synthetic construct
  misc_feature 1..333: note = Description of Artificial Sequence: Synthetic coding sequence
  source 1..333: mol_type = other DNA
atgtcttgtcaacaaaatcagcagcaatgccagcctccccctaaatgtatcccaaagtgtccgcctaaatgcctgactccgaggtgcccgcctaaatgtccgcctaagtgtcctccggtctcttcttgctgctccgtctcaagtggcggatgttgcggaagctcctcagggggttgttgttctagtggaggtggcggttgctgcctctcccaccataggagacgacgcagtcattgtcacaggccccaatcttctggctgttgcagtcagccttccgggggatcaagttgctgtgggggaggaagcggtcaacatagcggagggtgctgctag

SEQ ID NO: 228134 - DNA, 357 bp, synthetic construct
  misc_feature 1..357: note = Description of Artificial Sequence: Synthetic coding sequence
  source 1..357: mol_type = other DNA
atgtcctgtcagcaatcacagcaacagtgtcagcctcctcccaaatgtacacccaaatgtcctccgaagtgccccacacccaaatgcccccctaaatgcccaccgaagtgtccaccagtgtctagttgctgtagtgtcagctccggaggatgctgtggtagttcatcaggaggttcttgcgggtccagctcaggaggctgctgctcaagcggcggaggtggatgttgtctcagccaccaccggagaaggcggtcacattgtcaccgtccccaaagctcgggctgctgttctcagccctcaggaggttcatcttgctgcgggggaggctccggtcagcactcaggcggatgttgttag

SEQ ID NO: 228135 - DNA, 345 bp, synthetic construct
  misc_feature 1..345: note = Description of Artificial Sequence: Synthetic coding sequence
  source 1..345: mol_type = other DNA
atgtcctgtcagcagtcacaacagcaatgtcagccaccccctaagtgcacacctaagtgcactcctaaatgcccagcaccaaaatgtcccccaaaatgccctcccgtgtcgtcttgttgcagtgtatcgtccggaggttgctgtggatctagctctggcggaggctgcgggagtaatagtgggggatgttgctcctccggcggagggggatgttgccttagtcaccaccgaagacatagaagccacaggagaaggccacagagctccgactgctgcagtcagccctctggcggatcaagctgttgtggcggtgggtcttcacagcactccggtgggtgctgctag

SEQ ID NO: 228136 - DNA, 357 bp, synthetic construct
  misc_feature 1..357: note = Description of Artificial Sequence: Synthetic coding sequence
  source 1..357: mol_type = other DNA
atgagctgccagcagtcccagcagcagtgtcagccacctcctaaatgcactcctaaatgccctcctaaatgtccaacaccaaaatgccctccgaagtgtccccctaagtgtccgcctgtgagttcttgttgcagcgtcagctctggtggctgctgtggctcctcaagtgggggaagctgtggttcctccagtggtggatgttgttctagtggagggggagggtgttgtctgtctcaccacagacaccaccgttctcaccggcatcgccctcaatcttccgattgctgtagccagccctctggcggatcttcctgttgcgggggtggctcaggtcaacactccggcggatgctgttag

SEQ ID NO: 228137 - DNA, 357 bp, synthetic construct
  misc_feature 1..357: note = Description of Artificial Sequence: Synthetic coding sequence
  source 1..357: mol_type = other DNA
atgtcatgccaacagtcacaacaacaatgccagccccctccaaaatgcactccaaaatgcccacctaaatgtcccacaccaaaatgtcctccgaagtgcccacctaaatgtccacccgtctctagctgttgcagcgtgtccagcggaggatgttgcggctcttcatcagggggatcatgcggcagttccagcggtggctgctgttccagcggtggaggcggatgttgtctctcccatcatcgtcatcatcggtcacacagacaccgtcctcagagctccgactgctgttcccagcccagcggaggatcctcctgttgtggtggcggttccggtcagcactcagggggatgttgctag

SEQ ID NO: 228138 - DNA, 357 bp, synthetic construct
  misc_feature 1..357: note = Description of Artificial Sequence: Synthetic coding sequence
  source 1..357: mol_type = other DNA
atgtcctgtcagcagagccagcaacagtgtcagccccctccaaaatgtaccccaaagtgcccaccaaagtgtccaacaccgaaatgtcctcctaagtgccctcctaagtgccccccagtgagtagttgctgttcagtgtcatctggaggatgctgcggctcgtctagtggcggatgctgtagttcggggggtggagggtgctgtagttcaggaggcggtgggtgttgcctttcgcatcatcgtaggcgccgatcacataggcacaggccacagagctccgattgttgctcccaaccctccgccggatcttcctgctgtggcggaggatctggccagcacagtggcggatgttgttag

SEQ ID NO: 228139 - DNA, 321 bp, synthetic construct
  misc_feature 1..321: note = Description of Artificial Sequence: Synthetic coding sequence
  source 1..321: mol_type = other DNA
atgtcctgccagcagaatcagcagcaatgtcagccccctcccaagtgtccgcctaagtgcccacccaagtgcccaccaaagtgtcgaccacaatgccccgctccatgtccccctcctgtctcctcctgctgcggccctagttcagggggatgttgtggctctagcagcggcggatgttgtagttcggggggtgggggatgctgtctctcacaccatagacctcgtctgttccaccggcaccgtcaccagtcaccagactgctgcgaatgtgagcccagcggcggtagtggatgctgccatagtagtggtgactgttgctag

SEQ ID NO: 228140 - DNA, 333 bp, synthetic construct
  misc_feature 1..333: note = Description of Artificial Sequence: Synthetic coding sequence
  source 1..333: mol_type = other DNA
atgagctgtcagcaaaaccagcagcagtgtcagccccctcctaaatgtccccctaagtgcactccgaagtgtcctcctaagtgtcctcccaaatgccttccacagtgcccagccccatgctcccctgccgtgtcttcatgttgcgggccaatttccggcggatgctgcgggcctagctctggcggatgttgcaattcgggcgcaggcggttgttgtctgagtcaccaccggccaagactgttccacaggaggagacatcagagcccggactgttgcgaatcagagccttctgggggttctgggtgttgccatagttctggtggctgttgctag

SEQ ID NO: 228141 - DNA, 333 bp, synthetic construct
  misc_feature 1..333: note = Description of Artificial Sequence: Synthetic coding sequence
  source 1..333: mol_type = other DNA
atgtcctgtcagcagaaccaacaacagtgccagccgcctccaaagtgtcctccgaagtgtacaccgaagtgcccgccaaaatgcccgccaaaatgtctcccgcagtgccctgcaccctgttcgcctgccgtatcaagttgttgtggccctatcagcggcggttgctgcggcccaagtagcgggggatgttgtaattctggggctgggggatgttgtctgagccatcataggcctcgccttttccaccggagaagacatcagtcccctgattgttgcgagtctgaaccatccggagggtctggctgctgccatagctccggcggatgttgttag

SEQ ID NO: 228142 - DNA, 333 bp, synthetic construct
  misc_feature 1..333: note = Description of Artificial Sequence: Synthetic coding sequence
  source 1..333: mol_type = other DNA
atgtcctgtcagcagaaccagcagcagtgccagccgcctcccaaatgcccccctaagtgtactccaaagtgccccccaaagtgtcctccaaaatgtcctccacagtgccctgcaccatgtttccctgccgtatcttcatgctgcggcccatcatccggctcctgctgcggaccctcctcaggtggatgctgctcttcgggcgctggaggttgcagtctgtcacatcatcgcccacgtctctttcaccgcaggaggcatcagtctcctgactgttgtgagagcgagccatctggcggttcgggctgttgtcactcatcgggcggttgctgttag

SEQ ID NO: 228143 - DNA, 333 bp, synthetic construct
  misc_feature 1..333: note = Description of Artificial Sequence: Synthetic coding sequence
  source 1..333: mol_type = other DNA
atgtcatgccagcagaatcaacagcagtgccagccccctcccaaatgtcctcccaagtgtacccctaaatgccctcccaagtgtccgcctaaatgtcctccccagtgccctgctccctgtagccctgcagtgtccagctgctgtgggccatcctccgggtcctgttgcggcccaagcagtgggggatgttgttccagcgggggaggcggttgttgcctgtctcaccacagacctagactgttccaccgaaggcgccaccagagtcccgactgctgcgaatctgaaccaagcggcgcttcaggctgttgtcactcttcaggtgggtgttgttag

SEQ ID NO: 228144 - DNA, 270 bp, synthetic construct
  misc_feature 1..270: note = Description of Artificial Sequence: Synthetic coding sequence
  source 1..270: mol_type = other DNA
atgagctgccagcagaatcaacagcagtgtcagccccctcccaaatgtcccgctaagtctcctgcccagtgtctgcccccagcgtcaagctcatgcgcaccaagctcaggaggttgcgggccaagcagcgaacggagctgctgcctgagccaccaccgctgtcggcgatctcatcggtgtcgctgccagtccagcaattcttgcgacagggggagtgggcagcagggaggttccagtagctgcggccactcttcagccggttgttgctag

SEQ ID NO: 228145 - DNA, 288 bp, synthetic construct
  misc_feature 1..288: note = Description of Artificial Sequence: Synthetic coding sequence
  source 1..288: mol_type = other DNA
atgagctgtcagcagaatcagcaacaatgccagccgctaccaaaatgcccaagccctaagtgcccaccgaagtcatctgcccagtgcctgcctccagctagctcatgttgcgcccctaggccaggctgctgtgggggacccagctccgaagggggatgttgcctctcccaccaccgctgttgcaggagccacagatgccgacgccagtcatccaactcatgtgacagagggagcgggcaacaggacggagccagcgattgtggttatggcagcggtggttgctgctag

SEQ ID NO: 228146 - DNA, 285 bp, synthetic construct
  misc_feature 1..285: note = Description of Artificial Sequence: Synthetic coding sequence
  source 1..285: mol_type = other DNA
atgagctgccagcagaatcagcagcagtgccaacctcccccttcttgccctagccctaagtgccctcccaagagccccgcacaatgtctgccacccccttccagcgactgcgctttatcctcgggcggatgcggcccaagctccgagtccggttgctgtctgagccatcaccggcattttcggagccaccaatgcagaaggcagcgaagcaattcttgcgaccggggaagtggtcagcagggcggaggttcatgtagggggcatggatcaggcggatgctgttag

SEQ ID NO: 228147 - DNA, 279 bp, synthetic construct
  misc_feature 1..279: note = Description of Artificial Sequence: Synthetic coding sequence
  source 1..279: mol_type = other DNA
atgagctgtcagcagaatcagcagcagtgccagcccccacccaaatgtccaagtccaaaatgtccacctaaatccccggtccagtgcctccctcccgcaagcagtggctgcgcgcctagttctgggggatgcgggccatcgtctgaaggaggctgcttcctgaaccaccataggcgtcatcaccgatgccgcaggcagcgacctaactcctgtgaccgcggtagcggacagcaagggggaggtagtggatgtggccacggctcaggcggttgttgttag

SEQ ID NO: 228148 - DNA, 279 bp, synthetic construct
  misc_feature 1..279: note = Description of Artificial Sequence: Synthetic coding sequence
  source 1..279: mol_type = other DNA
atgtcttgccagcagaaccaaaagcaatgccagccgcctccaaagtgcccgagtcctaagtgcccaccaaaaaatccggtccaatgccttcctcctgccagctcgggctgcgcaccaagttctggcggatgtgggccaagttccgaaggtggctgcttcttgaaccatcatcgaagacatcaccgttgccgccgacagaggtccaatagttgcgacagagggtcaggccagcagggcggaggctctggctgttgccacggtagtgggggttgctgctag

SEQ ID NO: 228149 - DNA, 300 bp, synthetic construct
  misc_feature 1..300: note = Description of Artificial Sequence: Synthetic coding sequence
  source 1..300: mol_type = other DNA
atgtcctgccagcaaaatcagcaacagtgccaaccacctcctaagtgcccgatcccaaagtaccctcccaagtgcccttccaaatgcgcttcaagttgtcctccaccaatatcgtcttgttgcggcagttcatctggcggatgcggatgctgttcatctgaggggggaggctgctgcttgtcacaccatcggcaccataggagtcactgtcacagacccaaaagctctaactgctatggtagcgggagcgggcagcaaagtggcggatccggatgttgttccggaggcggatgctgttag

SEQ ID NO: 228150 - DNA, 300 bp, synthetic construct
  misc_feature 1..300: note = Description of Artificial Sequence: Synthetic coding sequence
  source 1..300: mol_type = other DNA
atgtcctgtcaacaaaaccagcaacagtgccaaccaccccctaagtgccctatccctaaatacccccctaaatgtccttccaagtgcgccagtagctgtcctcctccgatatcgtcatgttgtgggtcctcctctggtgggtgtggatgctgcagcagcgaaggcggagggtgctgcttaagccaccaccgccatcacagatctcactgtcatagacctaagtcaagtaattgttacggatcagggtcgggtcaacagtctggaggcagcggctgttgttcaggcggaggctgctgttag

SEQ ID NO: 228151 - DNA, 357 bp, synthetic construct
  misc_feature 1..357: note = Description of Artificial Sequence: Synthetic coding sequence
  source 1..357: mol_type = other DNA
atgtcctgtcagcagtcccaacagcagtgtcagcccccacctaagtgcacaccaaagtgtccgccaaagtgcacacctaagtgtccacctaaatgcccccctaagtgtcctcctcagtgtagcgctccttgtccgccacccgtctcatcttgctgcggatcctcatcgggaggatgctgctcttctgaaggcggaggatgctgtctgagtcaccatcgcccaaggcaatccctgcggagacgacctcagagcagctcctgctgtgggtccggctcgggtcagcagtccggcggtagtagctgttgccacagcagcggtggcagtggatgttgccatagtagcggtggttgctgttag

SEQ ID NO: 228152 - DNA, 297 bp, synthetic construct
  misc_feature 1..297: note = Description of Artificial Sequence: Synthetic coding sequence
  source 1..297: mol_type = other DNA
atgtccagtgacgataaatctaagagcaatgacccgaagactgagcctaaaaactgcgaccctaagtgtgaacagaagtgtgaaagcaagtgccagcccagctgtctgaaaaagctcctgcagcgatgtttcgaaaagtgtccatgggaaaaatgtcccgcaccgcctaagtgcctgccttgtcctagtcagtcaccctcaagttgtccaccgcagccctgcaccaagccatgtccacctaagtgccccagctcatgtccacatgcctgtccccctccatgccccccaccagaatag

SEQ ID NO: 228153 - DNA, 1860 bp, synthetic construct
  misc_feature 1..1860: note = Description of Artificial Sequence: Synthetic coding sequence
  source 1..1860: mol_type = other DNA
atgtgcagctgccacaaaggatatactcgcaccccagatcataagcattgtagagatatcgacgagtgtcagcaaggaaatctctgtgtgaatgggcaatgcaagaatacagaaggaagctttcgctgcacctgtggccaagggtatcagctgagtgccgcaaaggaccagtgcgaggacatagacgagtgtcagcaccgacatctctgtgcacacggacagtgcaggaatacagaaggtagttttcagtgcgtttgcgaccaaggataccgcgctagcggcctgggggatcactgcgaggacatcaatgaatgcctggaggacaagagtgtctgtcaaagaggtgactgcataaacaccgccggttcttacgactgcacttgtcctgacggattccagctcgatgacaataaaacctgtcaggacattaatgaatgtgagcaccctggactctgtggccctcagggcgagtgcctgaacaccgaaggtagctttcattgtgtgtgccagcaaggcttttccatcagcgcggatggaagaacctgcgaagacgtgaacgagtgtgagctcctaagcggtgtgtgcggtgaggccttttgcgaaaacgtcgaaggatctttcctgtgcgtttgcgcagatgagaatcaggagtattcacccatgacgggacagtgcaggagcaggactagtaccgatttagatgtggacgtggatcagcctaaagaggaaaaaaaggaatgttattataatctgaacgacgctagcctttgtgacaatgtactcgcgccaaacgtgacaaagcaggagtgctgttgcacctccggggtcgggtggggcgataactgtgaaattttcccctgccccgtactgggaaccgccgaattcacagaaatgtgccctaaaggcaaaggattcgtgcccgctggcgagagcagttccgaggctgggggagagaattacaaagacgctgacgagtgcctactttttggacaggaaatctgcaaaaacggcttttgtctgaatacgcgtccaggctatgagtgctattgcaaacaaggcacctactacgatccagtaaagctgcaatgcttcgacatggacgaatgccaggacccgagcagttgtatcgatgggcaatgcgttaacaccgaagggagttacaactgtttctgtacacatcctatggtgttggacgctagcgagaagcgctgtattagacctgccgaaagcaacgaacagatagaagagacagacgtttatcaggacctgtgttgggaacatctgtcagacgagtacgtgtgttctaggcccctagtagggaagcaaacgacgtatactgaatgttgctgcctgtacggagaagcctggggaatgcagtgtgctttgtgtccacttaaagattctgacgactacgcccagctctgcaatatccctgtgacggggagacgccagccctatggtcgagatgccctggtggacttctcagaacagtacactccggaagccgacccctacttcattcaggatcgcttcctgaactcttttgaggaattgcaggcggaagagtgcggtatcttgaacgggtgcgaaaatgggagatgtgtgagagtacaagaggggtacacttgcgattgcttcgacggctaccacctagataccgccaagatgacctgtgtggatgttaacgagtgtgatgagctcaacaaccgcatgtccctatgtaaaaatgctaagtgtattaataccgacggcagctataaatgcctgtgcctgcctggttacgtgccttccgacaagccgaactattgtacacccttgaacacagcgttaaatctggaaaaggactcagacctggaatag

SEQ ID NO: 228154 - DNA, 5168 bp, synthetic construct
  misc_feature 1..5168: note = Description of Artificial Sequence: Synthetic coding sequence
  source 1..5168: mol_type = other DNA
atggccggagcatggctcaggtggggacttcttttgtgggctggcctattggcttctagtgctcacgggagactgagaagaataacttacgtggtgcacccaggcccaggattagccgcaggtgccctaccactcagcggtccgccaaggagccgaacgttcaatgtagccctgaatgccaggtattcccggagctctgctgccgcaggcgcaccttccagagcttccccaggcgtaccctccgaacgcacgcgcaggacgtccaaacctggcggagcagcactgcagggcttaagacctcccccaccgccacctcccgaaccagcccgacccgctgttcccggaggccagctgcatcctaacccaggtggtcaccctgccgctgcgccttttacaaagcaggggagacaagtcgtccgcagcaaagtgccgcaggagacccaaagcggtggcggaagccgcttacaggtacaccagaaacagcagctccagggagtcaacgtctgtggtggcagatgctgtcacggatggagtaaggctcccggttcacagcgctgtacaaagccatcttgcgtgcctccttgtcaaaatggtgggatgtgtctacgacctcagttgtgtgtatgcaagcccggaacaaaaggcaaagcttgtgagactatcgctgcccaggacacttcctcccccgtctttggagggcagagtcctggagcagcaagctcctggggcccacccgagcaggcggctaagcacacctccagcaagaaagctgacactttgcccagagtgagccccgtcgcacagatgaccttaacactgaagccaaagccatcagtgggactcccacagcagatccacagtcaggtcacacccctctccagtcagagcgtggtaatccatcacggacagacccaggagtatgtcctgaaaccaaagtattttcccgcacagaagggcatctccggtgagcagtccactgaaggctcctttccgttgcggtacgtgcaagaccaggtggccgctcctttccagctttctaaccacaccggacgcatcaaagtggtgtttacaccttctatctgtaaggttacgtgcaccaaaggtagctgccaaaactcatgcgagaagggaaacacaaccacactgatttccgaaaacggacatgctgcagacaccttaacagctacaaacttccgcgtcgtgatctgccacctgccttgcatgaatggaggacaatgttcaagccgcgacaaatgtcagtgcccaccgaatttcaccggtaagttgtgtcagattcccgtgcatggagcttcagttcctaaactgtaccagcactctcagcagccaggaaaagcactaggaacacacgtgatccacagtacccatactcttcctctgaccgtgacgtcacaacagggtgttaaggtaaagtttcctcccaacatagtaaacattcacgtgaaacacccccctgaggcctcagtccaaatccatcaggtgtctcggatcgatggaccaaccgggcagaagactaaggaggctcaacccggacaaagtcaagtgtcctatcagggacttcccgtgcagaagacacaaacgattcattcaacctatagccaccaacaggtcatccctcatgtctatccagtcgctgctaaaacccaactaggccgttgcttccaagagactattgggtcccagtgcggtaaggctttaccaggtctgtccaaacaggaggactgctgcggcactgtggggacaagttggggcttcaacaaatgccagaaatgccctaagaaaccttcttatcacggatacaaccagatgatggagtgtctgccaggatataagagggtgaataacacattctgtcaagatattaacgaatgtcagcttcagggcgtgtgccctaacggggaatgccttaacacaatgggatcctatcggtgtacttgcaaaattggattcggtcctgaccccaccttttcctcgtgtgtgcccgacccaccggtgatcagtgaggagaaaggcccttgctatcgtctggtttcctcaggtaggcaatgcatgcatccgttgagcgtacacttgactaagcagttatgctgctgctccgtggggaaagcgtggggaccgcactgtgagaagtgcccgcttcccggtaccgctgcatttaaagaaatctgcccagggggaatgggatatactgtcagtggtgttcaccgaaggcgccctatacaccaccacgtgggcaaaggcccagtgtttgtgaagcccaaaaatactcagccagttgctaagtctacccaccccccaccgctgcccgcaaaggaagagccagtggaagcactcaccttcagtcgagagcatggccctggtgtggccgagcctgaagttgcaaccgctccacccgaaaaagaaatcccaagtttggatcaggagaaaacgaaactcgagcctggccagccgcagttgtcaccgggtatcagcaccatccacttgcacccacaattcccaggcatagtgatcgagaaaacatccccccctgtccccgtcgaggttgcacctgaggccagtacaagctctgcaagccaggttattgctcccacacaggtaactgaaattaacgagtgcactgtgaatcctgacatctgcggtgctgggcattgtatcaatttgcccgtcagatacacatgtatctgctatgaaggatatcgtttctcagaacagcagaggaagtgcgtagacatcgacgagtgcacacaagttcagcacctgtgtagccaggggcgttgtgaaaatacagagggatccttcctgtgcatttgtcccgctggctttatggccagtgaggaggggaccaactgtattgatgtggatgagtgtcttcgtcccgacgtctgcggagagggacattgtgtgaataccgtgggagcattcaggtgcgagtactgcgattcaggctaccggatgacccagagaggcaggtgtgaggatatagacgaatgcctaaacccatccacttgcccagatgagcaatgcgtcaacagtcccggtagctatcaatgtgtgccatgtacagagggctttagaggttggaatggccagtgcctggacgtcgacgagtgcctggagccaaacgtatgcgcaaacggcgactgctcgaatctggagggctcttatatgtgctcatgccacaaaggttataccaggacgcctgaccataagcattgtcgggatatcgacgaatgtcaacaaggcaacctgtgcgtcaatggacagtgcaaaaacacagagggctcttttaggtgtacctgtggacaaggttatcaactttccgcggctaaggatcagtgtgaggacatcgacgagtgccaacaccgtcatctgtgcgcccacgggcagtgccgcaacacagagggctcttttcaatgtgtctgtgaccagggctatcgcgcttctggtcttggggaccactgtgaggacatcaacgagtgtttagaggataagtcagtttgccaaagaggcgattgcataaacaccgccggtagctacgactgcacttgcccagacggattccaacttgacgacaacaagacttgccaggatataaatgagtgtgagcaccccggtctctgcggccctcagggcgaatgcctcaacaccgaaggctcatttcactgtgtgtgccagcagggtttttccatcagcgctgacgggaggacatgtgaggatatagacgagtgcgtcaacaacaccgtgtgtgactcccacgggttctgtgacaatactgctggcagcttcagatgcctgtgttatcaggggtttcaggcgccacaggatggacaaggctgtgtggatgtgaacgagtgcgaactgctatctggcgtgtgcggggaagcattttgcgagaatgtggaaggatctttcttgtgtgtgtgtgctgacgaaaaccaggagtactctccaatgacaggacagtgccgtagcagaacatccaccgatttggatgtggacgtggaccagcctaaagaggaaaagaaagagtgttactataacctgaatgatgccagtctatgtgacaatgttctggctcctaatgtgacgaagcaagaatgctgctgtacaagtggcgtgggttggggcgacaattgcgaaatctttccttgccctgtcctgggaaccgccgagttcactgagatgtgccccaaaggcaaaggatttgttccagcgggagagtcatcatccgaagccggaggagaaaattataaggacgccgatgaatgtctcttattcgggcaggagatctgcaaaaatggcttctgccttaatacgcgccctgggtatgagtgctactgcaagcaaggcacgtactacgatcccgtgaaactgcagtgttttgacatggatgagtgtcaggatcctagctcctgtattgacggtcagtgcgttaacactgaaggaagttacaactgcttttgcacacatcctatggttctggatgcttctgaaaagcggtgcatccgccctgcagaatctaatgaacaaattgaggagacagatgtgtaccaggatctgtgttgggaacacctctccgacgaatatgtatgtagccgaccactggtaggtaagcagacaacttatacggagtgctgttgcctgtacggcgaagcctgggggatgcagtgtgcattatgccccctcaaggacagtgatgattatgctcagctgtgcaacatcccggtaacgggccgacggcaaccgtatggccgagacgcattggtggatttctcagaacaatacacgcctgaagcggacccttactttattcaagataggttcttaaattcatttgaagaactgcaggctgaggagtgcggtattctcaacggctgtgagaacggccgatgcgtacgcgtgcaggagggctatacatgcgactgtttcgatggataccatttagataccgcaaagatgacatgcgtggatgtgaatgagtgtgatgagctgaataatcgtatgtcattgtgcaagaatgcaaaatgtattaataccgatgggtcttataagtgtctgtgcttgcccggatatgttccatcggataagcccaattactgtacccccctgaacactgctctgaacctcgaaaaggacagcgacctggagta

SEQ ID NO: 228155 - DNA, 4191 bp, synthetic construct
  misc_feature 1..4191: note = Description of Artificial Sequence: Synthetic coding sequence
  source 1..4191: mol_type = other DNA
atggacaccaaattgatgtgccttttgtttttcttcagcctgccccctttgctggtaagtaatcacacaggccgaatcaaagtggtgtttacaccctcaatttgtaaagtcacctgtactaagggatcgtgccagaattcttgcgagaaaggaaacaccacaacactgattagcgagaatggacatgccgctgatacgctgaccgcaaccaattttagggtggtgatttgtcacctgccatgcatgaacggcggtcaatgcagttcaagggacaaatgtcagtgcccacccaacttcaccggaaagctctgccagattcccgttcacggggcaagtgtaccgaaactgtaccagcacagccagcagccagggaaggccctagggactcacgtaatccattcaactcacacgctgcccctcaccgtcacctcccagcagggggtgaaagtcaagtttccgcctaatatcgtgaacatacatgtcaaacaccccccagaagcctcggtgcagatccatcaggtatcaagaattgacggacctaccgggcagaaaacaaaggaagcccagccagggcagtcgcaagtgagctatcagggccttcccgttcagaaaactcagaccatacattctacgtatagccatcagcaggtcatcccccatgtgtatccggtggccgctaagacgcaactaggtaggtgcttccaagagaccatcggttcacagtgcggcaaggcactgcccggactgtcgaaacaagaagactgctgtggcacagtgggcacatcttggggcttcaataaatgccagaagtgtcccaagaaaccatcatatcatggctataatcagatgatggaatgtctgcccggatacaaacgagtaaataacaccttttgtcaggatattaacgaatgtcagctgcagggcgtgtgtcccaacggcgaatgcctcaataccatggggtcttatcgatgtacctgcaagattggctttggacctgacccaacttttagctcctgcgttcccgacccccctgtaatctctgaggaaaaaggaccttgctatcgcctagtcagtagtggcagacagtgtatgcatcctctgtctgtccacctgacaaagcagctgtgctgttgtagtgtgggcaaggcttggggaccgcactgcgaaaaatgtcctctacccggtacagcagcctttaaagaaatatgcccagggggtatgggctacaccgtgagcggagttcacagaagacggccaatccatcaccatgtaggcaagggcccagtgttcgtcaaacctaaaaatacacagccagtagctaaatccactcacccaccaccgctgcctgccaaagaggagcccgtggaggccctcacattctcaagagagcatgggccaggcgtggcagagcctgaagttgccacggcccctcccgaaaaagagatacctagtctcgaccaggagaagacgaagttagaacccggacaaccgcagttatcccctggaatcagcacaatccatctgcatcctcagttccctggtatagtgatagaaaagacttcaccgcctgtcccagtggaggtggctcctgaggccagtacatcttcagccagccaggtgatcgctcccacccaagttaccgagatcaatgagtgtactgttaacccagacatttgcggagccggtcattgcatcaaccttccagttagatacacctgcatctgctacgaagggtatcgcttttccgagcagcagagaaagtgtgtcgacattgacgagtgcacacaggtgcagcacctctgcagccagggaagatgcgagaacacagaaggaagcttcttgtgcatttgccccgctggattcatggccagcgaggagggcaccaactgcattgacgttgatgaatgcctgaggcccgatgtgtgcggcgagggacactgtgtaaacacggtgggcgctttcaggtgcgaatactgtgactcaggatataggatgacacagcgtggacgctgcgaagatatcgacgaatgcctcaaccctagcacgtgcccggatgagcagtgcgtgaattccccaggctcgtatcagtgcgtaccttgtactgagggatttagaggatggaatggccagtgtcttgacgtggatgagtgtcttgaaccaaacgtatgcgctaacggtgactgctccaatctggaaggctcctacatgtgcagctgtcacaaaggttatacaaggacaccagatcacaaacactgccgggatatcgatgagtgtcagcaggggaatctgtgcgtgaacggacagtgcaagaacacagagggttcctttcggtgcacatgcgggcaaggctaccagctgagtgctgctaaggaccagtgtgaggatatcgatgagtgccagcatcgacacttatgcgcacatgggcagtgtagaaacaccgagggatcatttcaatgcgtctgcgaccagggttatcgggcatccggccttggcgaccactgcgaggatatcaatgagtgtcttgaagataagtccgtttgccaaagaggcgactgcataaacactgctggctcctacgattgtacctgtcccgacggctttcaacttgacgacaacaaaacctgtcaagacattaatgagtgtgagcaccctggcttgtgtggaccacagggagaatgcctgaataccgagggctctttccattgcgtatgccagcagggattcagtataagtgcagacggccgtacatgcgaggatatagatgaatgtgtcaacaatacagtgtgtgacagccacggcttctgtgataacaccgcgggttccttcaggtgcctgtgttaccagggttttcaagctcctcaagacggccaagggtgtgtggatgttaatgaatgtgaattgctgtctggtgtctgtggtgaggccttttgcgagaatgtggaaggcagcttcctttgcgtgtgtgcggacgagaatcaggagtactcccccatgacagggcagtgtcgcagcaggacgagtacggatctcgatgttgacgtggatcagcctaaggaagagaagaaagaatgttactacaacctgaacgatgctagcctttgcgacaacgtcctcgcaccaaacgtaaccaaacaggagtgctgctgtacgtccggagtgggttggggcgataactgtgagatcttcccctgcccagtccttggcaccgcggaattcaccgaaatgtgcccaaaaggcaagggcttcgtacccgcaggggagtcaagtagtgaagccggaggtgagaactacaaggatgccgacgagtgcctcctattcgggcaggaaatttgcaagaacggcttctgcctcaacacaaggcctggctatgaatgctattgcaaacagggaacatactacgatccggtgaagctacaatgcttcgacatggacgagtgtcaggacccttcctcatgcattgatgggcaatgcgtgaatacagagggaagctacaactgcttttgcacccatcctatggtgttggatgcctcggagaaacgctgcatcagaccagccgagtccaatgaacaaattgaagagaccgacgtgtaccaggatctttgttgggaacatttgtccgatgagtacgtgtgttcacgaccccttgtaggcaagcaaactacgtacaccgagtgttgctgtctgtatggcgaggcctggggaatgcagtgcgctctgtgtccattgaaagatagtgacgattacgcccagctttgcaatattccagtgaccggaagaagacaaccctacgggagagacgccctggttgacttctccgagcagtatacccccgaggcagacccatactttatccaggatcggttcctgaactctttcgaggagttacaagcggaagaatgtgggattttgaatggatgcgaaaacggcaggtgcgtacgagtgcaggaaggctacacatgcgattgtttcgacgggtatcacctggataccgccaagatgacctgcgtggacgtgaatgaatgtgacgagttgaataacagaatgagcttgtgtaagaacgcaaagtgcattaacactgacggatcttataagtgcctctgcctgccaggatacgttcccagcgacaagccaaattactgcacacctctcaacacggctctaaatctcgaaaaagactctgatctggagtag

SEQ ID NO: 228156 - DNA, 5165 bp, synthetic construct
  misc_feature 1..5165: note = Description of Artificial Sequence: Synthetic coding sequence
  source 1..5165: mol_type = other DNA
atggccggagcctggctgagatgggggctcctgctatgggccggtttgttggcctcttccgcccacggtcggttgcgacggatcacatacgtggtccatccaggcccaggcctggccgcaggcgctctgccgcttagtgggcctccacgctcgaggaccttcaatgtggccctgaatgcacgatactccagatcctcggccgctgccggagccccttcccgcgcatcacctggcgtaccaagcgaacgtacccgtagaacttcaaagcctggaggggctgccctccaaggcctgcgacctccacctccacccccaccggagccagccaggccagcagtccctggcggtcaacttcatccaaatcccggaggccacccggctgcggctcccttcacaaaacagggtaggcaggtggtacgatcaaaggtgccccaggagacccaatctggagggggaagtcggctgcaagtgcaccaaaaacagcaattacagggagtgaacgtatgcggcggacgctgttgtcacggttggtcaaaagccccagggtcacagagatgtacgaagccaagctgtgtgcctccgtgtcaaaacggcggaatgtgtctcaggccacagctctgtgtttgtaagcccggtacaaagggaaaggcatgcgaaaccatcgctgcgcaagatacctcttcccctgtctttggcggacaatcccctggcgcagctagctcgtggggaccacctgagcaggcagcaaaacatacttccagtaagaaggctgataccctgcctcgcgtgtcgccagttgctcaaatgacacttacactgaaacctaagccatcagtgggtctacctcagcaaatccatagccaagtaacccccctgtcttcccagtctgtcgtcatccaccatggtcagacacaggaatacgtgctgaaaccgaagtacttccccgctcagaaaggcatcagcggtgaacagtccaccgaaggatctttccccctaaggtatgttcaggatcaggtcgctgcacccttccagttgagcaatcatactggtcgaatcaaggtagtcttcacgccctcaatctgtaaagtcacatgcacaaagggctcctgtcagaattcttgcgaaaaaggcaataccactacactgatctcggagaatggccacgccgctgacactctgaccgccacaaatttccgcgtggtcatttgccacctgccctgtatgaatggtgggcagtgctcatcacgcgacaaatgtcagtgtccacccaactttaccgggaagctctgccaaatccctgtccatggggcttcggtaccgaagctgtaccaacactctcaacagccagggaaagcactcggtacacacgtgatccattccacacataccctgccccttacagttacgtcacagcagggcgtgaaagtgaaatttcctcccaatatcgtgaatatccatgtgaagcatccacctgaggccagcgtacagatccatcaggtctcccgcatcgacggcccaaccggccaaaaaaccaaggaggcccagcctggccagtcccaggtatcgtatcaaggtctgcctgtgcagaaaacacagaccatacattcaacctacagtcaccagcaggtgatacctcacgtgtaccccgtcgccgctaagactcagctcggtcgctgctttcaggagactatcggcagtcagtgcggaaaagcccttccaggcttgagcaaacaggaggattgttgcgggacagttggtacctcctgggggttcaataaatgccagaagtgcccgaaaaagccgagctaccacggatacaaccagatgatggaatgcctcccagggtataaaagagtgaataataccttctgtcaggatatcaatgagtgccagcttcagggagtgtgcccaaacggtgagtgtctgaatactatgggtagctaccgctgtacctgtaagatcggtttcggccctgatcctacattttcaagctgtgtgcctgatcctcccgttattagcgaggagaaagggccttgttacagactggtgtcttcaggaaggcagtgcatgcacccactttcagtccacctcaccaaacagttatgctgttgcagtgtcgggaaagcctggggtccccattgcgagaaatgcccattgcctgggaccgctgcgtttaaagagatttgtccaggcggtatgggctataccgtcagtggtgtccataggcgtagaccaatacaccatcatgtgggcaagggcccagtttttgtgaaacctaaaaatacgcagcccgtggcgaagtctacccatcctccacctctgccagcaaaagaagagcctgttgaagccctgacgttctcgcgggagcacggcccaggggtggcagaaccagaggtcgcgactgctccccctgagaaggaaataccatccctcgatcaggagaaaacaaagctggaaccgggacagccccagcttagcccgggtatatccacaatccatttacatcctcaatttcctgttgtgattgaaaaaacctcaccacccgtgcctgtcgaagtggccccagaagcttccacgagttcagcatcacaggtgatcgcccctacgcaggtcacagaaattaacgagtgcactgtgaacccagatatttgcggggctggacactgtatcaacctccctgtaagatacacttgcatctgttatgaaggataccgcttctcagagcaacagcggaagtgtgtggatattgatgagtgcacacaagttcagcatctatgctcccagggcagatgcgagaatacggaaggtagctttctttgcatttgccccgcaggattcatggccagcgaagaaggcacaaactgcattgacgtggacgagtgtctacggcctgatgtctgcggagaaggacactgcgtaaacactgtgggcgcttttagatgtgagtactgtgattctggctacaggatgactcagcgcggtaggtgtgaggacatcgatgagtgcctgaaccccagcacatgtcctgacgagcagtgcgtgaactcaccaggctcctaccagtgcgtcccctgtaccgagggtttcagaggctggaatggacagtgcttagacgtggacgaatgcctggaacccaacgtctgtgctaatggcgattgtagcaatttggaaggaagctatatgtgtagctgccacaagggatacactcgcacgcccgaccacaagcactgcagagatattgacgagtgccagcaaggcaacctgtgtgtgaacggccagtgtaaaaatactgaaggctcttttagatgtacgtgtggtcagggataccagctgagtgccgcaaaagatcaatgcgaggacattgatgaatgtcagcatagacacctgtgtgcccacggccaatgtcggaataccgagggatcctttcagtgcgtatgtgatcagggctatcgggcttccggtctgggagaccattgcgaagacatcaacgagtgtctcgaagataagtccgtgtgccaacgaggtgactgcataaatacagcgggatcctatgattgcacctgccctgatgggttccagctggacgacaacaagacgtgtcaggatatcaacgagtgtgagcaccccggactgtgtggaccccagggggaatgcctcaacacggaaggatctttccactgtgtgtgccagcaggggttttcaatctccgccgacggtcgcacatgcgaagacatcgatgaatgtgttaataatactgtgtgtgactcccacggattctgcgataacaccgctgggtcttttcgatgtctctgctatcagggttttcaggcccctcaagatggtcaggggtgtgtggatgtgaatgaatgtgagttattgtccggcgtgtgcggggaggctttctgtgagaacgtagagggcagctttctgtgcgtgtgtgccgacgaaaaccaggaatatagccccatgactggccagtgtcgaagtcgaactagcacggacctggacgttgacgtcgatcaacctaaagaggagaagaaggagtgttattataacctgaacgatgccagcctctgtgataatgttttagcccctaacgtaaccaaacaggaatgctgctgtactagcggcgtgggatggggagacaactgtgaaatttttccttgccctgtactgggcactgccgagttcacagagatgtgtcccaaggggaaaggattcgtccccgcaggggaaagctctagcgaggcgggaggcgaaaactacaaggacgccgatgagtgcttactgtttggccaggagatctgcaaaaatggtttttgtctgaataccaggccgggttacgaatgttattgtaagcagggaacctattacgaccccgtgaaacttcagtgctttgacatggatgagtgccaggacccttcctcctgcatcgacgggcaatgtgtgaacaccgagggctcctataattgcttctgcacccatcccatggttttggatgcgtcggaaaagcgatgcatacggcctgcagaaagtaacgagcagatcgaagaaacagatgtctaccaggatctgtgttgggaacacctttccgatgaatacgtgtgcagccgtccactggtgggtaagcaaaccacttacaccgaatgttgctgcctctacggtgaggcttggggaatgcagtgcgccctgtgtcctcttaaggactcagacgattatgctcagctatgtaacatacccgtaactggccgacgacagccgtatggcagagatgccctcgtggacttctccgagcagtacacccctgaagctgatccctacttcatacaagaccggttcctcaacagctttgaggagctccaagcagaggagtgcgggattctgaatggatgcgagaacggcaggtgcgtccgcgttcaggaaggatacacatgcgactgtttcgatgggtatcacttggatacagccaagatgacatgcgtcgacgttaacgagtgtgacgagctgaataacagaatgtctttgtgcaagaatgcaaagtgcattaataccgacggcagttacaagtgcctgtgtctgcctggctacgtacccagcgataagccgaactactgtacaccacttaatactgctctgaatttagaaaaagatagcgatctcgagta

SEQ ID NO: 228157 - DNA, 4188 bp, synthetic construct
  misc_feature 1..4188: note = Description of Artificial Sequence: Synthetic coding sequence
  source 1..4188: mol_type = other DNA
atggatacaaaactgatgtgcctgctctttttctttagcctgccccctctgctggtgtccaatcataccgggaggatcaaagtggtttttacacctagcatttgtaaggtgacgtgcactaaggggagttgccaaaacagttgtgaaaaggggaataccaccacactcatctcagaaaacggccacgctgctgatacgctaaccgccacaaacttcagagttgtcatctgccacttaccttgcatgaacgggggacaatgcagcagccgggacaaatgccaatgcccgcctaatttcacaggtaaactctgtcaaatcccagtccatggggcatctgtgcccaaactgtaccagcattcgcagcagccgggaaaggctctaggcacacatgtaattcactccacccacacattgccccttaccgtgaccagccagcaaggggttaaggttaagtttccccctaatatcgtgaacattcacgtgaaacatccacctgaggcctctgttcagatccaccaggtgtcacgcattgacggtccgaccggacagaaaactaaggaggcccagccaggccagtcacaggtctcttatcagggcttgcccgttcagaagacacagacaatacactcgacttactcgcaccagcaggttatacctcatgtctatcccgtggctgctaagacacagctgggccgttgtttccaagagacgatcggctcccaatgcgggaaagccctgcctggcctatcaaagcaggaagactgttgcgggaccgtgggcacctcctggggcttcaacaagtgtcagaagtgtcccaagaaaccttcataccacggatacaaccaaatgatggaatgcctgccgggatacaaaagggtgaataacaccttttgtcaggatatcaacgaatgtcagctgcaaggagtatgccccaacggtgaatgtctcaacaccatgggcagttacagatgcacatgtaagattggattcggcccagatcccactttttcaagttgcgttcccgatccgccagtgatctctgaggaaaagggtccgtgctaccgcctggtgagtagtggacgtcaatgcatgcaccctctgtctgttcacttgactaaacagttgtgttgttgttcagtagggaaggcctggggccctcactgcgagaagtgccccctgccaggtaccgctgcattcaaggagatatgcccaggaggcatgggctatacggtcagcggagtgcacagacgacggcctatccaccatcacgttggcaaggggcctgtgtttgtaaaacctaaaaatacgcaacccgtggcaaagtccacacacccccctcccctgcccgcaaaggaagagccagtcgaagcccttactttctcaagagaacatggtccaggggtggctgagccggaggtagcaacggccccacccgagaaagagattccgtcactggaccaggaaaagactaagttggaaccgggacaacctcagttaagcccgggaatttccacaatccatcttcatccacagttccctgtcgtcatagagaagacctctcccccagtgcccgttgaggttgcacccgaagcttccacatcaagcgcctcacaggtgattgccccaacccaggtcactgaaatcaatgaatgcacagtaaaccctgatatctgtggggctggccattgtattaatttgcccgttcggtacacctgtatttgctatgaaggctaccgtttctctgaacagcagcgtaagtgtgttgatatagacgagtgtactcaggtccagcacctgtgttcccaggggaggtgtgaaaacacggagggttcattcctgtgcatttgtccagcaggatttatggcaagtgaggagggcaccaattgcattgacgtcgacgagtgtctgaggcctgacgtctgtggcgaaggacattgcgtgaacacagtgggcgcttttagatgcgagtattgcgatagcggatatcggatgacccagcgagggcgatgcgaggatatagacgagtgcctgaacccatccacctgccctgatgagcaatgtgtcaacagtcccggatcgtaccagtgcgtgccgtgtacagagggcttccgaggttggaacgggcagtgcctcgatgtggacgagtgcctggaacctaatgtgtgcgctaacggcgattgttccaacctcgaggggtcttacatgtgctcatgtcacaaaggatatacgagaacaccggaccacaaacattgcagagatatagacgaatgtcagcaaggaaatttgtgtgtgaacggccaatgtaagaatacagagggttccttccgttgtacctgcggacagggctaccagttgtccgcggctaaagaccaatgtgaggatatcgacgagtgtcaacaccgccatctttgcgcgcatggccagtgcagaaatactgaaggctcgttccagtgtgtctgcgatcagggctatcgggcttccggcctcggagaccattgtgaagatatcaatgaatgcttggaggacaaatcagtgtgccaacgcggagattgcataaacaccgccggtagctacgactgcacatgcccggacggattccagctggacgataacaaaacctgtcaggacattaatgaatgtgaacaccccggactgtgcggtcctcaaggggaatgtctgaatacagaaggaagttttcactgtgtatgccagcagggtttctctattagtgcggatggacggacctgcgaagacatagatgagtgcgtgaataacaccgtatgtgactcccacgggttctgtgataataccgccggaagcttccgttgtctgtgctaccaaggcttccaggctcctcaggatggtcaaggctgcgtcgatgtgaacgagtgcgagctcttgtccggcgtctgcggagaagccttctgtgagaatgttgagggcagtttcctttgtgtgtgcgccgatgaaaatcaggagtattcccctatgaccggccagtgccggtctaggacaagcaccgatctggacgtcgatgtggatcaacctaaggaagagaagaaagagtgttattacaatctcaatgacgcttctctgtgtgataacgtgctcgcccctaatgttaccaaacaggaatgttgttgcacatccggggtgggctggggagataattgtgagatctttccctgtccagtactcggaactgctgaatttacagaaatgtgcccaaagggaaagggcttcgtgccggctggcgagagctcctccgaggccggaggagaaaattacaaggatgctgacgaatgcctcctgtttggacaggaaatatgcaagaatggtttttgtttaaacactcggccagggtacgagtgctattgcaagcagggcacctactatgaccctgtgaagctgcagtgctttgatatggatgagtgccaggatccatccagttgcatcgatggccagtgtgtcaacacggagggtagttataactgtttttgcacccacccaatggttttggacgccagtgagaagcgctgtatccgacccgctgagagtaacgagcaaatagaggagactgatgtctatcaagacttatgttgggaacacctgagcgatgagtatgtatgttcgcgcccactggtcggcaaacagacaacttacacagagtgttgttgtctgtatggcgaagcctggggtatgcagtgtgctctgtgcccccttaaagacagcgatgactacgctcaattgtgcaacatacccgttaccggtaggcggcagccctatgggagggatgctcttgttgacttctcagagcaatacacacccgaagcggacccatactttatacaagacagatttctgaacagttttgaggagctccaggccgaagaatgcggaattttgaacggctgtgagaacggaaggtgcgtgcgggtgcaagaggggtacacttgtgactgttttgatggttatcacctggacacagcaaaaatgacctgcgtcgatgtaaacgagtgtgatgaactcaataatagaatgtccctatgcaagaacgcaaaatgcatcaacaccgacggaagctataagtgtctctgcttacctggatacgtcccctcagacaagcctaattactgcacacctttgaatacagccctgaacctagagaaggacagcgacttagagtag

SEQ ID NO: 228158 - DNA, 4062 bp, synthetic construct
  misc_feature 1..4062: note = Description of Artificial Sequence: Synthetic coding sequence
  source 1..4062: mol_type = other DNA
atggatacgaagctgatgtgtctactgttcttcttcagtttaccacccttgctggtctcgaaccacaccggcaggattaaagtggtgttcacccccagtatttgcaaagtcacatgtaccaagggatcttgtcagaactcttgcgagaaggggaatactacaactttgattagcgaaaatggacatgctgcagataccctaacagccactaactttagggtagttatttgccacctgccttgcatgaatgggggtcagtgttcctcacgtgacaagtgtcagtgtccacctaatttcaccgggaagttgtgtcaaattcccgtgcatggcgcttcagtgcccaagctctatcagcactcgcaacaacccggaaaagctctggggactcacgtcatccactccacccatacactgccgttgactgtgacgtcacaacaaggggtgaaggttaagtttccccctaacattgtgaacatccacgtcaagcatccaccagaagcaagcgtgcagatccatcaggtgtcacggatcgacgggccaacgggccagaaaaccaaggaggcacagcccggacagtcacaggtcagctatcaggggcttcctgtgcagaagacccagactatacattctacctattctcaccagcaggtgataccccatgtatatcccgttgcagctaaaacccagctgggcaggtgctttcaggaaaccattgggtctcagtgtggcaaggcactcccagggctcagcaaacaggaagactgctgcggaacagtgggaactagttgggggttcaacaaatgccagaaatgccctaaaaaaccatcataccacggttataaccagatgatggaatgtttgcctgggtataaacgcgttaacaacacattctgtcaggacatcaatgagtgtcagctgcagggtgtgtgcccaaatggggaatgcctgaacacgatgggcagctatcggtgtacttgtaagatcggattcggccctgatccgacattttcctcctgcgtccctgacccccctgttatatctgaagagaaagggccttgttaccggctggtgtcctccgggaggcagtgtatgcacccccttagtgtgcatctgactaagcagctgtgctgttgctccgttggtaaagcatggggaccccactgcgagaagtgtccactgcctggcaccgccgcattcaaggagatttgtcccggaggcatgggatacacggtcagcggcgtgcatcggagaaggcctatacaccatcatgtaggcaaggggcctgttttcgtgaagcccaaaaatactcaaccggtggccaaatctacccacccccctcccctgcccgcaaaggaggagcctgttgaggccctgactttctctcgcgaacacggtcccggagtggccgagcccgaagtagccactgctcctcccgaaaaagagatcccatctctggaccaagagaaaactaaattagaaccaggccagcctcaactcagtcctggaatctccacgatacatctgcacccgcagtttccagtggtgatcgagaagacctcccctcccgtaccagtggaggtggctccagaagccagcactagctccgcatctcaagtcatcgccccaactcaggtcaccgagattaatgaatgcacagtgaaccccgacatatgtggggctggacactgtataaacctgcctgttcgatatacctgtatttgttacgaaggttaccgcttctccgagcagcagcgcaaatgtgttgacatcgacgaatgcactcaggtacagcacctgtgtagccagggtagatgtgaaaacaccgaaggtagcttcctgtgtatttgtccagctggcttcatggcctcagaagagggaactaactgcatcgatgtggacgaatgtctcagaccagatgtttgcggggaaggccactgcgtgaatactgtcggggcatttcggtgcgagtactgtgacagcggataccggatgacccaacgcggacggtgcgaggacattgacgagtgcttgaacccttctacctgtccagatgaacagtgtgtcaactcaccgggatcctaccagtgcgtgccatgcacagagggtttccggggttggaatggacagtgtcttgatgtcgatgagtgcctggaacccaacgtctgcgctaatggcgattgctccaatcttgaaggaagttacatgtgttcttgtcataagggatacacccggacccccgaccataagcattgtagagatattgacgagtgccagcaaggtaacctgtgtgtgaacggacaatgtaaaaacaccgaaggctccttcagatgcacctgtggccaaggttatcaactctctgcagctaaggaccagtgcgaagatatcgacgaatgtcagcatcggcatctctgtgcccatggccagtgtagaaatacagaggggagcttccagtgcgtgtgcgaccaggggtaccgagcatcaggactaggcgaccactgcgaggacataaacgagtgtctagaagataagtctgtttgtcagaggggggattgtatcaatactgctgggagctacgactgtacatgccctgacgggttccagctcgatgacaataaaacatgtcaggatattaacgaatgtgagcacccaggcctgtgcgggccacagggcgaatgtctgaatacagaggggtcatttcactgtgtgtgccagcaaggcttctccataagtgcagatggaagaacttgcgaagatgtgaacgaatgcgagctgctgagcggcgtgtgcggtgaagcattctgcgagaacgttgagggtagttttttgtgtgtctgcgccgacgagaaccaagaatattcccctatgaccgggcagtgccgaagccggacctccaccgacctggacgtagatgtggaccagccgaaggaggaaaaaaaagaatgttactacaacctgaatgatgctagtctgtgcgacaacgtcctggccccaaacgtaacaaaacaggagtgctgttgtacatccggagttgggtggggagataattgtgaaatttttccttgccctgtcctgggaactgcagagttcacagagatgtgcccaaaggggaagggctttgtgcccgctggagagtcaagttcagaggcgggtggcgaaaactacaaggacgcggacgaatgccttctgttcggtcaggagatctgtaagaacggcttctgtctgaacacccggccaggatacgaatgctactgcaagcaagggacctattacgatcctgttaagctgcagtgtttcgacatggacgaatgtcaggaccctagctcttgcatcgacgggcagtgtgtcaatacggagggcagttacaactgtttttgcacgcatccaatggtcttggacgcttccgaaaaacggtgcattcggcctgctgagagcaacgagcagattgaggagaccgatgtgtaccaggatttgtgttgggagcacctgtcggatgaatacgtttgttcccgccctctggtgggcaaacagacaacttataccgagtgctgctgcctgtacggcgaagcttggggtatgcagtgtgcactgtgccctctcaaggatagtgacgattatgctcagctgtgcaatattccagttaccggtcgacgacagccctacggtcgcgatgcgctggtagacttctcagagcagtacacacccgaggctgacccctattttattcaggaccgctttcttaatagctttgaagaactgcaggcagaggaatgcggcatcctgaatggctgcgaaaatgggaggtgcgtgcgagtgcaagaaggctatacctgtgactgctttgatggctatcatttggacactgccaaaatgacctgcgtagacgtgaacgagtgcgacgagctaaacaaccgcatgagcctgtgtaagaacgcaaaatgtattaacacagacgggtcctacaagtgtctgtgtctccctggttatgttccttccgataaacccaactattgtacacctttgaatactgcacttaatctggaaaaggattcagatctggagtag

SEQ ID NO: 228159 - DNA, 4029 bp, synthetic construct
  misc_feature 1..4029: note = Description of Artificial Sequence: Synthetic coding sequence
  source 1..4029: mol_type = other DNA
atggataccaagcttatgtgtctgctgttttttttcagtttacctcctttgctggtgagcaaccatactggacgaatcaaagtggtgtttactccttccatttgcaaggtgacatgtacaaaggggagttgccagaactcatgcgagaaggggaatacgactacactaattagtgagaacggccatgctgccgacacactgactgcaacaaactttagggtagtcatttgtcatctcccctgcatgaacggcggtcagtgctccagcagagacaagtgccagtgcccacctaatttcactggcaagttgtgccaaatcccggtgcacggcgcatctgtgcccaagctctaccagcattcccagcaacccggtaaggccctggggacacatgtcattcacagtactcacacactgcccctaaccgtgacttcacagcagggcgttaaggtgaagttcccgcctaatatcgtaaacatccacgtcaaacatcctcccgaagctagtgttcagattcatcaagtgagtcgcatcgatggccctactggacagaaaactaaggaggcgcagccaggacagtctcaggtatcatatcagggactcccggttcagaaaacccagacaatccattctacctattcccatcaacaggttattccgcatgtgtatcctgtcgcagctaaaacacagcttggtagatgcttccaggaaacaatcggatcccaatgcgggaaagctcttccaggtttgtccaaacaggaagattgttgtggaactgtgggtactagttggggctttaacaagtgccagaagtgcccaaagaagcccagttaccacggctataaccagatgatggagtgtctgcccggatacaaacgcgtcaacaacactttttgtcaagatatcaatgagtgtcagttgcagggagtctgtcccaacggagaatgcctgaacacaatgggatcgtatagatgtacctgtaaaatcggcttcggaccggatcccaccttctcttcttgcgtcccggaccctcccgtgatctcagaggaaaagggcccatgctaccgactcgtttccagcgggaggcagtgcatgcatcctctgtcagtgcacctgaccaaacaactgtgttgctgttccgttggaaaagcctgggggcctcactgtgaaaagtgtccactgcctggtactgctaaggaggaacctgtggaggccctgacattcagtcgagagcatggacctggcgttgctgagcctgaagtagcaaccgcacctccagaaaaggaaattccctctctcgatcaggaaaaaacaaaactggagccagggcaaccccagctctctcctggcatcagtaccatccacctgcatcctcagttcccagtggtaattgaaaaaacatcacctccagtgcccgttgaggtggcaccggaggcctctacctcttctgcatcacaggtcatcgccccaacacaggtcaccgaaatcaacgagtgtaccgtaaatcccgacatatgtggggcagggcactgcatcaatctaccagtcagatacacctgcatctgctacgaaggctatcgattttctgagcaacagcgaaagtgtgtggatattgatgaatgtactcaggtccagcacctctgttcccagggcagatgtgagaacaccgagggttccttcctatgcatttgccctgctggcttcatggcctcagaggaagggactaattgcatcgacgtggacgagtgcctcagaccagacgtgtgtggtgagggacactgcgttaataccgtcggcgcttttcgatgcgagtactgtgatagcggctacaggatgacacagagaggccgatgtgaagatatcgacgagtgcttaaatccctccacatgtcccgacgagcagtgtgtcaatagtccaggcagctatcagtgcgtaccgtgcacagagggctttcggggatggaacggccaatgtcttgacgttgacgagtgccttgagccaaatgtttgcgccaacggtgattgctccaacctcgagggctcttatatgtgctcatgtcacaagggatacacacggacgcccgaccataaacactgccgcgacatcgatgagtgccaacagggtaatctgtgcgtaaacggccagtgcaaaaacacagaaggctctttccgctgcacatgcggacagggttaccagttaagcgcagccaaggaccagtgtgaagacatcgatgaatgccagcacaggcatctctgcgcgcacggccagtgcagaaacaccgagggttcattccagtgtgtgtgtgaccaggggtatagggcaagcgggttaggcgatcattgcgaggacattaatgaatgcctagaagacaaatccgtgtgtcagaggggggattgtataaatactgcagggagctatgactgcacttgtcctgacggcttccaactggatgataataaaacttgccaggacatcaacgaatgcgaacacccaggcctgtgcggcccacagggggagtgcctcaacaccgaggggtccttccactgtgtttgccagcagggcttttccatctccgcggacggtaggacctgcgaggatatcgatgagtgtgtcaacaatacagtctgcgacagccacgggttttgcgacaatactgccggtagtttccgctgcttgtgctatcaagggttccaggccccacaggatggccaaggctgtgtcgacgtaaatgagtgcgagctgctgagcggggtatgtggcgaagctttctgcgaaaatgtagaaggatcctttctttgcgtgtgtgcagatgagaaccaggaatactctccaatgactggtcagtgtcggagtagaacatcaacagatctggacgtggacgtagaccagcctaaagaggaaaaaaaggaatgctactataatctcaacgatgcgtcactctgcgacaatgtgctggcccctaatgttaccaagcaggagtgctgttgcacctcaggcgtgggctggggcgataattgtgagattttcccttgcccagtgctgggtaccgccgagttcaccgagatgtgtcccaaggggaagggctttgttcctgctggcgaaagctcctccgaagcaggcggagaaaactacaaagacgccgatgagtgtctactgtttggacaagaaatttgcaaaaacggcttttgcctgaatacccgacccggttacgagtgctattgtaagcaaggaacatactacgaccccgtcaagctgcagtgtttcgacatggatgaatgccaggacccatcttcctgcatcgatggacagtgcgtgaataccgagggatcgtacaactgcttttgcacccaccctatggtgcttgacgctagtgaaaagcggtgtatacggccagcagagagtaacgagcagattgaagaaaccgatgtgtaccaagatctgtgttgggagcatctgagcgacgagtacgtttgttcacggccacttgtgggtaaacagactacttatactgaatgttgttgcctgtatggggaagcctggggtatgcaatgcgcattatgccctctgaaggattccgatgactacgcccaattgtgtaacattccagtgactgggaggcggcagccttatgggagggatgcattagtggatttttccgagcagtacacgccagaggctgacccgtatttcattcaggataggtttctgaatagctttgaagagctgcaggctgaggagtgcggcatcctgaatggatgcgaaaatggccgatgcgttcgggtgcaggaaggatacacctgcgactgcttcgatggatatcatctggacaccgccaagatgacttgcgtggacgtgaatgagtgcgatgaactgaataatagaatgtcactatgtaagaatgcaaagtgtataaatactgacgggtcctataagtgcttgtgtctaccaggctatgtcccctcagataaacctaattactgcacgccactcaacacagccctgaacctcgagaaggacagtgatctggagtag

SEQ ID NO: 228160 - DNA, 5466 bp, synthetic construct
  misc_feature 1..5466: note = Description of Artificial Sequence: Synthetic coding sequence
  source 1..5466: mol_type = other DNA
atgaggcctaggactaaagcccgaagcccaggtagagccttaaggaatccatggcggggattcctccccctgacactcgcgctgtttgtcggcgctggccatgctcaacgagaccccgtgggccgttatgagcccgctggcggagacgcgaacagacttcgcagacctggaggatcttacccagctgcagcggcagctaaggtctattccttatttcgcgaacaggatgcccctgtcgcaggactccagcctgtggagcgcgcacagccaggctgggggtccccaaggcgacccaccgaggccgaggcccgaagaccctcacgggcacaacaatcacgcagggtgcaacccccagctcagacgagacggagcacccctctgggtcaacagcagcccgcacccaggactagagcggctcccgctttacctaggttggggacaccacagagatcaggagctgcacctcctaccccaccgcgaggtcgtcttaccggccgaaacgtgtgtggcggacagtgttgtccaggatggaccactgccaactccaccaaccactgcatcaaacctgtgtgtgaacccccttgtcagaacagaggatcttgtagcaggcctcagttatgcgtgtgtcggagtggcttcagaggagcacgttgcgaagaggttatacccgacgaagagttcgacccccagaactctcgcttagcacccaggagatgggccgagaggtctccaaacctcaggagaagcagcgccgcaggagaggggaccttagcacgagcacagccaccagccccacaatccccacctgcgcctcagagccccccagccggaaccttaagtggcctatcccaaacacatccttctcaacaacacgtcgggctctccaggactgtacgattacaccccaccgccaccgcatcatcccagctgtcatcaaacgccttgcctcccggacccggactggagcagagagatggtactcagcaggccgtgcctctggagcatccctcctcaccttggggcctgaacctgacagagaagatcaagaaaatcaaaattgtgtttactcccacaatttgcaagcagacatgtgcgagagggcactgtgcaaattcgtgtgaacggggagatacaacgaccttatatagtcaggggggacacggccatgacccgaagtctggcttccgtatctacttttgtcagattccctgcctgaacggagggaggtgtatcgggagggatgagtgctggtgtccagccaactccaccggcaagttttgccacctccccatccctcaaccagatagagagccacccggtaggggatcccgccctcgcgcactgctcgaagcccctctgaaacagagcacctttacgctgccactgagcaatcaactggcaagcgtgaacccctcactggtcaaagttcatatacatcatccccctgaagcttccgttcaaattcaccaggtcgcgcaggttcgcggtggggtcgaggaagccctcgtggaaaacagcgtcgagacaaggccccctccatggttacccgcttctcccggacattccctctgggactctaacaacatccctgccagatctggagagccacccaggcccctgcctccggcagcccctagaccgcgaggcttacttggcaggtgctatctgaacaccgtgaacggccaatgtgcgaatcccctgcttgagctcaccactcaggaagattgctgcggctccgtaggagccttttggggggtgactctgtgtgccccttgcccgccaaggcccgcatccccggtgatcgaaaacggacaactggaatgtccacagggctacaagcgactgaatttaacacattgccaagacatcaatgagtgtcttacactcgggctctgtaaagatgcagagtgcgtgaatactcgcggttcttacctgtgtacgtgccggccaggcctgatgctagacccatctcgatcacggtgtgtgtctgacaaagccatctccatgctgcagggattgtgttacaggtccctgggcccaggcacctgtaccctccctctggctcaaagaatcaccaaacagatctgttgttgcagtagggtgggaaaagcctgggggagcgaatgtgagaagtgtcccctcccgggtaccgaggcctttcgggagatctgccccgcagggcacggctatacctacgctagctcagacatcagactgagcatgcgtaaggctgaggaagaagagctcgctcgacctcccagggagcagggacaaagaagctccggagctctgcctggaccagcggagcgccagcccctgcgagtggtcaccgacacctggctggaagccggtaccattccagataagggcgatagccaggccggacaggtaacaacatccgtgacacatgcgcctgcctgggtcactggcaacgccaccacacctccaatgccagagcagggcatcgctgagattcaagaagagcaggtgacaccaagcactgacgtactggtgaccctttctacccccggaatagacaggtgcgccgcaggggctactaacgtgtgcggacctggcacctgcgtaaatctccccgacggctatcgctgtgtgtgttcccctggttatcagctgcatccatcccaggcatactgcactgacgacaatgagtgtctccgggacccatgtaaagggaagggcagatgtatcaacagggtggggtcctacagctgcttttgttacccaggctatactctcgcaaccagcggcgctacgcaggagtgtcaagacatcaatgaatgtgagcagcccggtgtttgctcaggtggtcaatgtacaaataccgagggtagctaccattgcgagtgtgatcaagggtacatcatggtgcggaaggggcactgccaagatattaatgagtgccggcacccaggaacatgccctgacggtagatgcgtcaattcgcccggatcttacacgtgccttgcctgcgaggagggttaccggggacagtccggttcctgcgttgacgtgaacgaatgtctcacccccggtgtgtgtgcacatggcaagtgtacaaacctggaaggcagctttcggtgtagttgcgagcaggggtatgaggtcacctcagacgaaaaaggatgtcaggacgtggatgaatgtgcttctcgcgcatcttgccctacgggcttgtgcttgaacactgagggtagtttcgcctgctctgcctgtgagaacggatattgggtgaatgaggatggaacagcttgtgaagatctcgatgaatgcgccttcccgggagtgtgtcccagcggagtctgtaccaataccgcaggctcctttagctgtaaagactgtgacggaggatacagaccctctcctctcggcgattcatgtgaggatgtcgatgaatgtgaggaccctcagagcagttgcctaggcggagagtgcaagaatactgtcggttcctaccagtgtttgtgcccccagggttttcagctagcaaacggaaccgtgtgtgaggatgtgaacgagtgcatgggcgaagagcactgcgcgcctcacggcgagtgcctgaacagtcacgggagtttcttttgtctgtgtgctcccggatttgtcagtgctgaggggggaacctcctgccaagatgtagacgagtgcgccaccacagatccttgtgtggggggacactgcgtcaacacggaaggcagtttcaattgtctgtgtgaaaccggcttccagccctcccccgaatctggcgaatgcgtcgatattgacgaatgcgaggactacggcgatccagtgtgcggaacttggaaatgcgaaaattctccaggttcataccgatgtgtcttgggctgccaacccggatttcatatggcaccgaacggcgattgcatagacattgacgagtgtgcaaacgacacaatgtgtggatcccatggtttctgtgacaatacagacggctccttccggtgcttgtgtgaccagggattcgagatttctccgtccggctgggattgtgtggatgtgaatgaatgtgaactcatgcttgccgtctgcggggcagcactatgtgaaaacgttgaggggagttttttatgcctgtgcgcctccgacctggaagagtacgacgcacaggaaggacattgccgaccccgaggagctggtggacagagcatgagtgaggctcccacaggagatcacgccccagcccctacaagaatggactgctactcggggcagaaagggcacgcaccctgttcctctgttctggggaggaataccacacaggccgagtgctgctgtactcagggagcttcctggggcgatgcgtgcgacctctgtccttcggaagacagcgccgagttctcagagatctgcccaagcggcaaaggctacattccagtagaaggcgcttggacattcggccagacaatgtacactgacgctgacgagtgtgtgattttcggacccggtctgtgtcccaatggcagatgcctaaacactgtacccggatacgtctgcctctgtaatcctggcttccactatgatgcatcacacaagaaatgtgaggaccacgacgagtgccaggaccttgcttgtgagaacggtgagtgtgtgaacaccgagggatccttccactgcttttgttccccacccctcaccctggatctgtcccagcagcgctgtatgaatagcaccagtagtaccgaagacttgcccgatcatgacatccacatggatatctgttggaagaaagtcacaaacgacgtctgttctgagccccttcgcggacacaggacaacatacactgaatgttgctgccaagacggcgaggcctggtcgcagcaatgtgccctgtgcccccctcgtagttccgaagtgtacgcccagctgtgcaatgtggctcggatcgaagctgagcgcgaagcgggagtgcatttcagaccaggatatgaatacgggccaggtcccgacgatctgcactatagcatttatggacccgatggagcacctttttacaactacttaggacctgaagacaccgtgcccgaacccgcttttcccaacacggccggtcatagtgccgacaggacccccatcttggagagtcctttgcagcccagcgagctgcaaccacattatgtggcatcccaccccgagcccccagctggttttgaaggtctgcaagcagaggagtgtggaatcttgaacgggtgtgagaatggtaggtgtgtgagggtgagggagggctacacctgtgactgcttcgagggattccagctggatgccgcacatatggcatgtgtcgatgtgaacgaatgcgatgacctgaatggccctgccgtcttgtgtgtgcatggctactgcgaaaatacagaaggctcttaccgatgtcattgtagtcctggttatgtcgcagaagccggaccacctcactgtaccgcaaaggaatag

SEQ ID NO: 228161 - DNA, 3912 bp, synthetic construct
  misc_feature 1..3912: note = Description of Artificial Sequence: Synthetic coding sequence
  source 1..3912: mol_type = other DNA
atgccaggacccagaggcgctgctgggggactcgctcccgaaatgcgcggtgctggagcggcagggttgcttgctcttctactcttgttgctgctgctgttgcttggcctgggcggacgtgtggagggcggacccgctggcgagaggggggcaggtggtggaggcgcattggccagggaacgctttaaagttgtctttgcacccgttatatgcaaacggacatgtctcaagggacagtgccgggattcttgtcagcaggggtccaacatgacactcataggtgaaaatgggcatagtaccgacaccttaaccggaagtgggtttcgcgtcgtggtttgccctctgccatgtatgaacggcggtcagtgttcgtccaggaatcaatgtctctgccctccagacttcaccgggaggttctgccaagtgccggcagggggagcaggcggagggacggggggatccggacctggactgtctcgcactggggctctctcaactggtgctttacctcctctggccccagaaggcgacagtgtagcctctaaacacgccatttacgccgtccaagttattgccgatccccctggcccaggcgagggaccacctgcacagcatgctgcctttctagtcccactaggcccaggccagatatccgccgaggtgcaggcacctcctcccgtagtgaatgtccgggtgcatcatccacccgaagcaagcgtgcaggtacaccgcatcgagtctagcaacgctgaatccgccgctcctagtcagcacctactaccgcatcccaagcctagccatcccagaccacccactcagaaaccactggggaggtgctttcaggacacactaccaaagcagccctgcggctccaaccctctacctggactgactaagcaggaggattgctgcggttcgattggtactgcttggggccagtccaaatgtcataagtgccctcaactccagtataccggagtacaaaagccgggtcccgtgagaggagaagtaggggctgattgcccacagggatacaagcgattaaatagtacccattgtcaggacatcaacgaatgtgccatgccgggtgtatgtcggcatggggattgcctgaataacccgggttcgtatagatgcgtctgtcctcccggacattccctgggacccagtagaactcagtgcattgccgataagccagaggaaaaatctctctgctttcgtctcgtgtcacctgagcatcaatgtcaacatccccttactacacgtcttacgcgccaattgtgctgctgcagcgtgggaaaagcatggggtgcacggtgtcagcgatgccctacagatggaacagcagcattcaaggagatctgcccagccggtaagggataccatatacttaccagccaccagaccctgacaattcaaggcgagtccgacttctcgctgtttttgcatccggatgggcctcccaagccccagcaattacctgagagcccctctcaggccccaccaccagaagacaccgaagaggagcgaggcgtgacaaccgacagccccgttagcgaagagaggagcgtgcagcagagtcatcccacggctaccaccacacccgctcggccttatcctgagcttatctctcggcctagccctcctactatgcgatggttcctacctgacctgccgccatccaggtccgcagtagaaatcgcaccaacccaggttaccgagacagatgaatgtaggttgaatcagaatatctgtggccacggcgaatgtgttccaggcccaccggattatagttgtcactgcaatccgggttatcggtctcacccacaacacaggtactgtgtggacgtaaacgaatgcgaagctgaaccttgtgggccaggcagaggtatctgcatgaatacaggaggttcctacaactgccactgtaataggggctacagattgcatgtgggcgctggaggcaggtcctgtgtcgacctgaacgagtgcgccaaaccacacctgtgtggcgacggtggattctgcatcaactttccaggacactacaagtgtaactgctatcccggataccggctgaaagcttctcgccctccagtctgcgaggatattgatgaatgtagagatccaagttcctgtcctgatggtaagtgcgagaacaagcccggatcttttaagtgcattgcctgtcagccaggttatagaagccaaggcggaggtgcttgcagagacgttaatgagtgtgcagaaggctctccctgctcaccgggatggtgcgaaaatctgcctggctcattcaggtgcacatgtgcccagggctacgctcctgctcccgatggcagatcttgccttgatgttgacgagtgcgaggctggcgacgtatgcgacaacgggatttgcagtaatacgcctggttccttccagtgtcaatgcttatccggatatcacctgagtcgagatagatcccattgcgaggacatcgacgaatgcgatttccccgctgcctgtatcggaggggactgtattaacaccaatggttcttataggtgtctgtgtccacagggtcatcgcctggtcggtggtagaaaatgccaggacatcgatgagtgttcacaggacccatcattgtgcctccctcacggagcatgtaagaatctgcagggatcctacgtttgtgtctgcgatgagggcttcactccaactcaggaccagcacggatgcgaggaggtggaacagccccatcacaaaaaggagtgctacctcaacttcgatgacacagtgttctgtgattcagtgctcgccaccaacgtgacccagcaggaatgctgctgctcgttaggggctgggtggggggatcattgtgaaatctacccatgtcctgtttacagctctgccgaatttcacagcctgtgccctgatggcaaaggctacacgcaggataacaacatcgtcaattatggaatcccagctcaccgggacatagatgagtgtatgcttttcggtagcgagatatgcaaggaaggcaagtgtgtgaatactcagcctggctacgaatgctactgtaaacagggtttctactatgacggaaatttacttgaatgcgtagacgtcgacgaatgtctggatgaatcaaactgccgaaatggagtgtgtgagaacacacgtggaggataccggtgtgcatgtaccccacccgctgagtacagcccagctcagcgccagtgtctgagtccagaggagatggatgtggatgagtgccaggacccggctgcttgtagaccgggacgctgcgtgaacctcccgggatcgtatcgatgcgagtgccggcctccctgggtgccgggaccgagtggcagagattgccaattgcctgagagtcccgcagaaagggcgccagaacgcagggacgtttgctggtcacagcgaggggaagatggaatgtgcgccggtcccctcgcagggcctgctctcaccttcgacgactgttgttgccggcaagggagaggatggggagctcaatgccgcccttgtcctcccagaggcgctggcagccattgccctacttcacagtctgagtccaacagcttttgggacaccagcccgttactcctgggcaaacccccacgggacgaggattcatctgaggaagacagtgatgaatgccggtgtgttagcgggagatgcgtgcccaggccaggcggagctgtgtgcgaatgtcccggtggctttcagctggatgcctcacgagccaggtgtgttgacatcgatgaatgcagagagttgaatcagagaggcctgttatgcaaatccgaaaggtgtgtgaatacaagtgggagcttcaggtgtgtttgcaaagcaggattcgccagatctcgccctcacggagcctgcgtgccccagcgccgtcgatag

SEQ ID NO: 228162 - DNA, 792 bp, synthetic construct
  misc_feature 1..792: note = Description of Artificial Sequence: Synthetic coding sequence
  source 1..792: mol_type = other DNA
atgcttttcggatcggagatctgcaaagagggaaaatgtgtaaatactcagcctgggtacgaatgctactgcaaacagggattctattatgatggaaatttacttgagtgcgttgacgtggatgagtgtctggatgagagcaattgcaggaatggggtgtgtgaaaacacaaggggcggatacaggtgcgcctgcaccccacccgctgagtactctcctgcacagcggcagtgcttgagtccggaagaaatggacgtggacgagtgccaggatcctgcagcctgtcgccctgggcgttgtgttaacttgccaggttcttaccgctgcgagtgccgccctccatgggttcctggcccttcaggccgagattgtcagttgccagagtctccagctgaacgcgcaccagagcggagagacgtgtgttggtcccaaagaggcgaagacgggatgtgtgcaggcccactggcaggacccgctctgactttcgatgattgttgttgccgacagggcagaggttggggcgcacagtgccggccatgccccccacggggtgctggcagtcactgcccgacaagtcagagtgaatctaactcgttttgggacacttctccactattgcttgggaaacccccacgagatgaagatagctccgaggaagacagcgatgagtgccggtgcgtatccgcagcagcatgccgaggcagggctgctccctgcgcatccgtccccgctgccagctcatccacaccaccagcccctgcggcttggatctccaccagcgcagagagctag

SEQ ID NO: 228163 - DNA, 3771 bp, synthetic construct
  misc_feature 1..3771: note = Description of Artificial Sequence: Synthetic coding sequence
  source 1..3771: mol_type = other DNA
atgccaggacccaggggcgcagcaggcggtttggcccctgaaatgcggggagctggcgctgctggcctcctggccctgttgttgcttctgctgctgctcctgctcggccttggtgggcgtgtcgagggcggaccagccggtgagcgaggagcaggaggaggcggtgccttggccagggaacgattcaaggtagtcttcgcacccgtgatttgcaagagaacctgcctcaaaggccagtgtagagactcatgtcaacagggctctaacatgactctcatcggggaaaatggccactccacagacactcttaccggttccgggttcagagtggtcgtttgccctctcccctgtatgaatgggggacagtgtagttcccgcaatcagtgcctgtgccccccagatttcactggacgtttctgccaggttccagcaggaggagcaggagggggtacaggcggtagtggtcccggactgtcccggaccggcgcattatccaccggagccctccctcccctggctcctgagggcgacagtgttgcctccaagcacgcaatttacgccgtccaggtgatcgccgacccgcctgggcctggagaggggccacccgcacaacatgcggctttcctagtgccactgggaccaggtcagatttcagcagaggttcaggcccctccacccgtggtgaacgtgagggtccatcacccaccagaagcctctgtccaagttcatcgcattgagtcttcgaatgccgagagtgccgctccctcccagcatttgctgccgcaccccaaaccatctcatcctcgccctccaacgcagaagccacttggcagatgttttcaggacactctgccaaagcagccctgtggcagcaatcccctgccaggcctgactaaacaggaggactgctgcggttctatcgggactgcctgggggcagtctaagtgccacaagtgcccgcagctgcagtacactggtgtgcagaaacccggaccagtgcgtggtgaagtgggcgctgactgcccccaagggtataaacgacttaacagcactcactgtcaggacatcaatgagtgcgctatgcccggagtgtgcagacacggagactgtcttaacaatcccggatcgtacaggtgtgtttgcccccctggacactccttgggacccagccggacccagtgcattgcagacaagccagaggagaagtcgctttgtttcagactggtctctcccgagcaccagtgccaacacccccttaccacacggctcactcgccagctgtgttgctgttctgtgggtaaagcttggggcgctcgatgccagagatgcccgaccgacggtaccgccgcatttaaagagatatgtcccgcaggtaaaggctaccatattttgacatcacatcagacactcacaatccagggtgagtccgatttcagtcttttccttcatcctgatgggcctcccaaaccacagcagctacccgagagcccctcacaggcgccaccccctgaagacacagaagaggaaaggggagtgacaacggacagccctgtgagcgaagagaggtccgtgcagcagtcacaccctaccgcgactaccacccccgcaagaccctatcccgaactgatatcgagacctagccccccaaccatgcgttggttcctgccagatctgccaccaagcagatctgctgtggagatagccccaacgcaggtgaccgaaaccgacgagtgccgacttaaccaaaacatctgcggacatggcgagtgtgtcccaggacctccagactatagttgtcactgcaatcctgggtacagatcacaccctcagcacaggtactgcgtagatgttaacgaatgtgaggccgaaccttgcggcccaggaagagggatctgcatgaacacgggcggatcatacaattgccattgtaacagagggtacaggctgcatgtaggggctgggggtaggtcatgcgttgacctgaatgagtgcgctaaaccccacctctgtggagacggcggattttgcatcaattttcccggtcattataagtgtaattgctatccaggctaccgcctgaaggcgtccagacctcccgtgtgcgaagatatagatgagtgtcgtgatccatcaagctgcccagacggcaagtgcgaaaacaaaccagggagttttaagtgtatcgcctgtcagccagggtacagatcccagggaggcggagcatgcagggatgtcaatgagtgcgcagagggcagtccctgttcccctggttggtgcgagaacctgccaggcagtttcaggtgtacttgtgcccaaggctacgctccagctcccgatggtcgatcctgcttggacgtagatgagtgcgaagcgggtgacgtgtgcgacaatggcatctgttcaaatacaccgggttccttccaatgtcaatgtttatccgggtaccacttaagcagggacaggtcacattgcgaggacatcgacgagtgcgactttccagccgcatgcatcggcggagactgcatcaacaccaatgggtcctaccgctgtctgtgcccacaaggacaccggctggtgggcggacgtaaatgtcaggacattgacgaatgcagccaggatccatctctctgtctccctcatggagcatgcaaaaacctgcaggggagttacgtttgtgtttgtgatgagggatttacccccacacaggatcaacacggctgtgaagaggtagagcagccacaccataaaaaagaatgttatctaaattttgatgacacggtcttctgcgattctgtgctggcaacgaatgtgactcagcaagaatgctgctgttccctgggagccggatggggggaccattgcgaaatctatccatgtcccgtctattcatcagccgagttccattcactgtgccctgatggaaagggctacacacaagataataatattgtaaattacggtattccagcgcatcgggacattgatgaatgtatgctctttgggagtgagatttgcaaagagggaaagtgtgtcaacactcagccaggatacgagtgctattgcaaacagggcttttattacgacggcaatcttttagagtgcgtggacgtggacgagtgccttgatgaatcgaattgtcggaatggagtctgtgagaatacccgagggggataccgttgtgcttgtacccctcccgctgagtattcacctgctcagcgccagtgcctctcacccgaggagatggagcgggcacctgaacggagggatgtgtgctggtctcagcgaggtgaagatggaatgtgcgccggtccacttgctgggcctgccctgacatttgacgactgctgctgtcggcagggtagggggtggggcgctcagtgcagaccctgtccccctcgcggtgcaggcagccactgccctacctcccagtctgaaagcaatagcttttgggataccagtccattgcttctcggaaaacccccaagggacgaggacagttcagaagaggactccgatgaatgccgttgtgtgagcggtcgctgtgtacccagacccggtggtgctgtttgtgagtgtcctggcggttttcagctcgatgcctcccgcgcacgctgcgtggatatagacgagtgcagagaacttaatcagcgcggactactctgcaagagtgaaagatgtgttaacacctccggcagctttcggtgtgtttgcaaagcgggtttcgcacggtcccggccacatggcgcatgcgtgccacagcgaaggagatag

SEQ ID NO: 228164 - DNA, 921 bp, synthetic construct
  misc_feature 1..921: note = Description of Artificial Sequence: Synthetic coding sequence
  source 1..921: mol_type = other DNA
atgctcttcggttcggaaatatgtaaggaggggaaatgcgttaacacccagcctggatatgagtgttactgtaagcagggtttttattatgatggaaaccttctcgagtgtgtcgatgtggacgaatgtctggatgaatccaattgtagaaatggggtgtgtgaaaataccagaggtgggtacaggtgcgcctgcactccacccgctgaatacagccctgcacagagacaatgcctctcacctgaggagatggatgttgacgaatgtcaggatcccgctgcctgtcgcccaggaagatgcgttaacctgcctggctcctatagatgcgagtgcagacccccttgggtaccgggaccttccgggcgagattgccagctgccagaaagccctgctgagagagctcccgagagacgggacgtttgttggtcccagcgaggcgaagatggcatgtgtgctggcccattagccggaccagccctgacattcgatgactgctgctgccggcaaggacgtggctggggcgcacagtgtcgcccttgccccccaagaggagccggaagccattgccccactagtcagtcagagagtaatagcttctgggacacctcgcccctcctgctgggcaagcccccacgcgacgaagactcctccgaggaggatagtgatgagtgtcggtgtgtctctggcagatgcgttcctcgcccaggcggtgccgtctgcgagtgcccaggaggcttccaactggatgcttctcgtgctaggtgcgtcgatattgatgaatgcagggagctcaaccagaggggcctactgtgtaaatccgagcggtgcgttaatacaagcggctctttcaggtgcgtctgtaaagctggcttcgcgcgatcccgtccacacggtgcttgcgttccccagagaaggaggtag

SEQ ID NO: 228165 - DNA, 3414 bp, synthetic construct
  misc_feature 1..3414: note = Description of Artificial Sequence: Synthetic coding sequence
  source 1..3414: mol_type = other DNA
atgacactgattggtgagaacgggcacagcacagacacgctgacagggtctggcttcagggttgtagtgtgcccactcccatgtatgaacggagggcagtgttcatccaggaaccagtgtctgtgccccccagatttcaccggacgcttttgccaggtgcctgctgggggagccggaggaggcactggtggaagtggacctgggctgtcacggacaggagcactgagcacgggggcacttccacccttagcaccagagggagacagcgttgcttctaagcacgctatttatgccgtgcaggtgattgctgacccccctggtccaggcgagggccctccagctcaacatgcggctttcctcgtgcccctgggtccaggccagatatctgccgaagtccaggcaccaccgcctgttgtcaacgtccgggtccatcatcctccagaggcctctgtacaggtgcaccggatcgagtctagcaacgcagagagcgcagcgcctagccagcacctcctgcctcaccccaaaccctcccacccgagaccccctacgcagaagccactcggtcgttgtttccaggatacactgccaaagcagccatgcggaagtaatccactgcctggtctgaccaagcaggaggattgctgtgggtcaattggcacggcctggggtcagtctaaatgccacaagtgcccacagctccagtacactggagttcagaaaccaggaccggtgcggggagaagtcggggcagactgtccacaagggtataagcgcctcaatagcacacactgtcaggatatcaacgagtgcgccatgcccggtgtatgccgccacggcgactgtcttaataatccaggctcctaccgctgtgtgtgcccgccaggacactccctgggtcctagccggactcaatgcatagcggataaacctgaggaaaagagtctttgtttcaggttagtcagcccagaacaccagtgtcagcacccattgacgactagattaacaaggcagctctgctgttgctcagtcggtaaagcctggggagcgagatgtcagcgatgtccaactgatggcaccgctgctttcaaagaaatctgccccgcaggaaaaggttaccacatacttacaagtcatcagacgctaacaattcagggcgagtccgatttcagtttatttctacacccagacggccctccaaagccgcagcaactcccagagagccccagtcaggcccctccaccggaagatactgaagaggaaaggggggttactacggattcccccgtgagcgaggagcggtcagtgcagcagtcccacccgactgctactacgacccctgcaagaccataccccgaattaattagtaggccctctccgccaacaatgaggtggttccttcccgatcttccaccaagtcgaagtgccgttgagatcgcacccacccaggtgactgagaccgatgaatgcaggctgaatcagaacatatgcggacacggagagtgcgtgcctggtcctcctgactactcatgccattgcaaccccggatatcggtctcacccgcagcatagatattgcgttgacgtcaacgagtgtgaggctgaaccttgcggaccgggacggggaatctgcatgaataccggcggttcctacaactgccattgcaacagaggctacaggctccatgtgggggcaggcggacgttcgtgtgtcgatttgaacgagtgcgctaagccccatttgtgcggggatggcggtttttgtatcaattttccgggacactataagtgcaactgctatcccggataccggctgaaggcttctcgcccacctgtctgtgaagacatagatgaatgcagagacccaagttcctgtcccgacggaaaatgtgagaataaaccgggaagcttcaaatgtatcgcctgccagccaggataccgtagtcaaggaggtggggcttgcagggatgtcaacgagtgtgccgaagggtccccctgtagcccagggtggtgcgagaatctgcctggaagcttccgatgtacatgcgctcagggctatgcccctgcaccagatggcaggtcttgcttggacgttgatgaatgcgaagccggagacgtgtgcgacaatggtatctgctccaatacaccaggatcattccagtgtcagtgtctatctgggtaccacctttcacgggatagatctcactgtgaggatatcgatgagtgcgactttccagccgcatgtattggcggagactgtatcaacactaatggcagttacagatgcctctgccctcagggccacaggttggtgggcggtagaaagtgccaggatattgatgaatgttctcaggacccatctctgtgcctgccacatggcgcttgcaagaatctccaagggtcctatgtgtgtgtgtgtgacgagggcttcacgcccactcaggaccaacatggctgtgaggaggtcgagcagccacaccacaagaaggagtgctatctgaactttgacgacaccgtgttctgtgattcggtcttggcgactaacgttactcaacaggaatgctgctgctctctgggggctggctggggagaccactgtgaaatctatccgtgccccgtctatagtagcgccgaattccactccctctgccctgatggcaaaggatacacacaggataataacatcgttaactacgggatccccgctcatcgcgatatcgacgagtgtatgctctttggttcggagatctgcaaagagggcaagtgcgtcaacactcagcctggatacgaatgttattgcaagcaaggattttactacgacggaaaccttctggaatgcgtcgacgtggatgagtgtctggacgaaagcaactgccgcaacggtgtgtgtgaaaacacaaggggaggctatcgctgtgcttgcaccccgcctgctgagtactctccggctcaacgacagtgtttgtctcccgaagaaatggatgtcgatgaatgtcaggatccggcagcttgccgtcctggtcggtgcgtaaatctgccagggtcgtacaggtgcgagtgtcgcccaccatgggtgcctggcccatccggcagggattgtcaactgcctgagtctccagccgagagagcacccgaacgacgcgatgtctgttggagccagagaggtgaggacggaatgtgtgccggacctctggccggaccagcactgacatttgatgactgctgttgtcgccagggccgaggctggggcgcacagtgtagaccttgtccaccgagaggcgcaggatcccactgccccaccagccagagcgagtccaattctttctgggataccagcccactgctattgggtaaacctccacgcgacgaggactcttccgaagaagacagcgacgagtgccgatgtgtatccgggtag

SEQ ID NO: 228166 - DNA, 2202 bp, synthetic construct
  misc_feature 1..2202: note = Description of Artificial Sequence: Synthetic coding sequence
  source 1..2202: mol_type = other DNA
atgcctgctgagacggacgaatgcagactgaatcagaatatatgcggccacggtgagtgcgtaccagggccacccgactatagctgccactgcaatcccggttaccggtcccaccctcagcacaggtattgtgtggacgtgaacgaatgcgaggccgaaccctgtgggccaggtagaggaatttgtatgaataccggagggtcatacaactgtcactgcaaccggggatatcgcctgcatgtcggcgcaggagggaggtcctgcgtggaccttaacgaatgtgctaagccgcacctctgcggggacggcggattctgcatcaatttccccggacactacaaatgcaactgctatcctggatacagacttaaagcctccagacccccagtgtgtgaagatatcgacgaatgtagagatccatcgagctgtcccgatggaaagtgcgaaaacaagcctggcagctttaaatgtattgcctgccaaccaggctacaggagccagggcggaggagcctgtagagacgttaacgagtgtgccgagggctccccgtgctctccaggatggtgcgagaatctacccggttcctttcgctgtacatgtgctcaagggtatgcgcctgcccctgacggccgtagctgtctggatgtagatgagtgcgaagcaggcgacgtgtgtgataacggaatctgcagcaacactcccggatccttccaatgtcagtgcctcagcggatatcacctgagccgcgatcggtcccactgcgaggacattgatgaatgcgacttcccagccgcttgcatcggcggagattgcatcaatactaatggcagttacagatgcctgtgcccacagggtcaccgactcgtgggaggcaggaagtgtcaggacatcgatgaatgcagccaggatccttcgctctgtttgccccatggagcctgcaaaaaccttcaaggctcctatgtctgtgtgtgtgatgaggggtttacaccaacgcaggaccagcatggatgcgaggaagtcgagcagccacaccataagaaggaatgctacctaaactttgatgatacagtgttctgcgacagcgtgctggcaacaaatgtcacacagcaggaatgctgctgttcactgggagcgggatggggggaccactgtgagatctacccgtgtcctgtgtattcttctgctgaatttcacagcctgtgcccagatggaaagggctacacccaggataacaatatagttaactatggtatcccagctcacagagacatcgacgagtgtatgctgttcggatcagagatctgcaaagaaggcaagtgtgttaacacccagcctggctatgagtgctattgcaaacaaggattttactatgacggcaatctgctcgaatgcgtggacgtagacgaatgcttagatgagagtaactgtcggaatggcgtgtgtgaaaatacgcggggtgggtaccgctgcgcttgcaccccgccagccgaatattcgcccgctcagcgccagtgcctgtctcctgaggagatggacgttgacgaatgtcaggatcctgccgcttgccgccctggcagatgtgtgaacctgccgggaagctaccggtgtgagtgccgcccaccttgggtgcccggtccttccggtcgggactgccagctaccagaatcacctgctgagcgtgcccctgaaaggcgggacgtgtgttggagtcagagaggagaagacgggatgtgtgccggtccgctcgccggaccagcccttaccttcgacgactgttgttgccgtcaaggcagagggtggggggcacagtgccgaccttgtcctcccagaggggctgggagccactgccccacctctcagtcagagagcaattccttttgggacacttctccattacttctcgggaagccccctcgggacgaggattcaagcgaggaggattctgacgaatgccgctgtgtttcagggaggtgcgtgcccaggcccggaggggctgtgtgtgaatgcccgggtgggtttcagctggatgcaagccgcgctcgatgcgtcgatattgatgaatgtagagagctgaaccagcgcggactcctgtgtaaaagtgaacggtgcgtgaacacgagcggatcctttagatgcgtatgcaaggctgggttcgcacgttcaaggccccacggcgcatgcgtcccacagcggagacggtag

SEQ ID NO: 228167 - DNA, 2649 bp, synthetic construct
  misc_feature 1..2649: note = Description of Artificial Sequence: Synthetic coding sequence
  source 1..2649: mol_type = other DNA
atgaccctgattggcgagaacggacactctaccgacaccctgacaggatccggattccgggtcgcggataaacccgaggagaaatctctgtgctttagactcgtcagtccggaacatcagtgtcagcaccctctcacgaccagactgacacgccagctatgctgctgctcagttgggaaggcctggggtgcacggtgtcagcgctgtccaacagacggtaccgccgctttcaaggaaatatgtcccgctgggaagggttatcatattctcaccagccaccaaactcttaccattcagggtgaatcagattttagcctcttcttgcatcctgacggccctcccaagcctcaacagctcccagagtccccatcccaggcccctcctccagaagacactgaggaagagcggggtgtgaccactgattcccctgtgagcgaggaacggtctgtgcagcagtcccaccctacggcaaccacgactcccgcacggccttatcctgagctgatctccagaccatctcccccaactatgcggtggttcttaccagacctgccaccctccaggtccgccgtcgaaatcgccccaacacaggtcactgagaccgatgagtgccggctcaatcagaacatttgcggccacggagaatgtgttcctgggcctcccgactacagctgccattgtaacccaggatatcggtctcacccccagcacagatattgtgtggatgtgaatgagtgcgaggcagaaccctgtggccctgggagaggtatctgtatgaatactgggggtagctacaattgtcattgcaatcgaggttaccgcctgcacgtcggcgcaggtggcagatcatgcgttgacctgaacgagtgcgcgaaaccccatctgtgcggagatgggggtttttgcattaactttccgggacattataaatgcaattgctatcctgggtatcgactaaaggcaagccgccctcccgtatgtgaagacatcgacgaatgccgtgatcctagttcatgccccgacggcaagtgtgagaacaagcctggaagcttcaaatgcattgcctgccagccgggttatcgctcccaggggggtggggcttgccgggacgtcaatgagtgtgccgagggctccccttgctctcccggatggtgcgaaaacctcccaggctcatttcgttgtacctgtgcccaaggatatgcccctgccccagacggcagatcctgccttgatgtggacgagtgtgaagctggagacgtatgcgacaacgggatttgcagtaacaccccaggcagcttccaatgccagtgcctttctggctatcatctttccagggatcgctcacattgcgaagatatcgatgagtgcgacttcccggcagcttgcatcgggggtgactgcatcaacaccaacggatcctatcggtgcttgtgccctcaaggccataggttggttggaggcagaaaatgtcaggatattgatgaatgcagccaggacccctctctgtgtctgcctcatggagcttgtaaaaatttgcagggctcttacgtgtgcgtgtgtgacgagggatttacacctacccaggaccagcatggctgtgaagaggtggagcaaccccaccataaaaaagaatgttacctcaatttcgacgacacagtcttctgtgattctgtgctggctacaaatgtcacccagcaggagtgttgctgctctctcggcgctggatggggagaccactgcgagatatacccttgcccagtatactctagtgctgagtttcatagcctgtgccctgacggcaaaggctacacccaggacaataacatagtgaattacggtatcccggctcaccgggacatcgatgaatgcatgcttttcggctccgagatttgcaaggagggtaaatgcgtgaacacgcagcctggctatgaatgctactgcaaacaaggattctactacgatggcaatcttcttgagtgtgtcgacgtggatgagtgtcttgacgagagcaactgtaggaatggcgtctgtgagaacactcgcggtggttaccgctgcgcctgcactccacctgccgagtatagcccagcgcagagacagtgtctctctcctgaggagatggagcgtgcgcctgaaaggcgcgacgtgtgctggtctcagagaggcgaagacggcatgtgtgccggtcccctagcaggaccagcccttacttttgacgactgttgctgcagacaaggcagaggatggggcgcacagtgcagaccctgcccccctcgtggtgcgggttctcattgtcctaccagccaaagtgaaagcaatagtttttgggacactagccctctcctgctgggaaagcctcccagagacgaggatagttccgaagaggatagcgacgaatgccggtgtgtctcaggaagatgtgtgcccaggcccggtggcgctgtgtgcgaatgcccaggaggtttccagctggatgcttccagagctcggtgcgttgatattgatgagtgcagagagttgaaccagagggggcttctttgcaagagcgaaaggtgtgtgaacacttcgggttcgttcagatgtgtatgcaaagctggattcgcgaggagtcgacctcacggagcatgcgtcccccaaagacgaagatag

SEQ ID NO: 228168 - DNA, 4761 bp, synthetic construct
  misc_feature 1..4761: note = Description of Artificial Sequence: Synthetic coding sequence
  source 1..4761: mol_type = other DNA
atgggcgacgtgaaggccctgttgtttgtcgcggcagctcgcgctcgccgattgggaggtgctgcggcttctgagtctctggccgtgtctgaggcattttgcagggttcgctcctgccagccaaaaaagtgcgcgggaccacagaggtgcctgaatcccgtgcccgcagtgccttccccttccccctccgtaaggaagcgtcaggtttccttgaactggcagcccttgacactgcaggaagcccgtgccctactaaagagaaggcggcctcgtgggccagggggaaggggactcttgagacggagaccacctcagagagcgcctgcaggaaaggcaccggtgctgtgcccactgatctgtcataacggtggtgtgtgcgttaaacccgatcgttgtctgtgccccccagacttcgctggaaaattctgccaactgcacagttctggagccaggcctcctgccccagcagtccctggcctcacacggagcgtgtacacaatgccactcgctaaccacagagacgatgagcacggggttgccagtatggtttccgtacacgtagaacaccctcaggaagcatccgtggtggtgcaccaggtcgagcgcgtgagtggaccctgggaagaggccgacgcagaagccgttgctcgcgctgaggccgctgcaagggcagaagccgctgccccttacacagtgttagcacagagtgcgcctcgcgaagatggatacagtgatgcgtccgggtttggttattgttttagggagcttagaggcggagaatgtgcgtccccgctccccggactacggactcaagaggtttgctgcagaggggcaggccttgcctggggggtgcatgattgtcagctctgttcagagcgactgggtaacagtgagcgcgtatcagccccagacgggccttgccccacaggtttcgaaagggttaatggctcctgtgaagatgttgatgaatgtgcgactggaggccgttgccaacatggtgagtgcgcaaatacccgagggggttacacatgtgtctgtccggacgggtttctgctggactcgtctcgatccagttgtatttctcagcatgtgatttctgaggcaaaaggtccttgttttagggttctccgagatggcggatgtagtctccccatactgcgcaatattactaaacagatctgttgctgtagccgcgtaggcaaagcctggggccgaggatgtcagctttgtccgcctttcggttcagaaggtttcagggagatttgtcctgccggtccaggctatcactatagcgcttcggatctgcggtataatacccgtccattgggacaggaaccaccacgagtctcactcagtcagccgcgaacattgcccgcaaccagtcgcccatccgctgggttcctcccgacacacaggctggagcctcggcctgagcctcggcctgatccccgtcccggaccagagctccctctgcctagtatcccagcatggacaggtcccgaaattcccgagtccgggccatcatccggcatgtgccaacgaaaccctcaagtgtgtggcccaggacggtgcattagtagaccctcaggatatacttgcgcctgcgacagtggattccgccttagcccacaggggacccggtgcatcgatgtcgacgagtgcaggagggtaccccctccgtgcgcacctggacgatgtgaaaattctcccggttcttttagatgcgtctgcggaccgggattccgggcaggtcccagggctgcagaatgtctcgacgtagacgagtgccacagggtaccccctccatgtgatttaggtagatgcgagaatacaccgggatccttcctgtgtgtgtgccctgccggttaccaggccgcaccccacggggcttcttgtcaggacgtcgacgagtgcacacaaagccccggtctctgcgggaggggagcctgtaaaaacctccccggatcattccgatgcgtgtgcccagcagggttcaggggatccgcttgcgaggaggacgtagatgagtgtgcccaggagccaccaccatgcggccctggccgatgcgacaatacagccggttccttccactgtgcctgtccagccggatttcgttcccggggaccaggcgcaccctgtcaggacgtggacgagtgtgctaggtctccaccgccttgtacgtacgggagatgcgagaacaccgaaggctctttccaatgtgtctgtcccatgggattccagcccaatacagctggctccgagtgtgaagacgtggacgaatgtgagaaccatctggcatgccccggtcaggagtgcgtcaactctcccggttccttccagtgtaggacctgccccagcggtcatcacttgcatagagggagatgcactgatgtggatgagtgctccagtggggcacccccatgtgggcctcatggccattgtacaaacacagaaggttcatttaggtgctcctgcgcgccaggatacagagccccttcagggcgacccggtccctgcgctgacgtgaatgagtgcctagagggcgacttctgtttcccacatggtgaatgcctcaataccgacggctcctttgcttgcacctgcgctcccggataccgtcctgggccaagaggtgcctcttgcctcgacgtggacgagtgctcagaagaggacctctgccagtccggcatttgcacaaataccgacggatcttttgaatgtatttgcccccctggccaccgtgccggacctgatctggccagctgcttagacgtagatgaatgtcgcgaacggggacctgcgctctgcgggtcccagcgatgcgagaacagcccgggatcttaccgttgcgtcagggactgtgatccaggataccacgcgggaccagaaggcacgtgtgacgatgtggacgagtgtcaggaatatggccctgagatttgcggcgctcagcgctgcgagaatacccctggatcctataggtgcactccagcttgtgatcccggataccagccgactcctggcggaggctgccaggatgtcgacgaatgccggaaccgcagtttctgtggcgctcacgccgtatgccagaacttgcccggatcttttcagtgtttgtgcgaccagtatgagggcgctcgcgacggaagacactgtgtcgacgtgaacgaatgcgaaactctccagggagtatgcggagcagccctgtgcgagaatgtggaaggatcattcttatgcgtgtgcccaaatagccctgaagagtttgacccaatgaccggtcgttgcgtgccacctcgcacatcggctggaactttccccggatctcagccacaggcgcctgccagcccagtgctgccggctagaccaccgcctcctccactgcccagacgtccctccacaccacgacagggcccagtgggatccggcaggcgagaatgctactttgataccgctgctcccgatgcatgcgacaacattctcgctcgcaacgttacctggcaagaatgttgctgcacagtgggtgaggggtggggcagtgggtgcagaattcagcagtgtcccggaaccgagacagccgaataccagagtctgtgtccccacggcagaggctacctggcaccttcaggagacctctccctgaggcgggatgtggacgagtgtcagctgtttcgagaccaggtgtgcaagtcaggtgtttgtgtgaacaccgcccctgggtacagctgctactgtagcaacggctattattaccacacccagagattggagtgcatcgacaatgacgagtgcgctgatgaggagccagcgtgtgaaggaggaaggtgtgttaatacagtgggaagttatcactgtacgtgtgagccacctttagtcctggacggcagccagagacgctgcgtaagcaacgaatcgcagagcctggatgacaatctgggtgtctgctggcaggaagtgggagccgatctggtttgctctcaccccaggcttgacaggcaggccacatacaccgaatgttgctgtctgtatggcgaggcttggggtatggactgcgcactttgtccggcacaggactctgacgactttgaggccttatgtaacgttctgagacccccagcctactctccgccaaggcctggaggttttggtctgccttatgagtacggccctgaccttgggcctccctatcagggactcccatatggtccggaattgtacccacctccagcgcttccatatgacccttatcctcccccacctgggccatttgcgaggcgcgaagctccctatggggctccacggtttgacatgcctgactttgaggatgatggaggaccctatggggaatctgaggcacctgcccctccaggccctggaacacgatggccttacaggagccgcgacacacgacgctctttcccagagcccgaggagccgcctgagggaggaagttacgctgggtctctcgccgaaccctatgaggaactggaggcggaggagtgcgggattttagacggttgtaccaatggtcgctgcgtgcgcgttcccgaaggattcacctgccggtgctttgatgggtatcggctggatatgactcggatggcctgtgtggatattaatgaatgcgacgaggcagaggccgcttctcccttatgtgtaaacgctcggtgtttaaacaccgacggttcttttcggtgcatctgtcggccaggctttgctcctacccaccagccccaccattgcgctccagcaagaccacgtgcgtag

SEQ ID NO: 228169 - DNA, 561 bp, synthetic construct
  misc_feature 1..561: note = Description of Artificial Sequence: Synthetic coding sequence
  source 1..561: mol_type = other DNA
atgttggggggagccggaggcggacctggacttcgaacaccttgtcctgccgatgtcgatgaatgttccgaggaggacctttgccaatcaggtatctgcaccaatactgatggtagcttcgagtgcatctgtccccctggtcacagggccggtcccgacctggctagctgcctggacgtggatgaatgtagagaaagaggaccggctctgtgcggcagccagcggtgcgagaactctcccggatcatatcggtgcgttcgcgattgtgatcctggttatcatgcagggccagaggggacttgcgatgacgtagatgagtgcaggaataggtcattctgtggggcacacgcggtctgtcagaacttgcccggatcctttcaatgcctgtgcgatcagtacgaaggggctcgagacggacgccattgtgtcgatgtgaatgaatgtgagaccctacagggagtgtgtggagctgccctctgcgaaaacgtggaagggtcttttttgtgtgtgtgccccaattctcccgaagagttcgatcctatgactggacggtgtgtgtag

SEQ ID NO: 228170 - DNA, 4872 bp, synthetic construct
  misc_feature 1..4872: note = Description of Artificial Sequence: Synthetic coding sequence
  source 1..4872: mol_type = other DNA
atgcctcggcctgggacctctggaaggcgccctctgctgctggtcctccttttgcctttgtttgcggcagccacttcggctgcatcaccttctccttctccttctcaggtagttgaagtgccaggggtcccttctcgtccagcgtcagtggcggtgtgccggtgctgcccgggacagactagcaggaggtctcgctgtatacgagcgttctgcagggttcggtcatgccaaccgaaaaaatgtgccggaccccagaggtgtttaaacccggtccctgcagtaccaagcccttctcccagtgtgaggaagcgccaagttagtctcaattggcagccgctgactctgcaggaagccagagccttgttaaagcgccgaaggcctcggggaccaggcggtcggggactcttaagaaggaggccaccccagcgcgcaccagctgggaaagccccagtcctgtgtccattaatctgccacaacgggggagtgtgcgttaagcccgatcggtgcctgtgtccacctgactttgctggaaagttctgccaactgcattctagcggagccaggcctcctgcccctgccgtgcccggactgacgaggtcagtgtatactatgcccctggcaaaccaccgtgacgacgagcacggggtggcttctatggtttcagtgcacgtggagcacccgcaagaggccagcgtcgtggttcaccaggttgagcgcgtcagtggcccatgggaggaggccgacgctgaggctgtcgccagggcagaagccgctgcacgagccgaggctgccgctccatataccgtcctggctcagagtgccccacgggaagatggctactcagacgcttccgggtttggttactgctttagagaactgcggggaggagagtgtgcctcgcctctccccggacttaggacgcaggaggtgtgttgcagaggagcaggactcgcttggggggttcacgactgccagctgtgctccgaacgcctgggtaacagtgagcgcgtgtcagcccctgacggaccttgtccgactggcttcgagagagtgaacggtagttgcgaagatgtcgacgagtgtgccactggcggaaggtgccaacatggcgagtgcgctaatactaggggcggttacacatgtgtttgtcccgacggatttctgcttgacagcagtcgcagctcctgtataagccagcacgtcatctctgaggccaaaggtccttgtttccgggtcttacgtgatggcggatgctcactaccaattctgcgtaatattacgaagcagatctgctgttgcagccgtgtgggaaaggcctggggtcgcggttgtcagctgtgtcctccgtttgggagtgaaggatttagagagatctgtccagccggtcctgggtaccattactcggccagcgacctacgctacaacactagaccccttgggcaggagcctcctagggtcagcttatcccagccaagaacccttccagccacatcccgcccatctgccggtttcctccccacgcaccggcttgaacctcgccctgaaccgagaccagaccctagaccgggacctgaacttccacttcctagcatccctgcttggactggccctgagatccccgaatctggtccgagcagcggcatgtgccagaggaacccacaggtgtgtggccctgggcgatgcatttcaagacctagtggctacacctgtgcatgtgatagcggctttcgacttagtccgcagggaactagatgtatcgatgtcgatgagtgccggcgagttcctccaccatgcgcccctgggcgttgtgagaattctccgggtagcttcagatgcgtatgtggccctggatttagggcaggtcccagggccgcagaatgtctggacgtggatgagtgccaccgggtccctccaccatgcgacttagggcgatgtgagaataccccaggcagctttttgtgtgtgtgtccagctgggtatcaggccgcaccacatggggcttcatgtcaggacgtggatgagtgtactcagtcccccggactgtgtggtaggggcgcatgcaagaatcttcctggatccttccgctgtgtttgcccggcaggattcagaggatccgcctgtgaagaggacgttgacgagtgcgctcaggagccacctccttgcggccctggacgctgtgataatacagccggtagttttcactgtgcttgtcctgctggctttagaagtcgaggccctggggctccttgtcaggatgtcgatgagtgtgctaggtccccacccccatgtacttatggcagatgtgagaataccgagggcagttttcaatgtgtctgcccaatgggattccaaccgaacactgccggaagtgagtgtgaagacgtcgacgagtgcgagaatcatttagcttgtccaggccaggagtgtgtcaattcacccggtagctttcagtgccggacttgtcccagcggccaccacttgcacaggggaagatgcacagatgtggatgagtgctccagcggcgcaccaccatgcggtcctcatggccattgtaccaacaccgagggttccttcagatgctcttgtgctcccggatacagggccccatcgggccgacccggaccctgcgcagatgtgaacgagtgtctcgaaggagacttctgctttcctcacggcgagtgtcttaatactgatggctcctttgcttgtacgtgcgcacccggatacaggcctggcccaagaggggcttcttgtctggacgtggatgaatgctccgaagaggacctgtgccaaagtgggatttgcacgaatacggacggatctttcgagtgcatctgcccacctggccatcgagctggaccggacctcgccagctgcttggacgtcgatgaatgtcgggagagaggtcctgccttatgtgggtcacaacgttgcgagaattccccgggatcctaccgctgcgtgagagattgcgaccccggttaccatgctggcccagagggcacctgcgacgacgtcgatgagtgccaggagtatgggccagagatctgtggggctcagcgatgtgagaatactccaggctcgtacaggtgcacccccgcttgtgatcctggatatcagcccacccctgggggaggttgtcaggatgtggatgagtgtcggaataggtctttttgtggcgctcatgcagtctgtcaaaacctgcccggatctttccagtgtctctgcgaccagtacgagggcgctcgagatggcagacattgtgttgatgtgaacgaatgtgagacactacagggcgtgtgcggagctgctctgtgtgagaacgtcgagggctctttcctgtgtgtctgcccaaactctcctgaggaatttgatccgatgaccggcagatgcgtacccccaaggacctctgcagggacctttcccggttcgcagccacaggccccagcatctcccgtcctaccagctaggcctcccccacctccactccccaggcgcccaagtacaccaaggcaaggacccgtgggctcagggaggagggagtgctactttgacacagccgcaccagacgcctgtgacaatatcctggctaggaacgtcacctggcaggaatgctgctgcaccgtaggagaggggtggggctctgggtgcagaatccaacagtgtccaggcacggaaacagctgaataccagagcttatgcccgcacggccgaggttacttagcgcctagtggtgacctctctttgcgcagggatgtggacgagtgtcagctcttccgcgaccaggtgtgtaaaagcggcgtatgcgtgaacacggcaccagggtattcatgctactgctccaacggctactattaccacacccagagactagaatgcatcgataatgacgaatgtgccgatgaagagcctgcctgcgagggaggcagatgcgttaatacagtaggatcctaccattgcacatgcgaaccaccattagtactggatggatctcagcggcgatgtgtgtccaatgaaagccaaagccttgatgacaatctcggagtgtgctggcaggaggtaggcgcagaccttgtctgctctcacccaagactcgatcggcaagcaacctataccgagtgttgttgtctgtatggggaggcctggggcatggattgtgcactctgccccgctcaagatagtgatgatttcgaagcactgtgcaacgtcctacgtccaccagcatatagtccacccagacctggcggatttgggctaccttatgaatatggccctgacttaggccctccatatcaggggcttccttatggccctgagctgtacccgcctcccgcactaccgtatgacccctatccacctcccccaggcccttttgccagaagagaggcaccctacggggctcctcgatttgatatgcctgacttcgaggatgatgggggtccttatggggagagtgaggccccagctccccctggcccaggcacccggtggccttaccgatcaagagacacccggaggtcctttcctgagccagaagaacccccagaaggtgggagctatgcagggtccctggccgagccctacgaagagctagaggccgaagaatgcggtatcctcgatggctgtactaatggaagatgtgtccgggtgcccgaggggtttacatgcaggtgcttcgatgggtaccgccttgatatgacccggatggcatgcgtggatattaacgaatgtgacgaagcagaagccgcttctccactgtgcgtgaacgcgaggtgtctcaacactgatgggagcttccgatgcatctgcagaccgggtttcgccccaacacatcagcctcatcattgcgccccagccaggcctagagcttag

SEQ ID NO: 228171 - DNA, 1155 bp, synthetic construct
  misc_feature 1..1155: note = Description of Artificial Sequence: Synthetic coding sequence
  source 1..1155: mol_type = other DNA
atgacgggaaggtgtgtgccaccaagaacgtcggcagatgtcgatgagtgccagctgttccgagaccaggtgtgtaagagtggggtctgcgtgaatacggctccgggatatagttgctactgtagtaacggatactattatcacacacagcggctggagtgtattgacaacgatgagtgcgccgatgaagaacccgcatgtgagggtggacggtgcgtgaacactgtggggagctatcactgtacctgtgagcccccacttgttctcgatggcagtcagcgaaggtgtgtttctaatgagtcccagagcctcgacgacaacttgggagtatgttggcaggaggtcggcgctgatttggtttgctcacaccccagactcgacagacaagcgacatatacagagtgctgttgtctttacggcgaagcctggggtatggattgtgcgctgtgccccgctcaagacagtgacgattttgaggccctttgcaatgtcctcagacctccggcttacagcccccctcgtccagggggattcggcctgccgtatgagtatggtccagatttgggccctccttaccaaggtctcccctatggcccagagctgtatcccccaccagccctcccctacgacccatacccccctccaccgggaccattcgccagacgggaggctccttatggcgcaccccgtttcgatatgcctgatttcgaagatgacggcggaccgtacggcgaatcagaagcgcctgccccacccggtcccggaaccaggtggccatatcggagtcgagacaccaggaggtctttccctgaaccagaagagccccctgaagggggttcttacgccggatctctggcggagccgtatgaggagctggaggccgaggaatgcgggattctggacggttgtaccaatgggaggtgtgtgcgcgtgcctgaagggtttacatgccggtgcttcgatgggtaccggctggacatgacgcggatggcctgcgtagatatcaacgaatgcgacgaagctgaagctgcatcccccctgtgcgtaaacgccagatgtttaaatacggacgggtcattcaggtgcatctgtaggccaggattcgccccaacacaccaaccacaccactgcgctccagctaggccacgggcatag

SEQ ID NO: 228172 - DNA, 4671 bp, synthetic construct
  misc_feature 1..4671: note = Description of Artificial Sequence: Synthetic coding sequence
  source 1..4671: mol_type = other DNA
atggccggaggagtccgcctgctgtgggtttccctgcttgtgctcctggctcaactcggaccccagccgggtctggggaggctgggagagaggctgagggtacggttcacacctgtggtgtgcggacttcggtgtgttcacgggccaacagggagtagatgtacacccacgtgtgcacccaggaacgccacttcggttgacagtggtgccccaggcggagctgctcccggagggcctgggtttagagccttcctgtgccccctgatctgtcacaatggcggtgtctgtgtgaaacccgaccgatgcttatgccctccggactttgcaggcaagttttgtcagcttcacagttcaggagcccgtcccccagctcccgctgttcctggactgaccaggtcagtgtataccatgcctctagccaaccatagagacgacgagcacggcgtggcctccatggtgagtgtgcatgtcgagcatccgcaagaggccagcgttgtcgtgcatcaggtagagcgggtgagtggcccatgggaagaagcagacgcggaagcagtagccagggctgaagcggctgcaagagcagaggccgctgcaccttatacagtgctggcgcagtctgccccacgagaggacggctatagcgatgcatctggatttgggtattgtttcagggagttgcggggaggggagtgcgcctctccgctcccaggcctgcggacgcaggaagtatgttgtaggggagctggactagcgtggggtgttcacgactgtcagctctgctcagagcggttgggtaacagtgaaagggtttctgctcccgacggaccgtgtcccactggctttgaacgcgttaacggctcttgcgaggatgtagacgagtgcgcaacgggaggacgttgccagcatggcgaatgcgcgaatacccgaggtgggtacacctgcgtctgcccagatggcttcctgctcgactcatccagaagtagttgcatcagccagcatgtcatatccgaagcgaaaggcccatgcttcagagtgctgcgggacggcggttgttccctgcctatcctccgcaatatcacaaaacagatatgttgctgcagccgtgtgggaaaggcttggggacgcggatgccagctatgcccccctttcggttccgagggatttcgcgaaatctgcccagccggacccggatatcactacagtgcgtctgatctccgctacaatacgaggcctctaggccaggagccccctcgtgtaagcctgtctcagccacgtaccttacccgctaccagcaggccctcggcaggtttcctccccactcatcgcctggagccgaggcccgaaccacgccctgatccacgacccggtccagaattgcctctgccttccatccctgcttggaccggaccagagatcccggagtctgggccatcctccggcatgtgccaacgcaatccacaggtgtgcggaccagggaggtgtatctcacggccaagtggctacacctgcgcctgcgatagcggtttccgcctgtccccccaggggacgcggtgtattgatgttgatgagtgtagacgcgttcctcccccatgtgccccaggacgatgtgaaaactcaccagggtctttcaggtgtgtttgcgggcctgggtttcgtgccggacctcgggctgcagaatgcctggatgtcgacgagtgccatcgggtgccccctccatgtgacctgggccgatgcgagaacacaccgggatcttttctgtgtgtgtgtcctgcaggctaccaagctgccccacatggtgccagctgtcaggacgttgacgaatgtacacagtctcccggactctgtggcaggggggcttgcaagaacttacccggttcttttcgctgcgtttgccctgcgggatttagaggatccgcttgtgaggaggacgtagatgagtgcgcacaggagccgccaccctgtggtcccggtcgatgcgataataccgccggatctttccactgtgcttgccccgctgggtttcggtctcgcggaccaggcgctccctgccaggacgttgatgaatgtgccaggagcccaccaccttgtacctacggaagatgtgaaaatactgagggaagcttccagtgcgtttgtcctatgggctttcagccaaatactgccggatctgagtgtgaggatgtggacgagtgtgagaatcatctggcgtgtcccggtcaggagtgtgttaattcgccgggatccttccaatgccgaacctgtcccagcgggcatcacctgcatcggggaaggtgtacagatgtcgatgagtgcagttcaggcgcaccaccttgtggacctcacggccactgtactaacacagagggctcctttagatgctcctgcgcacctggctacagggcaccctccgggagaccaggcccatgcgctgacgtgaacgagtgccttgaaggtgacttttgttttccccatggtgagtgcttgaacactgacggctcttttgcttgcacatgcgcccctggctacagaccgggtcctaggggggcatcctgtctcgatgttgatgaatgcagcgaagaggacctctgccaaagcgggatctgcactaatactgatggttccttcgaatgtatatgcccaccgggacaccgtgccggaccggacctggcttcctgcctggacgtggatgaatgcagagaacgcggacccgctctgtgtggctcacagcggtgcgagaactctccgggaagctaccgctgcgtgcgcgactgtgatcctgggtatcatgccggacccgaaggcacctgcgatgacgtggacgaatgccaagagtatgggcctgaaatatgtggtgcacaacgctgtgagaatacgcctggctcttacaggtgcacacctgcttgcgaccctggatatcagccgacgccagggggtggatgccaagacgtagacgagtgtagaaacaggtccttctgcggcgcacacgcagtctgtcagaacctgccaggcagcttccagtgcctctgtgaccaatacgaaggtgcacgggatgggaggcactgtgtcgacgtgaatgagtgcgagactctgcaaggtgtgtgcggcgctgccctgtgtgagaacgtcgagggctctttcctgtgcgtctgccccaacagtccggaagaattcgaccctatgactgggagatgcgttccaccacggaccagcgccggaacctttcccggtagtcagccccaagctcctgcctcgccagtgctgcccgcaaggcctccgcctccgccactcccaaggcggcctagcacaccccgtcaggggcctgttggttcaggaagaagagagtgctattttgacactgctgctcctgacgcttgtgataatattcttgccagaaacgtgacttggcaagagtgttgttgtactgttggcgagggctggggcagcgggtgtcggattcagcagtgtcctggcacagagactgcagagtaccagtcactgtgcccccatgggagaggatacttggcaccctcaggcgatctgagtctgcggagggacgtcgacgaatgtcagctgttcagagatcaggtgtgcaagtccggcgtttgtgtgaacacagcccctggatactcttgctactgctcaaatgggtactactaccatacgcagcgactcgagtgcatcgacaacgacgagtgcgcagacgaggaacccgcatgtgagggaggcaggtgcgtcaacactgtcggctcataccattgtacatgtgaacccccactggtgctcgatggttctcagagacgatgcgtgtccaacgagagccaatccctggatgataacctaggggtgtgctggcaggaggtgggtgcagacctggtgtgctcccatccaaggctggatcgtcaggcgacctatactgagtgctgttgcttgtatggagaggcttggggcatggactgtgccctttgtcccgcacaagactctgatgactttgaagcactgtgcaacgtccttcggcctcccgcttactctccccctcgaccgggtggttttggtctgccctatgaatatggtcccgacttgggcccaccataccagggtctcccctatgggcctgagctatatcccccacccgctcttccctatgacccttacccaccgcctcccggtccattcgcacggcgtgaggctccctatggagccccacgattcgatatgccagatttcgaagacgatggcggtccgtacggggagtccgaggcacctgcgcctccaggacctggcacaaggtggccatataggtctcgggacacaaggcgctcctttcccgagcccgaggaaccaccggaagggggaagttatgctggatctctcgcagagccttatgaggaacttgaagctgaggagtgcggcattctggacgggtgcactaatggcaggtgtgtcagagtgcctgaaggattcacctgtagatgttttgatggctaccggctggacatgactcggatggcctgtgtggatatcaatgaatgcgacgaagcggaagccgcttctcccctctgtgtgaatgccaggtgcctcaacactgacggcagcttccggtgtatctgtagacccggattcgccccaacccaccaaccacaccattgcgcaccagcgaggccacgagcctag

SEQ ID NO: 228173 - DNA, 2700 bp, synthetic construct
  misc_feature 1..2700: note = Description of Artificial Sequence: Synthetic coding sequence
  source 1..2700: mol_type = other DNA
atgtgccagcgcaatcctcaggtgtgtggacccggtaggtgcatcagccgcccatctggatatacttgtgcttgtgatagtggctttcgactgtcacctcagggaacacgctgcatcgacgtcgacgaatgccgcagagtccccccaccctgcgccccaggcaggtgcgaaaactcacctggaagctttaggtgtgtgtgcgggcctggtttccgcgctggacccagagcagcagaatgtctggacgtagatgagtgccatcgggtgcccccaccctgtgatcttgggaggtgtgaaaacactcccggttccttcctgtgtgtgtgtccagctggataccaggcagcacctcacggggcatcatgtcaggatgttgacgagtgtacgcagagcccaggtctttgcggacggggagcctgcaagaatcttcctggtagctttagatgcgtgtgccccgctgggtttagagggtccgcatgtgaggaggacgtggacgagtgcgcccaggagcctccaccttgtggtcccggacgttgtgacaacaccgccggttcgtttcactgcgcttgccctgcgggtttcagatccagaggtcccggagcgccatgccaggacgtagacgaatgcgctaggtctccgcctccgtgtacgtacggcaggtgtgagaacaccgagggaagtttccaatgcgtttgtccaatggggttccagccaaacactgcagggtctgagtgcgaggacgtggacgagtgcgagaaccacctcgcctgcccaggtcaggaatgtgtgaactcccctggctcctttcaatgcagaacctgcccctcagggcatcacttgcacaggggacgttgtaccgatgtcgacgagtgttcgtctggggctcctccatgcgggccacatgggcactgcacaaatacggagggaagcttcaggtgctcctgcgccccaggttaccgagccccaagtgggcgaccgggaccttgtgctgacgttaatgagtgcctggaaggcgatttctgtttcccccacggggaatgcctgaacacagatggatcgttcgcctgcacctgtgcacccggatatcggcctggccctcgcggagccagttgcctggacgttgatgagtgcagcgaggaagatctctgtcagtcgggaatctgtaccaacactgacggcagttttgaatgcatatgtcccccagggcaccgggctggccctgatctggcgagttgtcttgacgtggacgagtgccgagaacgagggcctgccttgtgtggatcccaaagatgtgagaattcaccaggaagttaccggtgcgtcagagattgcgacccaggctaccacgctggtccagaaggtacgtgtgatgacgttaatgagtgtgagacactgcagggcgtgtgcggcgctgcactgtgcgagaacgtggaaggatcatttctctgcgtgtgcccaaactctcctgaagagttcgacccgatgacagggaggtgcgtgcccccacgaacgtccgccggtactttccctggtagccaaccccaggcgcctgcctcccccgttctacctgcacggccaccccctccacccttaccaagacggccaagcactcctaggcagggccctgtcggaagtgggagacgagaatgctactttgacacagctgctcctgatgcatgcgataatatcctggccagaaatgtaacttggcaggagtgctgctgcacagttggagaagggtgggggtccggatgtagaattcaacagtgtccaggaaccgaaacagcagagtaccagagtctctgcccacacggccgaggatacctggctccaagcggtgatttgtcactgcgcagggatgtggacgagtgccaactctttagagaccaggtgtgtaaatccggtgtttgtgtgaacaccgcacctggttattcctgttactgctctaatggctactactaccatacacagcgcttagaatgtatagacaatgacgagtgcgctgatgaggaacccgcttgtgaggggggtcgctgtgtgaatacagtcggatcctaccactgcacctgcgagcctcctcttgtactcgatggatctcagaggcgctgtgtgagtaacgagtcccaatccctggacgacaatttgggagtatgctggcaagaggtcggcgctgatctcgtttgttcacatccgaggctggaccggcaggcgacttatactgagtgctgttgcctgtacggggaggcatggggtatggactgcgccctgtgccccgctcaggactccgacgatttcgaggccctgtgtaatgtgctgcggcctcctgcctactccccgcctcggcctggcggattcggcctgccttatgaatatggccctgatctgggcccaccttaccaggggcttccctacggaccagaactttaccctccacctgcattgccctatgacccttacccacctcctcctggcccttttgcgcgtcgagaagctccttacggcgctcctagattcgacatgcccgactttgaagacgacgggggaccttacggtgaaagcgaagccccagctccacccggaccaggtacgcggtggccctacagaagtcgggataccaggcgatcctttccagagcctgaggagccccctgagggtgggtcttatgcaggctcactggctgaaccttatgaagaactctag

SEQ ID NO: 228174 - DNA, 639 bp, synthetic construct
  misc_feature 1..639: note = Description of Artificial Sequence: Synthetic coding sequence
  source 1..639: mol_type = other DNA
atgtggacctcagctacagcttgtcgaagaagggtgaccagtggcgcagccaggacccgtcaggcagcctcctgcgcttgcgccccaccaggcaccaggctgcaccggactgagcccgctgcgaggatgtggatgtcagtaccagaagcccctcaccctgctcctactgcgggtgtgaggacacaaaaggcagcctcaagcgtttctgctccctgggctagcaatcctacgctgctggctccaaatgtggacgagtgtgaaaatcacctggcgtgccccggacaagagtgcgtcaacagccccggatcattccaatgcagaacttgcccaagtgggcatcacctacaccgaggcagatgcacagatgtggacgagtgctctagcggcgcacccccatgtggtccgcatgggcattgcaccaatacggaaggcagttttcggtgctcctgcgcacccggttatagagctccatctgggagaccaggtccatgcgccgacgtaaacgagtgcctggaaggtgacttctgtttcccacacggcgagtgtctgaacactgatggtagctttgcctgcacttgcgccccaggctatagacccggacctaggggcgcaagttgcctcggctcttatccaggttag

SEQ ID NO: 228175 - DNA, 669 bp, synthetic construct
  misc_feature 1..669: note = Description of Artificial Sequence: Synthetic coding sequence
  source 1..669: mol_type = other DNA
atggagatcccccctaccaactatcccgcttctagggccgcactggttgcccagaactatatcaactatcagcaggggacacctcaccgggtgttcgaggtgcagaaggtgaaacaagcctcgatggaagatattcccggaagaggccataaataccacctgaaatttgcagttgaggaaattatacagaaacaagttaaagtgaactgtacagcagaagtgctgtacccatccacaggtcaggagacagcacccgaggtcaatttcacctttgagggcgagacaggtaaaaaccccgatgaagaggacaataccttttatcagcggctgaagtctatgaaggaacctctggaagcccagaatattccagacaactttggaaatgtgagccccgagatgacgctcgtgctccatctcgcctgggtggcatgtggatatatcatctggcagaacagcactgaggacacatggtataaaatggttaaaattcaaaccgtgaaacaagtgcaacgcaacgacgatttcattgagttggattatacaattctactgcacaatattgccagtcaggaaatcattccctggcagatgcaggtgttgtggcatccgcagtacggaacaaaggtcaaacataatagtagacttcccaaggaggtgcagcttgagtag

SEQ ID NO: 228176 - DNA, 888 bp, synthetic construct
  misc_feature 1..888: note = Description of Artificial Sequence: Synthetic coding sequence
  source 1..888: mol_type = other DNA
atgggccttcccgtgagctgggctccaccagccctctgggtgctgggatgctgtgctctgctcctgtctctttgggccctgtgtactgcatgccgcaggcctgaggacgccgttgcacccaggaagcgggcaagacgacagagggcgagattacaaggcagcgccacagctgcagaagcttctctgcttcggaggactcatctgtgtagtctgtccaaatccgacacaagactacatgaactgcatcgtggcccaaggtccagccgcgcactgcgccctgcctccatggacttactaaggccccattggctggaggtgagtcgagatattacagggccacaagcggctccctccgcttttcctcaccaggaattgccacgtgcactgcccgctgctgctgcaacagccggatgcgcgggacttgaggctacatatagtaatgtgggcctggctgctcttcccggagttagcctagctgcctcgccagtcgtggcggagtacgcaagggtacagaagcggaaaggaactcatagatctcctcaggaacctcagcaaggtaagactgaagtgactcccgctgctcaggtagacgtgctgtattccagggtttgtaaacctaaaaggcgtgatccaggcccaactaccgacccactggatcccaagggccagggtgccatcctcgccctggcaggcgatcttgcttaccagacattgcccttgcgcgcacttgacgttgactcaggacctctggaaaatgtctatgagagcatccgagagctcggagacccagccggaagaagctccacatgcggtgccggaacccctccagcctcttcttgcccatctctcggacggggttggaggccgttgcctgcctcacttccatag

SEQ ID NO: 228177 - DNA, 324 bp, synthetic construct
  misc_feature 1..324: note = Description of Artificial Sequence: Synthetic coding sequence
  source 1..324: mol_type = other DNA
atgggtttgcccgtcagctgggctccccctgctctctgggtgctcggttgctgcgccctgctcctctcactttgggctctatgtactgcctgccggcgacccgaagatgccgtcgcaccgagaaagcgggctagacggcagagagcccgtctgcagggctcagccaccgccgctgaggcaagtcttctacgtcgtacccatctgtgctcactgtctaaatctgatacccggctccatgagttgcacagaggccctcgaagctcccgggctcttcgcccagcctctatggatctgctgaggccacactggctggaggtgagttag

SEQ ID NO: 228178 - DNA, 2094 bp, synthetic construct
  misc_feature 1..2094: note = Description of Artificial Sequence: Synthetic coding sequence
  source 1..2094: mol_type = other DNA
atgggcgaacgggctgggtctcctgggactgatcaagagcgaaaggcgggtaaacatcactactcttacctgagtgacttcgagaccccacagagcagcggacgtagttccttagtgtctagtagccctgcctctgtgcgtcgcaagaatccgaagcgacagacaagcgacggacaagtgcaccatcaggcccctagaaagccctctcctaaaggccttcctaatcgcaagggggtaagagtagggttccgctcacagtctctgaatagggagccacttcggaaggacaccgacctggtgaccaagcggatcctctcagcccgactgctgaaaatcaatgaactgcagaacgaggttagcgagctccaggtcaagctggcagagcttctgaaggagaacaaatcactgaaacgactgcagtaccggcaggaaaaagccctgaataagttcgaggacgctgaaaatgaaattagtcaattgatcttccggcacaataatgagataaccgcattaaaagagcgactgcgcaaatcccaggaaaaagagcgcgctacagagaagagggttaaggatactgagtccgaattattcaggaccaaattcagccttcagaaactaaaggaaatctctgaagcccgtcaccttcctgaacgcgacgacttggccaagaagttggtgagtgcggagttaaagctggacgacacggagcgacgcataaaggagctttctaaaaatctggaattaagcactaacagctttcaacggcagctgctcgcagagagaaagcgggcatatgaggcccatgacgagaacaaagtgcttcagaaggaagtgcaacgcctgtaccataaactgaaagagaaagagcgagagctcgatattaaaaacatatattccaaccgtctgcccaaaagctccccgaacaaagaaaaagagctcgccctccgtaaaaacgccgcatgccagtcagacttcgctgacctctgtaccaaaggtgtgcagacgatggaagacttcaaacctgaggaatatccactgacacctgaaaccatcatgtgctacgagaataaatgggaagaacctggacatcttacactcgacctgcagagccaaaagcaagacagacatggtgaagcaggcatcttgaatcccataatggagagagaggaaaaattcgtgactgatgaggagttgcatgttgtgaagcaggaggttgaaaaactcgaggatgaatgggagagagaggagcttgataagaaacagaaagagaaagccagtcttctcgagagagaggagaagcctgagtgggaaactgggcgataccagttgggaatgtatcccatccagaatatggataagctccagggcgaggaagaggaaagacttaagcgggagatgctgctggcaaagctgaatgaaatcgacagagagctccaagactcgagaaacttgaagtaccccgtgctccccctcctccccgatttcgagtctaagctgcacagccccgaaaggagccctaagacctatagatttagtgagtccagtgaacgacttttcaacgggcaccacctccaggatatctctttttccacgcctaaaggggaggggcagaactctggtaatgtgcggagtcccgcttcacccaacgagtttgccttcggctcctatgtcccctctttcgccaaaacttcagaacgtagcaatcctttctcccagaagtctagctttctggacttccagagaaacagcatggagaagctgagcaaagatggagttgatctcataacccgcaaagagaagaaagcaaatctcatggagcagctattcggcgcaagcgggtcctccactatcagtagcaagagttctgaccccaattctgtggcaagtagtaaaggcgatatagaccccctgaactttctgccaggcaataagggatctcgagaccaggaacacgatgaggatgagggcttcttcctgtccgaaggtcggtccttcaacccaaaccgtcaccggctgaagcatgccgacgacaagcctgcagttaaagcagctgactcagtagaagacgagatagaagaagtggctctgcgttag

SEQ ID NO: 228179 - DNA, 2094 bp, synthetic construct
  misc_feature 1..2094: note = Description of Artificial Sequence: Synthetic coding sequence
  source 1..2094: mol_type = other DNA
atgggcgaacgtgctggctctccaggcacagaccaggagagaaaggcgggaaaacaccactacagctacctttctgattttgaaacccctcaatcatccggcagatcctcactggtcagcagcagcccggcatccgtacggcgtaagaatccaaaaaggcagaccagtgacggacaggtgcaccaccaagcccctagaaaaccatcgccaaaggggctacctaatcgcaagggagtccgcgtcggctttcgatcacagtccttgaaccgtgaacccttgcgaaaggacactgacctcgtcacaaaacgaatcctcagtgctagactgctcaagatcaatgagctgcagaacgaggtgtccgaattgcaggtcaagctggcagaactcctcaaagagaacaagtctttgaaacggctgcagtacagacaggaaaaggcactgaacaagttcgaggacgccgaaaatgagatcagccaattgatctttcgccacaacaatgagattacagctctaaaggaacgacttcggaagagtcaggaaaaggagagagccactgagaaacgagtgaaagatacagagtccgaactgttccgaacaaagttcagccttcagaaactaaaggagatatcagaggccagacacttacctgagcgggacgacctcgctaagaagctggtctccgctgagctgaagcttgatgacaccgaaaggagaattaaagagctttccaagaatctggaattgtcgaccaactctttccagcggcaactgcttgccgagcggaaaagggcctacgaagcacacgatgaaaataaagtattgcagaaagaggttcagcgattataccacaagctgaaggagaaggagcgggaactggatataaagaacatatacagcaacagactgcctaagtcatcgccgaacaaggagaaggaattggctctcagaaagaatgcagcctgtcaatcagattttgcggatttatgtacaaaaggagtacagacaatggaggacttcaagccagaagaataccccctcaccccggaaaccattatgtgctacgagaataagtgggaggagccaggccacctgaccttagacctccaaagccaaaaacaagaccgccacggggaggccggtattttgaaccccatcatggagcgtgaggagaagtttgtgacagacgaggaattgcatgttgtgaaacaggaggtggagaagcttgaagacgaatgggagagggaggagctggataaaaaacagaaagagaaggcttccttgctggaaagggaggaaaagcctgaatgggagacagggaggtaccagctgggcatgtatccaatacagaacatggacaagctccaaggagaggaggaagaacgactcaagcgcgagatgctgcttgccaagctaaacgaaatcgacagagagttgcaagattccagaaatctcaagtaccccgtgttgcctcttcttcctgattttgagagtaagctgcactcacccgagcgctcccctaaaacataccgattctccgagtcctcagagagacttttcaatggtcaccatctgcaggatattagtttctccaccccaaagggtgagggtcagaactcaggcaatgtgcgatcaccagcgagcccgaatgaattcgccttcggttcctacgtcccgtcctttgccaaaacctctgagcgatccaatccctttagtcagaagagcagcttccttgattttcagaggaatagtatggagaagctgtccaaagacggggtagacttaataacccgaaaggaaaaaaaagctaacctcatggaacagctgttcggggctagtgggtcctccacaatcagttctaagtcctcggaccccaacagtgtagcttcttccaagggagacattgacccgctgaattttctacctggaaacaagggatccagagaccaggagcatgatgaagatgagggtttctttctgtccgaaggaaggtcctttaaccccaatagacaccgcctaaaacatgcagacgataagcccgcagtaaaagccgctgattcagtggaggacgagattgaggaggtggccttgcgatag

SEQ ID NO: 228180 - DNA, 693 bp, synthetic construct
  misc_feature 1..693: note = Description of Artificial Sequence: Synthetic coding sequence
  source 1..693: mol_type = other DNA
atgaaaaaccctatgctcgaggtcgtctcgctgcttttggaaaagctacttctgatttctaactttacactgttcagcagtggtgccgcaggcgaggacaagggccgaaatagtttttacgaaacttcaagctttcacagaggcgatgttcttgaggtccctaggacccatctgactcactacggcatttatttaggagataatcgggtggctcacatgatgccggatattctcttagccttgactgatgacatgggaagaacgcagaaagtcgtgtctaataaacgcctgatcctcggagttattgtaaaagtggcctcaatccgcgttgataccgtcgaggatttcgcatacggggctaatatcctggtaaatcatctggacgaaagcttgcaaaagaaggctctgctgaatgaggaggtggcgaggcgcgctgagaagctgctgggttttactccatacagtctgctctggaataactgcgaacactttgtgacctactgtaggtatggcaccccaatctcaccccagagtgacaagttctgcgagaccgtcaaaattatcattcgcgatcaaaggagcgtcttagcatcagccgtcttagggttggcctctatcgtgtgcactggtctcgtgagctacacaactctgcctgccatatttataccattctttctgtggatggccggatag

SEQ ID NO: 228181 - DNA, 210 bp, synthetic construct
  misc_feature 1..210: note = Description of Artificial Sequence: Synthetic coding sequence
  source 1..210: mol_type = other DNA
atgaaaaacccaatgctggaggttgtcagtctgctcttggagaagcttctgctgatttctaattttactctgttttcttctggcgcagccggtgaggataagggaagaaatagcttttacgagacttcctctttccatagaggggatgtgcttgaagtcccgcgtacgcatttgacccactatgggatttacctcggtgacaacagatag

SEQ ID NO: 228182 - DNA, 693 bp, synthetic construct
  misc_feature 1..693: note = Description of Artificial Sequence: Synthetic coding sequence
  source 1..693: mol_type = other DNA
atgaagaaccccatgctcgaggtggtgagcctgctgctggagaagcttctactcattagtaatttcactctttttagctccggagccgcaggcgaagataagggccgtaattcgttctacgaaacatctagctttcacaggggggacgttctcgaagttccacggactcacctcacgcattacggtatttaccttggagacaaccgtgtcgcccacatgatgccagacattctactggcgctgactgacgacatggggaggacccagaaggttgtgtcgaacaaacgcctgatcttaggggtcatcgtgaaggttgcttccattagggtagacactgtggaggacttcgcctacggcgctaacatcttggtcaaccatctggacgaaagtctccagaagaaagcacttctgaatgaggaggtcgctagaagggccgaaaaacttttaggcttcacaccatacagcctcctatggaataactgtgagcattttgtaacatactgccgctacgggacccccatctctccacaaagcgacaaattctgtgagactgtcaaaatcatcattagggatcagcggagcgtgttggcgagcgccgttttgggtctggcttccatcgtgtgtactggactggtttcgtataccacattacctgccatttttatcccgttttttttgtggatggccggatag

SEQ ID NO: 228183 - DNA, 1110 bp, synthetic construct
  misc_feature 1..1110: note = Description of Artificial Sequence: Synthetic coding sequence
  source 1..1110: mol_type = other DNA
atggtttgggcaccactcggacctccacggacagactgcttgaccctgctccatactccaagcaaggattcccccaaaatgagcttggaatggctcgtcgcttggtcctggtctctcgacggactccgcgactgcatcgctacagggatccagtcagtcagagactgcgataccacagcagttatcacagtcgcctgccttctggtcctctttgtgtggtattgttaccacgtgggcagggaacagccgagaccttacgtctctgtgaacagtctcatgcaggctgctgacgcaaacggcctacagaatggctacgtctactgtcagtcgcccgagtgcgtgcgatgtactcacaatgagggactgaaccaaaagttgtaccacaacttgcaagagtacgccaagaggtactcctggtccggcatgggcaggatccacaagggcattcgggaacaggggagatacctgaattctcgcccatccatccagaaacccgaggttttctttctgcctgacctgcctaccacaccatatttttcccgggacgcccagaaacacgatgtcgaggtactggagcgcaactttcagaccatcctgtgcgagttcgagaccctctacaaagcattctccaattgtagtctccctcaggggtggaaaatgaattctacaccctcgggcgagtggtttacattttatttagttaaccagggggtctgcgttccacggaactgtagaaaatgtccacgcacgtaccgactgcttggctcgctgcgcacttgtatcgggaataatgtgtttgggaatgcatgcatcagtgtccttagcccgggtacagtgatcacagagcattacggaccgacaaacatccggatccggtgtcacctggggctgaaaacaccaaacggctgcgaactagtagttggaggagaaccacaatgttgggccgaaggccgatgcctgttatttgacgattcgtttctgcacgccgcatttcacgagggctccgctgaggatgggcctcgggtggtgtttatggtggatctctggcaccccaacgtggctgctgcagaacgacaagctctcgattttatctttgcccctggtagatag

SEQ ID NO: 228184 - DNA, 984 bp, synthetic construct
  misc_feature 1..984: note = Description of Artificial Sequence: Synthetic coding sequence
  source 1..984: mol_type = other DNA
atgtcacaaccctcggggggacgcgcacccggaacacgcatctattcctggagctgccctaccgttatgtcccccggagagaaactggaccccatcccagactcgtttattctgcagcccccagtgttccacccagttgtgccgtacgtgactacgatttttggcggactccacgcgggaaagatggttatgttacagggtgtagtgcccctggacgcgcatagattccaggtcgattttcaatgcggctgttcgctttgtcctcgccctgatattgcgttccactttaacccacgattccacaccacgaagcctcacgtgatctgcaacaccctgcatggaggcagatggcagagggaggcgagatggccacacctggcactgaggcgcggaagctcctttttaattctgtttctgtttggcaatgaggaagtcaaagtgagcgtgaatgggcagcacttcttacacttcagatacaggctccctctgagccacgtagacacattgggcattttcggagatatcctcgttgaggcagtgggattcctgaacataaacccctttgtggagggaagtagggaatacccagccggtcacgaggtgccctgttcccacgccttaccccaggggctgagtcccggacaggtgatcatcgttagagggttggtcctgcaggaacctaaacactttacagtatccctcagggatcaggctgcccacgccccagtgactctgcgagcctcgtttgcggaccgtacattggcctggataagcaggtggggacagaaaaagctgatttcagccccatttcttttctatccacagaggttctttgaggtgctgctgctgttccaagagggcggtctaaagttggctctgaatggccaggggctgggggctacgtccatgaaccaacaagccctggaacaactgagagagctgaggatcagtggcagcgtccagttatactgcgtgcactcatag

SEQ ID NO: 228185 - DNA, 1014 bp, synthetic construct
  misc_feature 1..1014: note = Description of Artificial Sequence: Synthetic coding sequence
  source 1..1014: mol_type = other DNA
atgtcccagccttctggcggaagggctccaggtaccaggatctactcctggtcctgcccaaccgttatgtctccaggggagaagctggaccccatccccgactccttcattctgcagcctccagtgtttcatcctgttgtgccctacgtgacaacaattttcgggggattgcacgccggaaagatggtgatgttgcaaggtgtggtgcctctggatgctcacagtcgttttcaggtggacttccagtgcggctgttccttgtgtccaaggcccgatatcgctttccacttcaatcctcgcttccataccacaaagccccatgtgatctgtaataccctgcacggtgggcgatggcagcgcgaagctcggtggcctcatctggccctgagaaggggctcaagttttcttatcctgtttctgttcgggaacgaagaggtgaaggtaagtgtgaatgggcagcatttcctccactttaggtaccgcctcccactcagtcacgtcgacactctaggcatcttcggcgatatacttgtcgaagctgtgggcttcttaaacataaatcccttcgtggaaggcagcagagaatatcccgctggccacccctttcttctgatgtctccacgactagaggtgccctgttcccatgccctgcctcaggggctctcaccgggtcaagtaatcatcgtccgtgggttggttcttcaggagccgaagcactttaccgtttcattgcgagatcaggcggctcatgctcccgttacgctccgggcatcttttgctgatcgcacgctggcatggatctctcgttggggtcaaaagaagttaatctctgcacccttccttttttatcctcaaaggttcttcgaagtgttgcttctgtttcaggagggtggattgaaactggccctcaatggccaggggctcggggctacgagcatgaaccagcaggccctggagcagcttcgagaactgagaatctcgggaagtgttcagttgtattgcgtccactcctag

SEQ ID NO: 228186 - DNA, 1011 bp, synthetic construct
  misc_feature 1..1011: note = Description of Artificial Sequence: Synthetic coding sequence
  source 1..1011: mol_type = other DNA
atgtctcagccttccgggggtcgcgcaccaggcactcggatttacagctggagctgtcccaccgttatgtctccaggcgagaagcttgaccccattcctgattcttttatcctgcaaccaccagtgtttcaccctgttgtcccttacgtgactacaatcttcggcggtctgcacgctggcaagatggtcatgctgcaaggcgtggttcctttggacgcacatagatttcaagtagactttcagtgcggatgcagtctgtgccctcggccagacattgccttccacttcaacccgcgattccataccacaaagccccacgttatctgcaacaccctccacgggggacgctggcagcgggaagcccgttggccacatctggcactgcgaaggggcagtagctttctgatactgttcttgtttggaaatgaggaggtaaaagtatcagtgaatggtcagcactttttgcatttccggtataggttacccctaagtcatgtggatacactgggaatcttcggggacattctggttgaggccgttgggtttctaaacatcaatcccttcgtcgagggatctcgagagtacccagcgggtcatccctttctgctcatgtccccccgtcttgaagttccctgctcacacgctctgcctcagggcttaagccccggacaggtgattatcgttagaggtctagttctgcaggaacctaaacacttcaccgtgtccttgcgcgaccaggcagcgcatgctcccgtcacacttcgagcttcattcgccgacagaaccctcgcgtggatttcccggtggggtcagaaaaagctgatctcagccccattcttattctacccacagagattctttgaggtgttgctactgttccaggaagggggacttaaactggcgctaaatggtcaaggcctcggcgcaacctcaatgaatcagcaggcccttgagcaactgcgtgagctgcggatctcaggctctgtccagttatattgcgttcatagttag

SEQ ID NO: 228187 - DNA, 828 bp, synthetic construct
  misc_feature 1..828: note = Description of Artificial Sequence: Synthetic coding sequence
  source 1..828: mol_type = other DNA
atggtgatgctgcagggggttgttccactggacgctcaccgttttcaggttgattttcagtgcgggtgctctctgtgtcccagacccgatatagcatttcacttcaaccccagatttcacaccaccaaaccgcacgtgatctgcaacacattgcatggcggaaggtggcagcgagaggcacggtggccccacctggccctacggagggggagttcctttctgatcctctttttatttgggaatgaggaagtcaaagtgtcagtgaatggtcagcatttcctgcacttcaggtaccggctgccactctctcatgtagacacccttggaatcttcggggatatcctcgtcgaagcagttggcttcctaaatattaatccttttgtcgaagggtcacgggaatatcctgctggacatcctttcctgttaatgagtcccagacttgaagtgccttgcagccacgccctcccacaggggctgtcgccaggccaggtgatcattgtccgtgggctggtgctccaggagcctaagcactttaccgtgtcacttagagatcaagctgcccacgccccagtgaccctcagggccagtttcgccgaccggactctggcttggatctccagatgggggcagaaaaaactgatatcagcaccattcttattttacccacagagatttttcgaggttctgctcctgttccaggaggggggactaaagctggctttgaacgggcaggggctaggagccacgagtatgaaccagcaggccctggagcagcttagagaactgagaatcagcggttccgtgcagctgtactgcgtgcactcctag

SEQ ID NO: 228188 - DNA, 801 bp, synthetic construct
  misc_feature 1..801: note = Description of Artificial Sequence: Synthetic coding sequence
  source 1..801: mol_type = other DNA
atggtgatgctgcagggagtggtgccccttgatgcacaccgatttcaggtcgattttcagtgcggctgtagcctctgtccaagaccggacatcgccttccacttcaatccacggtttcacacgactaagccccacgtcatctgcaacactttgcatggcggaagatggcaacgcgaggcaagatggccgcatctggcccttcgaagagggtcgtcctttctgattctgtttctttttgggaatgaggaggtaaaggtaagcgtgaacggccagcattttctgcattttagataccgtctcccactgagtcacgtggacacacttggtattttcggcgacatcctggtcgaggccgttggcttccttaacattaacccctttgtggaaggatctagggaatatccggctggtcatgaggtgccatgctctcatgcacttcctcaggggctgtctcccggacaggtgataattgttcggggattggtgctccaggagccgaaacatttcactgtaagtctgagggaccaggctgcccacgcacccgtaaccctccgagccagcttcgccgaccggactctcgcctggatctctagatggggccagaaaaaactgatttcggcccctttcctgttttatcctcagcgtttttttgaggtcttgcttttgttccaggaaggagggctgaagcttgccctgaacggtcagggcctaggggctacgtctatgaaccagcaggctctcgagcaactgcgcgagctgcgcatcagtggcagcgtgcaactttactgcgtacatagttag

SEQ ID NO: 228189 - DNA, 378 bp, synthetic construct
  misc_feature 1..378: note = Description of Artificial Sequence: Synthetic coding sequence
  source 1..378: mol_type = other DNA
atggctgatgaagaacttgaggctttacgaagacagcggctggccgaactacaggccaagcacggagatcctggagatgcagcccaacaggaagctaagcatagggaggccgagatgagaaatagcatactcgcccaggtgctggatcagtcagccagggcacggttgtctaatttagccctcgtcaaacctgaaaaaaccaaagcggtggagaattacctgatacagatggcccgatacggacagctttccgagaaagtttccgagcaaggcttgatagaaatcttgaagaaggtcagccaacagactgagaagacgacaactgtgaagtttaatcgcagaaaggttatggacagcgacgaagacgacgactactag

SEQ ID NO: 228190 - DNA, 1530 bp, synthetic construct
  misc_feature 1..1530: note = Description of Artificial Sequence: Synthetic coding sequence
  source 1..1530: mol_type = other DNA
atgggcgtccaagccggactgtttggtatgctggggttcctgggtgtcgccctaggaggctcacctgcccttaggtggtaccgaacaagttgccacttaacaaaggcagtgcccggtaatcccctgggatacctctcatttcttgcaaaggacgcccaaggactggctctgatccatgctcgatgggatgcccacagaagactccagagctgttcttgggaggatgaacccgagctgaccgcggcatacggggcattatgcgcccatgaaacggcctggggatcattcatccataccccgggtccggagctgcaacgggctctggccacactgcagtcccaatgggaagcctgcagggctctcgaagaaagtccagccggagctcgcaagaaacgagctgccggacagagtggcgttcccggtgggggtcatcaacgtgagaagaggggctggaccatgcctgggaccctatggtgtggtgtaggagattctgcaggcaactccagcgagctgggagtgtttcagggtcccgacctttgttgcagagagcatgatagatgtccgcaaaacatatctcccttacaatataactacggtatacggaactatcggtttcacactatcagccactgcgactgcgacacaagatttcagcagtgccttcagaatcaacacgatagtatctccgatatcgttggagtggctttcttcaatgtgttggagattccttgctttgtgttggaggagcaagaagcgtgcgtggcttggtactggtgggggggatgccggatgtatgggaccgtccccctggccaggctgcagcccaggacgttttataatgctagttggtcgtctcgagctacaagtccgacgccaagctcccggagcccagcgccaccaaagcctcggcagaagcaacacttacggaaaggacctccacaccagaaagggagcaagcggcctagcaaggccaacacaactgctctgcaagaccccatggtcagccccaggcttgatgtcgccccaacaggattgcagggccctcaaggagggctcaagccccaaggggctaggtgggtgtgccgatccttcaggcgtcacctggatcagtgcgagcatcagattggtccaagggagattgagttccagctattaaactctgcgcaagagcctctctttcactgtaactgtacccgcaggctagcaaggttcctgagactgcacagcccccctgaggttacaaacatgctgtgggagttacttggcacaacctgtttcaagctagccccaccacttgattgcgttgagggtaaaaactgcagtcgagatccacgagccattagagtaagcgctagacacctgagaagactgcagcagcggaggcaccagctgcaggataaaggaaccgatgagaggcaaccttggccctccgagcctctcaggggaccaatgtcgttctataatcagtgcttgcaactgacccaggctgctcgaaggccggataggcagcagaaatcctggtcccagtag

SEQ ID NO: 228191 - DNA, 93 bp, synthetic construct
  misc_feature 1..93: note = Description of Artificial Sequence: Synthetic coding sequence
  source 1..93: mol_type = other DNA
atgaccggggagctggaggtgaagaatatggacatgaaacctggcagcacattgaaaatcaccggcagtatagcggatggcaccgacggctag

SEQ ID NO: 228192 - DNA, 1758 bp, synthetic construct
  misc_feature 1..1758: note = Description of Artificial Sequence: Synthetic coding sequence
  source 1..1758: mol_type = other DNA
atgaccccaccgcgtctgttctgggtgtggctcctggtcgcagggactcagggcgtgaacgatggcgacatgcggctcgccgacggaggagcaactaaccaggggagagtcgaaatcttttacaggggtcagtggggtactgtgtgtgacaatttgtgggatctgacagatgcctcagtcgtctgccgcgcacttggttttgagaatgccacccaagcactgggcagggccgcattcgggcagggctcaggcccaatcatgctggatgaagtgcagtgtaccgggaccgaggcatccttggctgactgcaagtcacttggctggctcaagagtaattgtagacacgagagggatgccggagtcgtgtgtactaatgaaactaggtccacgcataccctggatctgagccgcgaattatctgaagccctgggacagattttcgacagccaaagaggatgcgacttgtccatcagcgttaatgttcagggtgaagatgcgcttgggttctgcggacacaccgtgatattaacggccaatctagaggcccaagctctatggaaggagcctggctccaatgtgacaatgagtgttgacgccgagtgcgtgcctatggttcgggatctattgagatatttttactcacgccgaattgatattacgttgagttcagttaagtgttttcacaaacttgcctcggcttacggcgctaggcagttgcagggttattgtgcaagtttgtttgccattctgctgccacaggatcccagctttcaaatgcctctggacctatacgcctacgcagtagcaacaggagacgccttgctggagaaactctgtctgcaattcttagcctggaactttgaggctctgacacaagcagaggcatggccctctgtgccgacagacctgttgcaactgctgctgccacggagcgacctggctgtgccaagcgagcttgccctgctcaaggccgtggacacatggagctggggagaacgagcaagccacgaggaagtcgagggcctggtcgaaaaaatccgatttcccatgatgctgccagaggagctgtttgaactccagtttaacttgtccctctattggtcccatgaagcattgtttcagaagaaaactctgcaggctctagagtttcacactgttccctttcaactgttagctaggtacaagggtctgaaccttactgaagacacatataagcctaggatctacacaagccctacttggtcggcattcgtcacagatagttcctggagcgcacgtaaaagccagctggtgtaccagtcacgcagagggcctctggtgaagtattcctccgactacttccaagctccctcggattaccgctactacccgtatcaatcttttcagaccccacaacacccgtcatttctatttcaggacaagagagtgtcctggagcctggtctatctacccactatacagtcttgttggaactatgggttcagctgttcctcggatgagcttccagttctggggctgacaaagtctggtggctcagaccgcacaattgcatacgaaaacaaagccttgatgctgtgcgaaggtctcttcgtcgctgacgtcacagacttcgaggggtggaaggcagcaataccaagcgctcttgataccaactctagcaagagtacatcctcatttccatgtccagccggtcattttaatggttttaggacagtgatccgccctttttatctcaccaattcctcaggagtggactag

SEQ ID NO: 228193 - DNA, 1722 bp, synthetic construct
  misc_feature 1..1722: note = Description of Artificial Sequence: Synthetic coding sequence
  source 1..1722: mol_type = other DNA
atgactccaccacgcctattctgggtatggcttctggttgctgggacccagggggttaatgatggggacatgcgactagccgatgggggtgctaccaaccaagggagagtagaaattttttatagggggcagtggggcaccgtatgtgacaatctttgggatctgacagacgcttccgtggtctgccgagctctcgggtttgaaaacgccacacaggccctggggagggcggcattcggacagggtagtggccctattatgctcgctgattgcaaatcgttaggttggctcaagagtaactgtcggcacgaacgtgatgctggggtggtctgcactaatgagaccagaagcacccacactctcgatctctctcgagagctcagcgaggctctcggccagatcttcgattctcaacggggttgtgacctgtccatcagtgtcaacgtccagggtgaagatgcccttggattctgcggacatacagtgatattgactgctaaccttgaagcccaggccctgtggaaagaacccggatccaacgtgacaatgagcgtggacgcagaatgcgtgccaatggtgcgtgacttgcttaggtatttctactccaggcgaattgacatcactttaagctcagtaaaatgtttccataaactcgcaagtgcatacggcgcaaggcagctgcaaggttactgcgcttccctgttcgcaatccttctcccccaggatccgtcatttcaaatgccactggacctgtacgcctacgctgtggcaactggcgatgccctgctggagaagttgtgtttgcaattcctagcgtggaactttgaggctctcacccaagcagaggcatggccaagcgtccctactgatctgctgcaactgctgctgcccagatcggatcttgcagtcccatcggaactggcattactcaaggccgttgatacctggtcatggggcgaaagggcctcccatgaggaagtggaaggacttgtcgagaagattagatttcctatgatgctgccagaggagttattcgagctccagttcaacttgtcattgtactggtcgcacgaggctctgttccaaaaaaagacactgcaagcattagagttccacacagtaccatttcagctgctcgcacgatataaaggcctgaaccttacagaagacacctacaaaccgaggatttacacaagccctacttggtccgcctttgtcaccgattcctcttggtcggcgagaaagagccagttggtgtaccagagcaggcgaggtccactcgtgaagtattctagcgattatttccaggctccgagcgattatcgttactatccataccagtccttccaaacaccgcagcatccctcatttctgttccaggataagagggtgagctggagcctcgtttacttaccaactattcagtcctgttggaactacggattctcctgctcaagcgatgagcttccggtactgggcttaacaaaaagcggcggatcagacagaactatcgcatacgaaaacaaggcgctgatgctctgtgagggtctgttcgtggcagacgtaacagatttcgagggttggaaagccgcaatcccatcagcgttagatactaactccagcaagtccacttcatcattcccttgccccgctggacacttcaatggctttcggactgtgatcagacccttttacctgactaactcaagcggggttgattag

SEQ ID NO: 228194 - DNA, 411 bp, synthetic construct
  misc_feature 1..411: note = Description of Artificial Sequence: Synthetic coding sequence
  source 1..411: mol_type = other DNA
atgtcaaatgtcccacataagagtagtttaccagagggcattcgccctggtactgtgctcaggattaggggccttgtccctcctaacgcatcacggtttcatgtgaaccttctgtgcggtgaggagcaaggttcagacgctgcactgcacttcaatccacgcctcgatacgtccgaggtggtgtttaatagtaaggagcagggaagttggggcagagaagagcgcggaccaggagtgccctttcagagggggcaaccattcgaggtgctgattattgcaagcgatgatggcttcaaagcagtcgtcggcgatgcacagtatcatcacttccgtcacaggctgcctctggctcgtgtgaggttagtggaggtcggcggagatgtgcagctggactcagtccggattttctag

SEQ ID NO: 228195 - DNA, 954 bp, synthetic construct
  misc_feature 1..954: note = Description of Artificial Sequence: Synthetic coding sequence
  source 1..954: mol_type = other DNA
atgatgctttccctaaataatttgcagaacataatttataacccggtcatcccgtttgtcgggaccatccccgatcagctggatccaggaactttaatagtcatccgtggtcacgtcccaagtgacgcagatcgcttccaggtcgacttacagaatggcagttctatgaagcctagggcggatgtggcttttcattttaatcctcgcttcaaacgggcaggctgtatcgtttgcaacacacttatcaatgagaagtggggaagggaggagatcacctatgatacccccttcaagagggaaaagtctttcgaaatcgtgatcatggtactgaaagacaaatttcaggtcgccgttaacggcaaacacactcttctctatggccacaggataggacctgagaaaattgatactctaggtatatacggtaaagttaacattcactccatcgggttttccttctccagcgacctgcaatctacccaagcttcatcccttgagctgaccgaaatcagccgggagaacgtgcccaagtctggtacaccccagctgcgactcccctttgctgcgagattgaacactcctatgggtcctggaaggactgtggttgtcaaaggagaggtcaatgcaaatgctaaatctttcaacgtggacctcctggcaggcaagagtaaggacatcgcgctgcatctaaatccacgtcttaacattaaggcctttgtgagaaatagtttcctgcaggagtcttggggcgaagaggaacggaatataacttcatttccattcagtcctggaatgtattttgaaatgatcatctattgcgatgtcagagagttcaaggttgccgtgaacggggtccactcactggaatataagcatcggtttaaagagctgagctccatcgacactctggagatcaacggcgacatccaccttctagaggtgaggtcgtggtag

SEQ ID NO: 228196 - DNA, 1080 bp, synthetic construct
  misc_feature 1..1080: note = Description of Artificial Sequence: Synthetic coding sequence
  source 1..1080: mol_type = other DNA
atgatgctgtctctgaacaatttgcagaacatcatctacaaccccgttattccgtttgtaggcacaatcccagaccaactcgaccctggtacgctgatagtgattagagggcacgtgccttccgatgcagaccgcttccaggtggatttgcagaatggctccagcatgaaaccaagggccgatgttgctttccatttcaaccccaggttcaaacgagctgggtgcatcgtgtgtaacactctcattaatgagaaatgggggagagaggagatcacatatgacactcccttcaagcgcgagaagagcttcgagatcgtgattatggtactgaaagacaaatttcaggtagcggtgaatggcaaacacactctgctttacggacaccgtattggcccagagaaaatcgatacccttggaatttatggcaaggtgaatatacactccatcgggttttccttctcttctgatctgcagagtacacaggctagttccctcgaactgaccgaaatctcacgcgagaatgtgccaaaatctggaacacctcagctgccttcaaacagaggcggtgatatatcaaagatagcacctcgcacagtgtacactaaatctaaggacagtaccgtaaatcataccttaacctgtactaagatcccccctatgaattatgtgagtaaacgcctgccctttgccgcacggctgaacaccccaatggggcctggcaggaccgtagtcgtaaaaggtgaggtgaatgcgaatgcaaaatcattcaacgtggacctgctagccggtaagagcaaggacatcgccttgcacctgaaccctcgcctgaatatcaaggccttcgtgcgcaactcctttctacaggagagctggggcgaggaagaaaggaatattaccagttttccgttctctccaggcatgtactttgagatgatcatttattgcgacgtgagggagttcaaagtagcagttaatggcgtgcacagtttggaatataaacatagattcaaagaactgagtagtattgacacattagagatcaatggggacatacacctgctagaagtgaggtcttggtag

SEQ ID NO: 228197 - DNA, 1077 bp, synthetic construct
  misc_feature 1..1077: note = Description of Artificial Sequence: Synthetic coding sequence
  source 1..1077: mol_type = other DNA
atgatgcttagtctgaacaatcttcaaaacataatctacaatcctgtgattcccttcgtgggcaccattcctgaccagctcgacccgggaacccttattgtgataagaggccatgtgcccagcgacgccgaccgatttcaagtcgatctgcagaatggaagctcgatgaagccaagagcggacgtcgcctttcacttcaatcctagatttaagcgagcaggctgtattgtgtgcaataccctgatcaacgaaaaatggggtagagaggaaattacatatgacactcccttcaaacgagagaaatccttcgagatcgttatcatggtactgaaagacaaatttcaagtggcagtcaacggcaaacatacactgctctacggtcaccggatcggacccgagaagattgataccctggggatctatgggaaggtgaatatacactctatcggattttctttcagttccgatctccaatccacccaggcttcttcactggaattaaccgagatatctcgggagaacgtcccaaagagcggaactccccagctgcgtctctctctgccttcatgggacctacagggccatggttctgagacattcaggtctgtactttggaccagagtctttgagatcgctttttgcagaccactgggtacagtggccagcttccagcgccttcccttcgctgctcgactgaatacccctatgggtccgggtcgtactgtggtggtgaagggcgaggtcaacgctaacgccaagtcctttaacgtggacctgctcgcgggaaagtcgaaagatatcgcactccatttgaaccctcgattgaatataaaagcctttgtccggaactctttcctccaagagtcctggggtgaagaggagaggaacatcacctccttccctttctctccaggaatgtatttcgagatgattatctattgcgatgtgcgagagttcaaggtggccgtgaatggggtccattctcttgaatataaacataggttcaaggaactgtcttctatcgacacactggaaattaatggggacatccatctgctggaagttcggagttggtag

SEQ ID NO: 228198 - DNA, 954 bp, synthetic construct
  misc_feature 1..954: note = Description of Artificial Sequence: Synthetic coding sequence
  source 1..954: mol_type = other DNA
atgatgttgagtttgaataacctgcagaatattatttataatcccgtcatcccctttgtgggaaccattcctgatcaattggatccagggactctgatcgtgattaggggccatgttccgtccgatgctgaccgctttcaggtcgacctccaaaacggcagttccatgaaacccagggcagacgtcgcatttcactttaaccctaggttcaaacgcgctggctgtatcgtgtgcaataccctcatcaatgagaagtgggggagagaggaaattacttacgatacaccttttaaacgagagaagagttttgagattgtgataatggtgctgaaagacaaattccaggtggccgtgaacggcaaacacaccctgctttatggccaccggattggacctgaaaaaatagatacgctaggaatctacggcaaagttaacatccatagcatcggattcagcttcagctccgatttacagtctactcaggcatcttcattagagctgaccgaaatctcccgcgagaacgtgccaaagagtggaacaccccagctgaggctgccttttgcagcacggctcaatacccctatgggacctggtagaacggtggtggttaaaggtgaggttaatgctaatgcgaaatcctttaatgtggacttgctggcaggaaagtctaaagacattgccttgcatttgaaccccagactgaacatcaaggcgttcgtccggaacagttttctgcaggaaagctggggtgaggaagagcggaatatcactagctttccgttctccccaggaatgtatttcgagatgattatatattgcgatgtgagggagtttaaggtggccgtcaacggggtgcatagcttagaatataaacatcgatttaaggaactctcgtctattgacacactagaaattaacggagatatacatttactagaagttcgcagttggtag

SEQ ID NO: 228199 - DNA, 627 bp, synthetic construct
  misc_feature 1..627: note = Description of Artificial Sequence: Synthetic coding sequence
  source 1..627: mol_type = other DNA
atgatgctatccctgaacaatctacagaacattatctataaccccgtgatcccttttgtcggtacgatcccagaccagctggaccctggaactctgattgtgatacgcggacacgtgccatcagacgccgatagatttcaggtcgacctgcagaacgggagttcgatgaagccacgggcagacgtggcttttcatttcaacccacgctttaagcgggctggatgtatcgtgtgtaacactctaatcaacgagaagtggggcagggaggaaatcacctatgataccccgttcaaacgtgagaaatcgtttgaaattgtcatcatggttttgaaggataagttccaggtagctgttaacggcaagcacacattattgtacggacacagaattggtcccgagaagatcgacactctgggtatctacggcaaggtgaatattcattctatcggattcagcttttccagcgatctgcagtctacacaagcaagtagtctcgagctgaccgaaatcagtcgggaaaatgtacccaagtctggcacccctcaactccctagtaacagagggggagacatctcaaagatcgccccacgcacggtttatactaaatccaaagatagcaccgtgtag

SEQ ID NO: 228200 - DNA, 903 bp, synthetic construct
  misc_feature 1..903: note = Description of Artificial Sequence: Synthetic coding sequence
  source 1..903: mol_type = other DNA
atgatgctgagcctgaataacctgcagaacatcatctataaccctgtgataccctttgtcggaaccattcccgatcagttggacccaggtactttaatcgtcattcgaggacacgttccatccgatgccgaccgcttccaggtggacttgcaaaatggtagctcgatgaagccaagggctgacgtggcatttcattttaatccaaggttcaagagagcaggctgcatcgtttgtaacacactgatcaatgaaaagtgggggagggaggagatcacctatgatacaccattcaagagagagaaaagtttcgaaatagtgatcatggtcctgaaggacaaattccaggtgccaaagtctgggacaccccagctgccctccaataggggcggtgatattagcaaaattgccccacggaccgtttataccaagagcaaggactctactgtgaaccacacattgacctgtactaagattcctcctatgaactacgtcagcaaacggctgccttttgcagcacggctgaacacccccatgggacccggtcgaacagtggttgtgaagggtgaagtgaacgcaaatgccaagtctttcaacgtcgacttattggccggaaagtccaaggatatagccctccacctgaaccccaggcttaatatcaaagcgttcgtgcgcaattcttttctccaggagagctggggcgaggaagagcgaaacataacaagcttcccattcagccctggtatgtactttgagatgattatttactgtgacgtgagggagttcaaggtggctgttaatggagtccattcgctcgagtacaagcacagatttaaggagctgtcatccatcgataccctggaaataaacggtgacattcatctgcttgaggtccggagttggtag

SEQ ID NO: 228201 - DNA, 1080 bp, synthetic construct
  misc_feature 1..1080: note = Description of Artificial Sequence: Synthetic coding sequence
  source 1..1080: mol_type = other DNA
atgatgcttagcttgaataaccttcagaatatcatatacaaccctgtgattccctttgtgggcactattcctgatcaacttgatcccggaactttaatcgtgatcaggggacacgtgcccagcgacgctgacagattccaagtggacctccaaaatggaagctccatgaaaccaagggcagacgtggcttttcacttcaaccctcgctttaagagggctggttgtattgtatgcaacactttgattaacgaaaagtggggacgggaagagataacatatgacacgccttttaagcgggagaaatcattcgagatcgtgatcatggtgctgaaggacaagtttcaggtggcagtcaacggcaagcatacattgctgtatggccacaggatcggcccagagaagatcgacacactcggcatctatgggaaggtcaacattcatagcatcggcttttctttcagttccgacttgcaaagtacccaggcatcctcccttgagctcaccgagatctctagagagaatgtcccaaaatctgggacaccacaactgcccagcaaccgcggtggagacatctcaaaaatcgccccacggacggtgtacaccaaatctaaagactctactgtcaaccacacgttaacatgtacaaagattccccctatgaactatgtctccaaaaggttgcccttcgccgctaggttgaacactcctatgggacctggacggaccgtggttgtcaaaggcgaggtgaacgccaacgccaagtcctttaatgttgatctcctggccggaaaaagcaaagacattgcactgcacctgaatcctcggcttaacattaaagctttcgttaggaactcattcctgcaagagtcttggggtgaggaggagagaaacatcacttcctttccattttccccaggcatgtacttcgaaatgatcatatactgcgatgtgagggaatttaaggtggctgtcaacggtgttcacagcctggaatacaaacacagattcaaggagctttcaagcatcgatactctcgaaatcaacggtgacattcatctactagaggtacgttcttggtag

SEQ ID NO: 228202 - DNA, 507 bp, synthetic construct
  misc_feature 1..507: note = Description of Artificial Sequence: Synthetic coding sequence
  source 1..507: mol_type = other DNA
atgatgctcagccttaataatctgcaaaatatcatatataacccagtaatcccttttgttggaaccatcccagatcagttggatcccggaaccttaatcgttatcagggggcacgtccccagcgatgcagatagatttcaggtggacctccagaacggttcatcgatgaagcccagagctgacgtcgcctttcattttaatcccaggtttaagcgtgccggatgcatcgtttgcaacacactgattaacgagaagtggggtcgggaagagatcacttacgacaccccattcaagagagaaaagagttttgagatcgtcatcatggtactgaaggacaaatttcaggtcgcagtgaacgggaagcatacgctcctttacggacacagaatcggcccagagaagatcgatacccttggtatttacggtaaagtgaatatacatagtatcggattctcgttctcctcagaccttcagtcaacacaggcatcttcacttgagctgacctag

SEQ ID NO: 228203 - DNA, 321 bp, synthetic construct
  misc_feature 1..321: note = Description of Artificial Sequence: Synthetic coding sequence
  source 1..321: mol_type = other DNA
atgatgcttagtctcaataatctgcagaatattatctacaaccctgttatcccattcgtaggtaccattccagaccaactggatcccggaacgttaattgtgattcggggacatgttccctctgatgccgaccgattccaagtggaccttcagaacggatcctccatgaagcccagagctgatgttgcctttcactttaacccccgtttcaagagggccggatgcatcgtgtgtaacaccctgattaatgagaagtggggtcgtgaggagatcacctatgacacaccctttaaaagggaaaagtcgttcgagatcgtctag

SEQ ID NO: 228204 - DNA, 1080 bp, synthetic construct
  misc_feature 1..1080: note = Description of Artificial Sequence: Synthetic coding sequence
  source 1..1080: mol_type = other DNA
atgatgctatcactcaataatctgcaaaatataatctacaacccagtcatcccatttgtgggtactattcccgatcagctcgaccccggaaccctcatcgtcatccgagggcacgtgccaagtgacgcagatcgctttcaggtggacctgcagaatggctcctctatgaagccaagggctgatgtggctttccacttcaatccgagatttaagagggctggatgtatcgtgtgcaacacattaatcaacgaaaaatggggcagagaagagattacatacgatacccctttcaagcgtgagaagagttttgagatcgtgatcatggttttgaaagacaagttccaggttgccgtgaacggcaaacataccctgttgtatggtcacagaatcggccctgaaaaaattgataccctcggcatctacggaaaagtgaatattcatagtatagggttttccttctcatctgacctgcagagcactcaagcctctagcctagagcttaccgaaatttcccgggaaaacgtccccaagagcggtacaccacagctgccctctaatcgcggaggagacatatctaagatcgccccacgtaccgtttacacgaagagcaaggacagtactgtgaatcacacattgacatgtaccaaaattcctccgatgaactacgtctccaagcgactcccgttcgcagctagactcaacacccccatgggaccagggaggaccgtggtggtcaagggggaagtgaacgcaaacgccaagtctttcaacgtggacttgctcgcaggcaagtccaaagatatagctttacacttgaacccaaggctcaatattaaggctttcgtccgaaatagttttctgcaagaatcctggggggaagaagaacggaatatcacatcgttcccattctcgcccggaatgtacttcgagatgatcatctattgcgatgtccgggaattcaaggtcgccgttaacggtgttcacagcctggagtacaaacacaggttcaaggaactaagtagcatcgatacacttgaaatcaacggagacatccacctcctggaggttcgcagttggtag

SEQ ID NO: 228205 - DNA, 954 bp, synthetic construct
  misc_feature 1..954: note = Description of Artificial Sequence: Synthetic coding sequence
  source 1..954: mol_type = other DNA
atgatgctgagtctgaataacctgcagaacattatatataatccggtgatccccttcgtcgggaccattcccgaccagctagatccgggtaccttgatagttatcaggggacacgtgccgagcgacgctgatcgattccaggtcgatctacagaacggctcctctatgaaaccaagagctgatgtggccttccacttcaaccccagattcaagagggccggttgtattgtttgcaacacccttatcaatgaaaaatggggtagagaggagatcacttacgacaccccattcaaaagagagaagtcttttgagatcgtgattatggtgttgaaggataagtttcaggtggccgtaaacggcaagcacaccctgctctacgggcaccgcattggtccagaaaaaattgacactcttggcatctacggcaaagtgaacatccatagtatcggtttttcattctcatccgacttacaatcgacccaagcgagcagtttggaactgaccgaaatctcccgggaaaatgtccctaaaagcgggaccccgcagctgcggctccccttcgccgcacggcttaatactccgatgggccctggtcgaacagtagtggttaagggggaggtcaacgcaaacgcaaagagcttcaatgtggatttgctcgccggtaaatccaaggatatcgccttacacctcaatcctcggctgaatatcaaagcttttgtccgaaatagcttcttgcaggaatcttggggggaggaagagcgaaatatcacatcatttccattttccccaggcatgtatttcgaaatgatcatttattgtgatgtccgggagttcaaggtagctgtaaacggagtgcattcgttagaatacaagcatcgctttaaggagctgtcttccatagacaccctggaaatcaacggagatatccatctcctggaggttcgtagctggtag

SEQ ID NO: 228206 - DNA, 1080 bp, synthetic construct
  misc_feature 1..1080: note = Description of Artificial Sequence: Synthetic coding sequence
  source 1..1080: mol_type = other DNA
atgatgctctcactgaataacttacagaacataatctacaatcccgtcattccctttgtgggaactatcccagatcagctagaccccggtactctgatagtcatcagaggtcacgttccttctgacgccgatcggttccaggtggacctacagaatggatcgtctatgaagcccagggcagatgtggccttccacttcaacccacggttcaagcgcgcaggatgtatcgtttgcaacaccctaatcaatgaaaagtggggaagggaggaaatcacatatgatacacccttcaaaagggagaagagctttgaaattgtaataatggtactgaaagacaaattccaggttgcggttaacggaaagcatacgctgctttatggccacagaattgggccagagaagattgacacgctagggatttacggcaaggtgaacatccacagtatagggttctctttcagctcagatttacagtctacccaggccagttctctcgagctgaccgagatctctcgggagaacgtaccgaaatccgggactccccagttacccagcaaccgcggaggagatatctctaaaatcgcacccagaactgtgtataccaagtccaaggactctactgtgaatcataccctgacgtgtacaaaaattccccctatgaattacgtcagtaaacggctcccctttgctgcaaggttgaatacaccgatgggccctggacgtacggtggtcgtgaaaggcgaggtgaacgccaatgcaaagagctttaatgtggatctgttagcgggaaaatcaaaggatatagcattacatctgaatcccaggcttaacattaaggcctttgtgagaaatagctttctccaggaatcatggggagaggaagagagaaacattacttcgtttcctttctctcctggaatgtatttcgaaatgattatttactgtgatgttcgagaattcaaggttgccgtgaacggagtacactcacttgagtataagcataggtttaaggagttaagctcaatcgataccctggagatcaatggcgatattcacctgctggaagtccgcagttggtag

SEQ ID NO: 228207 - DNA, 132 bp, synthetic construct
  misc_feature 1..132: note = Description of Artificial Sequence: Synthetic coding sequence
  source 1..132: mol_type = other DNA
atgatgctcagtcttaacaacctccagaatatcatctataaccccgtcatccccttcgtgggaacaatcccggaccagctggatcctgggacgctgatcgtaatcagagggcacgtaccatccgatgcatag

SEQ ID NO: 228208 - DNA, 972 bp, synthetic construct
  misc_feature 1..972: note = Description of Artificial Sequence: Synthetic coding sequence
  source 1..972: mol_type = other DNA
atggctttctcaggctctcaggccccttatctctcccctgctgtgccattttcagggactatacagggcggactccaagatggactacagatcacagttaatgggacagttctctcgagtagcgggacccgctttgcagtgaacttccagacaggattcagcggtaacgacattgccttccactttaaccctaggtttgaagacggcggatatgtggtttgcaacactcgacagaacggtagctggggccctgaggagcggaaaacacatatgccctttcagaagggcatgccttttgacttgtgcttcctggtgcaatcatctgatttcaaagtgatggtgaacggaattctgtttgtgcaatacttccatcgggtgccttttcaccgggtggatacaatctccgttaatggcagtgtccagctgagctatatctcattccagccaccaggggtttggcccgctaatcctgcaccaattacacaaacagtgatccatactgtgcaatccgcccctggccagatgttctctacgcctgccattcctcccatgatgtatccgcaccctgcgtacccaatgccattcataactaccatcctcggtggtttgtatccaagcaagtccatacttctttcaggtaccgtactgcccagcgcgcagcgttttcacataaacctctgctctggcaaccacatcgcatttcatctgaatcctcgatttgatgaaaacgcagtcgttagaaatacgcagatcgataacagttggggttctgaggagcggagtctgccacgcaagatgcccttcgtccgcggacagagcttttccgtctggatactctgcgaggcccactgtctgaaggttgctgtggacgggcagcacctgtttgagtattatcatcggttgcggaacctgccaaccataaaccgcctggaggtgggcggtgacatccaactcacacacgtgcagacctag

SEQ ID NO: 228209 - DNA, 936 bp, synthetic construct
  misc_feature 1..936: note = Description of Artificial Sequence: Synthetic coding sequence
  source 1..936: mol_type = other DNA
atggcgttctccggttcccaggccccatacctctccccagcagtgcccttctcaggaaccattcagggcggtctccaagacgggttacagatcaccgtcaatgggacagtactctcctcaagcggaactaggttcgccgtgaacttccagaccggtttctccggaaacgatattgcctttcactttaaccctagattcgaggatggcggttacgtcgtctgcaacactcgtcagaacggcagctggggacctgaggaacgcaaaacccacatgccttttcaaaaaggaatgcctttcgatctgtgttttctggtgcaatcttctgacttcaaagtcatggtgaatgggatcctgtttgtgcaatactttcaccgagtgccttttcaccgcgtcgacactatttccgttaatggatctgtacagctttcttacatctcctttcagacacagactgtaatacacacagtgcagtccgcccctggacagatgttctctacccccgctatcccacctatgatgtacccccaccctgcttaccccatgcccttcatcaccacaatcctcggagggctgtacccttctaaaagcattctgctatcaggcaccgttctgccgtccgcccaacggtttcacattaacctgtgcagtggcaaccacatcgcatttcaccttaatccacgctttgatgagaatgcggtcgtcaggaatacgcaaattgacaatagttggggcagcgaggaacgatcactgcccaggaagatgccgtttgttcgcggacaatccttcagcgtgtggatcctgtgcgaggcccattgtcttaaggttgcagtcgacgggcaacacttgttcgaatactaccaccgcctcaggaatctgcctacgattaataggctggaggtgggtggcgacatccagctgacccatgtgcaaacctag

SEQ ID NO: 228210 - DNA, 741 bp, synthetic construct
  misc_feature 1..741: note = Description of Artificial Sequence: Synthetic coding sequence
  source 1..741: mol_type = other DNA
atggcctttagtggatctcaggcgccatacctgtcccccgcagtccccttcagcggaaccattcagggcggtctacaggacggccttcagatcacagtgaatggcacagtcctctcctcttccggcacgcggttcgcagtaaattttcagactggattcagcggcaacgatatcgcctttcacttcaaccccagattcgaggatgggggatacgtggtgtgtaacacaagacagaatggaagctggggtcccgaggagcgaaagacgcatatgcccttccagaaggggatgcccttcgatctctgctttttggtacagagctcagacttcaaggtcatggttaacgggatcctgttcgtgcaatacttccacagagtgcctttccatagagtggatacaatttcggttaacggatctgtgcaactctcctacatttccttccagcctcccggtgtctggcctgcaaatcccgctccaatcacgcagactgtaatacataccgtgcaatctgctcctgggcaaatgtttagcacccctgctatcccgccaatgatgtaccctcaccccgcttacccaatgccattcattaccaccatcctggggggtctttacccatcaaagagcattctgctcagtgggaccgtgctcccatcagcccaacggtgtgggagctgcgtaaaactgaccgctagcagatggccatggatggtttcaacatgcctgaatacgacaatagcctag

SEQ ID NO: 228211 - DNA, 1068 bp, synthetic construct
  misc_feature 1..1068: note = Description of Artificial Sequence: Synthetic coding sequence
  source 1..1068: mol_type = other DNA
atggccttctctggatcacaggctccgtatcttagtccagccgttccttttagcgggaccatccagggcggtctacaggacggattacagataaccgtcaacggcacagtgctcagtagcagtggaactcgcttcgccgtgaactttcagactggattttccgggaatgatattgctttccattttaatcctcgctttgaagatgggggatacgttgtgtgcaacacaaggcagaatgggtcctggggacctgaagaacgtaagacacatatgcctttccaaaagggcatgccattcgatctctgttttttggtacagtcctccgactttaaggtgatggtcaacgggatccttttcgttcaatatttccaccgtgtcccctttcaccgggtggacacaatcagcgtgaatggaagcgtacaattgtcatacatctccttccaaaacccgaggaccgttcctgtgcaacctgccttctctactgtgcccttttctcagcccgtctgtttcccccctaggccaagagggcgacgtcagaagccccctggggtgtggccagccaatcctgcacccattacccagactgtcattcacacagtgcagagcgccccaggtcagatgttctccacccccgctatcccacctatgatgtacccccatccggcatacccgatgccctttattaccactattctggggggactttatcctagtaagtcaattctactgtctggcaccgtcttgccttccgcgcagcgatttcacatcaatttgtgtagtggtaaccacattgcatttcacctcaacccacgctttgatgaaaacgctgtggtgagaaacacccagatcgacaactcttgggggagtgaagagcgttcactaccaaggaaaatgccattcgtgcgcggtcagtccttctcggtatggatcttgtgtgaggcacactgcctaaaagtagctgtggatggacaacatctatttgaatactaccaccgcctccgaaacctgcccacaataaacaggctggaagtcgggggagacattcagcttacccacgtccagacttag

SEQ ID NO: 228212 - DNA, 666 bp, synthetic construct
  misc_feature 1..666: note = Description of Artificial Sequence: Synthetic coding sequence
  source 1..666: mol_type = other DNA
atgggcccattctccgctcctgttgagcccgatggaggatatgtcgtttgcaacactaggcagaacggctcgtggggacctgaggagcgcaagacacacatgccgttccagaaaggtatgcccttcgatctttgtttccttgtgcagtccagtgatttcaaggtaatggtgaacggaatcttattcgtgcagtatttccatcgcgtgccatttcatcgggttgataccatctcagtgaacggctcagtacaattatcctacattagctttcagaaccccaggactgtgccagtccagcccgcattttcaacagttcctttttcacagccagtgtgcttcccgccaagacctaggggccgtcgccagaagcctcctggcgtctggcctgcaaatcccgctcctataactcagaccgttatccacacagtgcagtccgccccaggccagatgttctctacccctgctattccccctatgatgtacccccatcctgcttatcccatgccttttatcactacaatcttggggggactttaccccagcaagagtatattgttgagcggcacagtgctcccttctgcccaacgatgtggctcatgcgtcaaattaaccgcctctcgctggccctggatggtgagtacttgtctgaacaccaccatcgcatag

SEQ ID NO: 228213 - DNA, 360 bp, synthetic construct
  misc_feature 1..360: note = Description of Artificial Sequence: Synthetic coding sequence
  source 1..360: mol_type = other DNA
atggccttttccggtagtcaggctccatacctctctcctgcagtcccattttcagggacgatacaaggcggactacaggacggactccagatcacagtaaacggaaccgtgttgtcatcgtctggtacgcgcttcgccgtcaattttcagacaggcttttcgggcaacgatatcgcttttcattttaatcctcggtttgaagatggtggatacgtcgtatgtaacacccgccagaatggctcttggggcccagaagaacgcaaaactcatatgccgttccagaagggcatgcctttcgacctgtgttttctcgtacaatcatctgacttcaaagtgcacctgcttcttctactactctag

SEQ ID NO: 228214 - DNA, 1533 bp, synthetic construct
  misc_feature 1..1533: note = Description of Artificial Sequence: Synthetic coding sequence
  source 1..1533: mol_type = other DNA
atggctggatcgaggcagagaggcctgagggccagagtgcggccactgttctgtgctctgttgctttccttgggccgtttcgtgagaggagacggtgttgggggagacccagcagtggcactcccacatcgcagatttgagtataagtactccttcaaaggaccacatctcgttcaatctgacggcaccgtacccttctgggcccacgcaggcaacgcgatcccgtcttctgaccagatacgtgtggccccttccctgaaatcacagcggggtagcgtttggaccaagaccaaagccgcattcgagaactgggaagtggaggtgacttttagggtgactgggagggggaggatcggcgcagatgggcttgccatttggtacgccgagaaccagggacttgagggaccagtctttggatcggctgacctgtggaatggcgtgggaattttctttgattccttcgacaacgacgggaaaaagaataatccagcaatcgtaatcatcgggaataacggccagattcactacgatcaccagaacgatggtgctagccaggccctagcatcctgtcagcgggattttcgtaacaaaccgtatcctgtgcgggcaaagataacttattatcaaaacaccctgactgttatgataaacaacggcttcacgcctgataagaacgactacgagttctgtgccaaagtggagaacatgattattccagcccagggacactttgggatctcagcagcaaccggtggactggctgacgatcacgacgtcttatccttcctcacattccagctgactgaacctggtaaggagcctccaactcccgacaaagaaatatccgagaaagaaaaggagaagtaccaggaggaatttgagcactttcaacaggaactggataaaaagaaggaagagtttcagaaggggcatcccgaccttcagggccagcctgcggaagaaattttcgaaagcgtgggagaccgagagctgaggcaggtattcgaggggcaaaacaggatacaccttgaaatcaagcagctgaacaggcaactggatatgatactggacgagcagcgacgctatgtgagttccctgacggaagaaatatctaaaagaggggctgggatgccgggacagcacgggcagatcacacagcaggagcttgataccgtcgtgaaaacccagcacgaaatcctgcgacaggtgaatgagatgaaaaacagcatgtctgaaactgtgcgactggtatccggtatgcagcaccccggttctgcagggggagtgtatgagaccactcagcacttcattgacatcaaggagcacttacatatcgtaaagcgggacattgacaatttagtccagagaaacatgcccagcaatgagaagcctaaatgccccgaactgcctccatttccaagctgcctttcaaccgtccatttcattatcttcgtagtagtccagactgtactatttatcggctatataatgtaccgctcacaacaagaagccgctgccaagaagtttttctag

SEQ ID NO: 228215 - DNA, 1101 bp, synthetic construct
  misc_feature 1..1101: note = Description of Artificial Sequence: Synthetic coding sequence
  source 1..1101: mol_type = other DNA
atgcaaccactgtggctgtgttgggccctgtgggtgttacccctggcctcaccaggagcggctcttaccggtgagcagttgctggggtccctgttgcgacaactacagctgaaggaagtccctacgttggatcgcgctgacatggaggaacttgtgattccgacgcatgtcagggctcagtacgttgctctcctgcagagaagccacggcgataggtctagaggaaaaaggttcagccagtcattccgggaagtagcaggccgtttcctggcccttgaagcatccacccatcttcttgtgtttggcatggaacagcgactgcccccaaacagcgaacttgtgcaggcagtcttgcgactgtttcaggagcctgtacccaaagctgcactgcaccggcatggtagactgagccctcgcagcgctcgcgctagagtcacagttgagtggctccgggtacgtgacgacgggagcaatagaacctccctgatcgattcccgcctggtctctgtccacgaatcagggtggaaagcctttgacgtgactgaagctgtgaatttttggcaacagctgtcacgcccacgccagcctctcctcttgcaagtgtcggtgcagagagaacatctcggaccattagcctcaggtgcacacaaattggtgaggtttgcatctcagggtgccccagccggactgggcgaaccccagctggagctgcataccctcgacctgggagactacggggctcaaggggattgcgaccctgaggcaccgatgactgaggggaccaggtgctgccgccaagaaatgtatatcgaccttcaagggatgaaatgggctgagaactgggtgctggagcctcccggattcctggcttatgagtgcgtgggcacgtgtcggcagccgccagaggcccttgccttcaagtggccatttctgggcccaagacagtgtatcgcttccgaaacagactccctccctatgattgtgagtatcaaagagggcggacgaacaagaccccaggtggtgagtctgcctaacatgcgtgttcagaaatgttcatgtgcaagcgacggcgctttggtgccaaggcgtctgcaaccctag

SEQ ID NO: 228216 - DNA, 1101 bp, synthetic construct
  misc_feature 1..1101: note = Description of Artificial Sequence: Synthetic coding sequence
  source 1..1101: mol_type = other DNA
atgtggccgctgtggctgtgctgggccttatgggtgctcccattggcaggcccaggcgctgcactgactgaagagcagctcctcggaagcctcttaagacagcttcagttgtccgaggtgccagtgttagacagggctgacatggaaaagcttgtcataccagcccacgtgagagcgcaatatgtggtgctcttgcgaagaagccatggcgatcggtcccgcggaaaacgcttcagccaaagctttcgagaagtggctggccgattcctcgctagtgaggcaagcactcacctgttggtctttgggatggagcaacgcttacccccaaactccgagttggtacaggcagtgctgcgactgttccaggagccagtgcccaaggcggctttgcaccgtcacggcagactcagccccaggtctgcccaggccagagtgactgtggagtggctgcgagttcgggatgatggttccaatcggacatctctgatcgatagtcgcctagtgtctgtccacgaatcagggtggaaggcgtttgatgttacagaggccgtcaacttttggcagcagctgtctcgacctagacagcccctcctcctacaggtgagcgttcagagggagcacctcggcccacttgcgagtggtgcccacaaactggttcgatttgcaagccagggagcgccagccggtctcggcgaacctcagcttgagctgcacacactggatttacgggactatggcgctcaaggggactgtgatccagaggccccaatgactgaaggaacaaggtgctgcaggcaggagatgtacatcgacctccaggggatgaagtgggccaagaattgggttctcgagccccctggattcctcgcatacgaatgtgtcggcacttgtcagcaacctccggaggcgctggcattcaattggccatttcttggcccacggcagtgcatcgcctcagagactgcttccctgcctatgatcgtgtccattaaagaagggggacggacaaggccacaggttgtgtcattgcccaacatgcgcgttcaaaaatgctcatgtgcctctgacggcgctctggtgccgaggaggcttcagccttag

SEQ ID NO: 228217 - DNA, 999 bp, synthetic construct
  misc_feature 1..999: note = Description of Artificial Sequence: Synthetic coding sequence
  source 1..999: mol_type = other DNA
atgtggcctctgtggctgtgctgggcactctgggtattacccctcgccggtcctggcgctgctttaacagaagagcagctcctgggcagccttctgagacaactacagttgtctgaggtcccggttctcgaccgagcagacatggagaaacttgtcataccagcccatgtccgggctcaatacgtggtgctgctgagacgaagccacggcgacaggtcgagggggaagcggttttctcagtcatttagggaggtcgccggacggtttttagcgagcgaggccgcactgcacaggcacggcagattgtcccctcgctctgcacaagcccgagtgaccgtcgagtggctgcgggtcagggatgacggatccaatcgaacatctctaattgactcaagattggtttctgtgcatgaatctggctggaaggctttcgacgtcactgaggctgtcaacttttggcaacagctctccagaccaagacagcctcttctgttgcaggtgtctgtgcagcgagagcatctgggacctctcgcatccggagctcataaactggtgcggttcgcgtcccagggagccccagctggattgggcgagcctcagctcgagctccataccctagatctgcgtgactatggagcgcagggggattgcgaccccgaggcacctatgacagagggaacccggtgctgtcgacaggagatgtacatcgacctccaagggatgaagtgggctaaaaactgggtacttgaacccccaggcttcctggcatatgaatgcgttggaacatgtcagcagccacccgaagctcttgcatttaattggccatttctgggaccacggcagtgtattgccagcgaaacagcctccctgcctatgatcgtgtccatcaaggaaggcggaaggacaagaccccaagtggtttccctgccaaacatgagagttcaaaagtgttcatgtgcgtctgatggggcactggtgcctaggcggctgcagccttag

SEQ ID NO: 228218 - DNA, 1131 bp, synthetic construct
  misc_feature 1..1131: note = Description of Artificial Sequence: Synthetic coding sequence
  source 1..1131: mol_type = other DNA
atggtctggaaggtagctgtgttcctgtcagtggcgctaggtattggcgcagtcccaatcgacgatcctgaggatgggggaaagcattgggtggttatcgtcgcaggaagcaatggctggtacaactaccgtcaccaagcagatgcctgccatgcttaccagattatccataggaacgggataccagatgagcagattgtggtaatgatgtatgacgatatcgcttactccgaggataacccaacgccaggcatagtgattaaccgccctaatggaaccgacgtttaccagggcgtccctaaagattacaccggggaagatgtgacaccccagaattttctggcagttctacggggagacgcagaagcggtcaaaggcatcggcagtggcaaggtgcttaaatcaggaccacaggatcatgtgtttatttactttaccgatcatggtagcacaggtattctggtctttcctaacgaggacctgcacgtgaaagaccttaacgagaccatccactacatgtacaaacataaaatgtatagaaaaatggtgttctatattgaagcctgcgaaagcggctcaatgatgaatcacctacccgataacatcaacgtgtatgccaccactgccgctaacccacgggagagtagctacgcgtgctattacgatgagaaacgtagtacatacctgggcgactggtattcggttaattggatggaagactcagatgtagaggaccttactaaggagactctgcacaaacagtatcacctcgtcaagtcccataccaacacttcccacgtgatgcagtacggcaacaagacaatctccacaatgaaggtcatgcagtttcaaggaatgaaaagaaaggcttccagccctgtgcctttgcctcctgttacacaccttgatcttacaccttcccctgatgttcccctgactattatgaaacgcaaactgatgaacactaacgatctggaagagagcaggcagttaacagaggagattcagagacatttggattacgagtacgctttacggcatttatatgtactggtaaacctctgcgagaaaccctacccgctgcacaggattaaactcagcatggatcatgtctgtctcgggcactactag

SEQ ID NO: 228219 - DNA, 1119 bp, synthetic construct
  misc_feature 1..1119: note = Description of Artificial Sequence: Synthetic coding sequence
  source 1..1119: mol_type = other DNA
atggtgtggaaggtcgcagttttcctctctgttgccctcggtataggtgccgtccctattgatgaccctgaagatggcggaaaacactgggttgtaatcgtggccggatctaacggctggtacaattaccgccaccaggccgacgcatgccatgcttaccaaattatccaccggaacgggatccccgacgagcaaattgtagtgatgatgtacgatgacatcgcatactcagaggacaatccaacgccgggaatcgtcatcaacagacctaacggcaccgacgtgtaccagggggtgccaaaagattataccggcgaggatgtcacgccccaaaacttcctcgctgtgctgaggggcgacgctgaggccgttaagggtattggaagcggaaaggtgctaaagtctggtccacaggatcatgtgttcatttattttacggatcatggaagtacaggaatcctcgtatttcctaatgaagatctacacgtgaaggatctcaatgagaccattcattacatgtacaaacataagatgtaccgcaagatggtcttctacattgaggcatgcgaatcaggatcaatgatgaatcacctgcccgacaacatcaatgtatatgccactacagcagccaaccccagggagagcagctacgcatgttactacgacgagaaaagatctacctatctgggcgattggtatagcgtgaactggatggaagacagcgatgtcgaagatctgaccaaagagacgctccacaagcaatatcacctggtgaagtcccataccaacacctcccatgtgatgcagtacggcaacaagaccatttccaccatgaaagtcatgcagtttcagggcatgaagcgaaaggcgtcgtcacctgttccattgccgcctgtgacccatctggacttaacaccatctccagatgtgcctctgaccattatgaagaggaaattaatgaacacaaatgaccttgaggagtccaggcagctgaccgaagagattcagcggcatctcgacgataagatagtgcacgggccacgagtgccatggtccctgcttaagagctgtcttctggaggcctttcctagcgtctcagcacctcccaccgtctgttag

SEQ ID NO: 228220 - DNA, 1302 bp, synthetic construct
  misc_feature 1..1302: note = Description of Artificial Sequence: Synthetic coding sequence
  source 1..1302: mol_type = other DNA
atggtgtggaaggtcgcggtgttcctgtcggtagctctggggattggggcagtcccaatcgatgatcccgaagacggcggtaagcactgggtcgtgattgtcgcaggcagcaatgggtggtataattatcgccatcaggctgatgcttgccatgcctatcagatcatacatagaaatgggatccccgacgagcagatcgtcgttatgatgtatgacgatatcgcttatagcgaggacaacccaacaccagggatcgtcatcaacaggcctaacggcactgatgtgtatcaaggtgtgcctaaagattataccggtgaggatgtaaccccgcagaactttttagccgtgctgcggggtgacgccgaagctgtcaaaggaatcgggtcaggcaaggtcctcaagagtgggccacaggaccacgtgtttatttacttcaccgatcatggttccacaggtattttggtgttcccaaacgaggatttgcacgtgaaagacctgaacgagacaattcactacatgtacaagcacaagatgtacaggaagatggtcttttacatcgaagcgtgcgaaagtggctccatgatgaaccacttacctgataatataaacgtctacgcgaccacagccgctaatcccagagagtcttcctacgcctgctattacgatgaaaagcgctcaacctatctaggggactggtacagtgtaaactggatggaggatagtgacgtggaggatctcaccaaggagacattacacaagcagtaccatctagtaaagtctcatacaaataccagccacgtgatgcaatacggaaacaagaccatttctacaatgaaagttatgcagtttcagggcatgaagagaaaggcgagttctccagtgcctctgcctcccgtcacgcacctggatctcactccttcaccagatgtccctctgactataatgaaaagaaaactgatgaacacaaatgatttggaggagtctcgacagctgacagaagaaatccaaagacatctcgatgccaggcatctcatcgagaagtctgttaggaagatcgtgtccctgctcgcagcgagcgaagccgaagtggaacagttgctgtctgaaagagcgcctcttactggacatagttgttatccggaagcgctgttgcacttccgcacgcactgtttcaactggcactcaccgacctacgaatacgctctgcgtcacttatatgtgttagttaacctctgcgagaagccctacccattacatcgcattaagctgtctatggatcacgtgtgcttaggtcattactag

SEQ ID NO: 228221 - DNA, 1302 bp, synthetic construct
  misc_feature 1..1302: note = Description of Artificial Sequence: Synthetic coding sequence
  source 1..1302: mol_type = other DNA
atggtgtggaaggtggcagtttttctctccgtggccctgggcattggtgccgtcccgatcgacgatcctgaggacgggggtaaacactgggtggttattgtggcaggctcaaacggttggtataattatcgacaccaggcggacgcttgtcatgcttaccagatcattcaccggaatggaatccctgatgagcagatagtggtgatgatgtacgacgacatcgcttactctgaagacaaccctacccccggtatcgtgatcaataggcccaatggcacagatgtataccagggcgtccccaaggattatactggtgaagacgttacaccccagaatttcctagccgtcttgcggggtgacgccgaagccgtgaaaggtattgggagtgggaaggtccttaagagtgggcctcaggatcatgtgttcatctactttacagatcatgggtctacaggcatccttgtcttcccaaacgaggacttacatgtgaaagacctgaacgagactatacactatatgtacaaacataagatgtatagaaagatggtgttctacatcgaggcctgcgaatccggctctatgatgaatcacctgcctgacaatattaacgtttacgccactaccgctgcaaacccccgagagagttcctacgcctgctactatgacgaaaagaggtccacatacctcggggattggtatagtgtgaactggatggaggactcggacgtggaggatctcaccaaagaaacgcttcacaagcagtaccatcttgtgaagagtcatacaaataccagtcatgtgatgcaatacgggaataaaactatctctactatgaaggttatgcagttccaggggatgaagcggaaggccagttcaccagtgccccttcccccagtaacccacctcgacctgacccccagtcctgatgtccctcttaccattatgaagagaaagctgatgaacaccaatgatctcgaggagagcagacaattaaccgaagaaatacagcgccatcttgatgcacgtcatttgatagagaagtccgtgagaaagatcgttagtttgcttgcagcaagcgaagcagaagtggaacaactgctgtcagagagagctccattaactggtcatagttgctatcctgaagctctgcttcacttccgcacccattgcttcaattggcatagcccaacttatgagtatgccctgcggcatctgtacgtattggtgaacctctgtgagaagccatatcccttgcatcgcattaagctgtctatggaccatgtttgcttggggcactactag

SEQ ID NO: 228222 - DNA, 1197 bp, synthetic construct
  misc_feature 1..1197: note = Description of Artificial Sequence: Synthetic coding sequence
  source 1..1197: mol_type = other DNA
atggtttggaaggtggctgttttcctctctgtcgctctgggaattggtgccgtaccgatcgacgacccagaagacggaggaaagcactgggtcgtgatagttgccggtagtaacgggtggtataattatagacaccaggcagacgcatgtcatgcataccagatcattcaccggaacggcatacccgatgagcagattgtggtgatgatgtacgacgtgacgcctcagaatttcctggctgtcttaaggggagatgctgaggcagttaagggaataggcagcgggaaggtgctcaagtccggtcctcaagaccacgtcttcatctatttcacagaccacggctcaaccggaatcctcgtgtttcctaacgaagacctacacgttaaggatctgaatgaaacaatacattatatgtataagcataaaatgtatagaaagatggtgttttatattgaggcatgtgaatctgggtccatgatgaatcacttgccagataatatcaatgtctatgctaccacggctgccaacccacgcgagtcctcttatgcttgctactatgacgagaagcggtccacttaccttggggactggtatagcgtgaattggatggaggatagcgatgtcgaggatctgactaaggagactctgcacaaacagtatcatctggttaagagtcatacgaatacttctcacgtgatgcagtatgggaacaagacaataagtacaatgaaagtgatgcaatttcaggggatgaaacggaaggcctcctcgcccgtgccactgccacctgtcactcacctggacctgaccccatctcccgatgtgcctcttaccattatgaagagaaagctgatgaacacgaatgacctcgaagaaagccgtcaactgaccgaggaaattcagcgccacctggacgcaagacacctaattgagaaatccgtgagaaagattgtgtcactcttggccgcatctgaggctgaggtcgaacagctcttgtctgagagagccccacttaccggacatagctgttatcccgaggccctgttgcatttcagaacccattgtttcaactggcactcacccacatacgagtacgcactgagacacctctacgtgctggtgaatctgtgtgagaaaccttatcctctacaccggattaagctgtccatggaccacgtttgcctcggtcattactag

SEQ ID NO: 228223 - DNA, 1233 bp, synthetic construct
  misc_feature 1..1233: note = Description of Artificial Sequence: Synthetic coding sequence
  source 1..1233: mol_type = other DNA
atggtgtggaaagtggcggtgttcctgtctgtggcgggatcaaatggctggtacaattacagacaccaggccgatgcatgtcacgcgtatcaaatcatccatcggaatggtattccagatgaacagatcgtagttatgatgtacgatgacattgcttattctgaggacaaccctacgccgggaatcgttatcaatcgccctaacggcaccgacgtttatcagggcgtgcctaaggactacaccggagaagatgttacaccccagaacttccttgcggtgctacgaggcgacgcggaggccgtgaaaggcatcggctcgggaaaagtgcttaagagcggaccacaggaccacgtgtttatttactttaccgaccatggctcaaccggcattctcgtgtttccaaacgaggacctgcacgtgaaagatcttaacgaaactatacactacatgtataaacacaagatgtacaggaagatggttttttacattgaggcctgtgagtctggaagcatgatgaaccatctgccagacaatatcaacgtgtatgcgactaccgccgctaatcccagagagtccagctacgcttgttattatgatgaaaaacgcagtacttatctgggagactggtacagcgtgaactggatggaagattctgatgtagaagatctgactaaggagactctccataaacaataccatttggtgaagtcacataccaatacatcccatgtaatgcagtacggaaataagaccatcagcaccatgaaggtgatgcagtttcagggtatgaagcggaaagcatcctctccagtgcctctcccccctgtgactcacttggacttgacaccatcccccgacgtgccactgactatcatgaaaaggaaactgatgaacacaaacgacctggaagagtccagacagctgacagaagaaatccagcggcatttagacgccagacatctgatcgaaaagagcgtgcggaaaatcgtcagcctgctggcagcgagtgaggccgaggtagaacagttgctgtccgagcgtgctccccttactggtcattcatgctaccccgaagcattattgcacttccgaactcattgttttaactggcactcacccacatacgaatatgcgctacgccatctgtacgtcctcgtcaacctgtgcgagaaaccttatcctttacatagaatcaagctttcaatggaccatgtgtgtctaggccattattag

SEQ ID NO: 228224 - DNA, 174 bp, synthetic construct
  misc_feature 1..174: note = Description of Artificial Sequence: Synthetic coding sequence
  source 1..174: mol_type = other DNA
atggtgtggaaggtggccgtgttcctgagcgtggccctgggaataggagccgtccccatcgacgacccagaggatggaggcaaacactgggtcgtaatcgtggccggttccaatggatggtataattacaggcatcaagctgatgcttgtcacgcctaccagatcatacattag

SEQ ID NO: 228225 - DNA, 60 bp, synthetic construct
  misc_feature 1..60: note = Description of Artificial Sequence: Synthetic coding sequence
  source 1..60: mol_type = other DNA
atggtttggaaggtagccgtctttctgtccgtggctctgggtattggggctgtcccctag

SEQ ID NO: 228226 - DNA, 177 bp, synthetic construct
  misc_feature 1..177: note = Description of Artificial Sequence: Synthetic coding sequence
  source 1..177: mol_type = other DNA
atggtgtggaaggtggctgttttcctgtcagtcgcccttgggatcggagctgtcccaattgacgatcccgaggacggaggcaaacattgggtagtcatcgttgcgggtagcaatgggtggtacaattatcgacaccaggcggatgcttgccatgcctatcaaatcatccaccgctag

SEQ ID NO: 228227 - DNA, 237 bp, synthetic construct
  misc_feature 1..237: note = Description of Artificial Sequence: Synthetic coding sequence
  source 1..237: mol_type = other DNA
atggtttggaaggttgcggtctttctgtccgttgccctgggcattggagcagttcctatcgatgatcccgaagacggcggaaaacattgggttgtcatcgtcgccggtagtaacggttggtataactacaggcaccaggcagatgcctgtcacgcgtatcagattatccaccggaacggtattcctgacgagcagattgtggtgatgatgtatgacgatattgcctactctgaatag

SEQ ID NO: 228228 - DNA, 237 bp, synthetic construct
  misc_feature 1..237: note = Description of Artificial Sequence: Synthetic coding sequence
  source 1..237: mol_type = other DNA
atggtttggaaggtggcagtgttcttgtctgtggcactcggcattggagcagttcctattgacgacccggaggacgggggaaagcattgggtcgttatcgttgcgggaagcaacggctggtacaattaccggcaccaggccgacgcttgccatgcttaccagatcattcatcgtaacggaatcccggacgagcaaatcgtagtcatgatgtacgacgacatagcatactctgaatag

SEQ ID NO: 228229 - DNA, 2736 bp, synthetic construct
  misc_feature 1..2736: note = Description of Artificial Sequence: Synthetic coding sequence
  source 1..2736: mol_type = other DNA
atggcagccgcagctgcttcggcaccccagcagctgagtgacgaggagctcttctcccagcttcgcaggtatggcctgtcaccgggtcctgtcactgaatctacccggcctgtttatctgaagaaactgaagaaactccgagaggaagaacagcagcaacatcgaagtggaggcaggggcaataagacacggaacagcaataacaacaacaccgccgctgccacagtggcagccgctggccctgctgccgctgcagctgcaggaatgggtgtgcgaccagtgtcgggcgatctgtcttatctccgcactcctggcggactgtgtcgcatctccgcatccggtccggaatcactccttggcggaccaggtggcgcatccgcggcacccgctgccggtagcaaagtgctgcttgggttcagtagcgacgagtccgacgttgaggcctccccgagggatcaggccggagggggaggacgcaaggatcgggcatctcttcagtaccgaggcctgaaagcacccccagctccattggcagctagtgaggtgactaactccaacagtgccgaaaggcggaaacctcactcgtggtggggtgctagaaggccagcaggcccagagctccagacacctcccggtaaggatggagccgtcgaggacgaagagggcgagggggaggatggtgaggagcgcgaccctgaaacagaagagccattgtgggcaagccggaccgtaaatggctctagattggtaccatattcctgccgtgaaaactatagtgattccgaagaagaagacgatgatgatgttgccagtagtcgccaggttctgaaagacgactcacttagtcgacaccggccacggagaacccacagtaaaccactgccccctctgaccgctaaaagtgcaggtggtcgcctcgaaacttccgtgcagggaggtggaggcctcgcaatgaatgatagggccgcagctgcgggatctctggacagatcgaggaacctcgaggaggcggcagcagctgagcagggtggcggatgcgaccaagtggatagtagccccgtaccgagatatagggtaaatgctaagaagctgacaccgctgcttcctccaccactcacggatatggattccacacttgacagctcgaccggctctctgctgaaaactaataaccacatcggagggggtgccttttccgtggattcccctcggatttacagtaactctctgccaccatcggcggctgttgccgcttcctctagtctgcgtatcaaccacgccaatcacactggctcaaatcatacatatctgaaaaacacctataacaagccaaagctatcagagcccgaagaagagcttcttcagcagttcaaaagggaggaggtttctcctactggatccttcagtgctcattacttgtcaatgtttctgctgaccgccgcatgtctgttctttttgattctggggttgacctacctaggaatgaggggcactggggtcagcgaggatggagagttgtccattgaaaatcctttcggggagacatttggaaagatccaggagagcgaaaagactctgatgatgaataccttgtataagctccatgacagactggcccagctagccggtgaccatgagtgtggcagcagctctcagcgtactctttcagtgcaggaagcagcagcatacctgaaggacctgggaccggaatacgaaggcatttttaacacctcgcttcaatggatcctggaaaacggtaaagatgtgggcattcggtgtgttggctttggtccagaagaggaactgacaaacatcacggacgtccagttccttcagagcaccagaccacttatgtccttctggtgtcggtttaggcgtgcgttcgtgactgttacccatagactgctgctcctgtgcctcggcgtggtgatggtgtgcgttgtgctccgatatatgaaataccgctggaccaaagaagaagaagaaaccaggcaaatgtacgatatggtggtgaagatcattgatgtgttgcggagtcacaatgaggcatgccaggagaataaggacctgcagccatacatgccaataccccatgtgagggactcccttatacaacctcatgacagaaaaaagatgaagaaggtctgggacagggctgtagacttcctggccgctaatgaatcacgggtcaggacagaaacccgcaggatagggggtgcagatttcttggtctggagatggatccagccatccgcatcttgtgacaaaatattggtcatccctagtaaggtctggcagggccaggctttccatctggatcggagaaacagtccaccgaacagcctcaccccatgccttaagatccgaaacatgttcgatccggtgatggagatcggcgatcagtggcacctggctattcaggaggcaattcttgagaagtgctccgataatgacgggatcgtccacatcgccgtggataagaacagcagagaaggctgtgtgtatgtcaagtgcctctctccagaatacgccggaaaggccttcaaggccctgcatgggtcatggttcgacggcaagctagtcactgtcaaatatctcaggttggatcgctatcaccatcgatttcctcaggcactgacctccaatacccctctgaaaccgtccaacaagcacatgaacagtatgtcacacctccgactgaggaccggtctgaccaactctcaaggttcgtcctag

SEQ ID NO: 228230 - DNA, 4512 bp, synthetic construct
  misc_feature 1..4512: note = Description of Artificial Sequence: Synthetic coding sequence
  source 1..4512: mol_type = other DNA
atgccgggtccacccgctctgcgtcgacgactcctgctccttctgctcgtgctgcttatcgccggttccgcaggagcagctccacttccacagactggagcgggagaggccccacctgccgctgaagtcagctccagtttcgtgatcctttgcgtgtgctctctgattatcctgattgttctgatcgcaaattgtgttagctgctgtaaggacccagagatagacttcaaagagtttgaggataatttcgatgacgaaattgacttcactcctcccgcagaggacacccctagtgtacagtcaccagctgaggtgttcaccctgtctgtcccaaacattagtctgccagccccatcacagtttcagccgagcgtcgagggcctgaaatcccaagtggctcgtcattctcttaactatattcaagaaatcggtaacggatggttcgggaaggttctactcggtgagatctataccggcacctccgtagcccgtgttattgtgaaagagctgaaagcctccgccaaccccaaggagcaggacactttccttaaaaacggcgagccctattatattctgcagcaccctaacattctgcaatgtgtggggcagtgtgttgaggccatcccttatttgctggtgtttgagttttgcgacttgggggatcttaaagcttaccttagaagcgaacaggagcacatgcgtggcgattcgcagacaatgctgctccaaagaatggcttgtgaggtcgccgctgggctggccgctatgcacaaactgcactttttgcattcggatttagccctccggaattgttttcttacctcagatttgaatgttaaagtgggagactacggaatcggatttagtcgttataaggaggattacattgagaccgacgacaagaaggtgttccccctaaggtggacagccccagagctcgtgacttccttccaggatcgtttgctgactgcagatcagacaaaatatagcaatatttggtccctcggagtaactctctgggagctgtttgacaacgccgcacaaccatactctaacctgagcaacttggacgtcctgaatcaggtgatccgcgaaagagacaccaagctcccaaagccacaactcgagcaaccatattccgaccgctggtatgaagtgctccaattttgttggttgtctccagaaaaacgcccagccgcagaggatgttcatcgactcctgacgtacctgagattgcaaagccagcgtgattccgaagtggactttgaacaacagtggaacgctctgaagccaaacaccaattctagagattcaagcaataacgcggctttccctatccttgatcacttcgccagagatcggctgggaagagaaatggaagaggtcctgactgttacagaaacttctcagggcctgagcttcgaatacgtgtgggaggccgctaaacacgaccacttcgacgagagatcaagaggtcacctggatgagggcctaagctacacctccatcttttaccccgtcgaggtgtttgaatcatccctctccgacccaggcccagggaagcaggacgactccggccaggatgttccccttcgtgtgccaggagtggttcccgtcttcgacgctcacaacttgagcgtgggatctgactactacatccagcttgaagagaagtccgggagtaatctggagctggattatccgcctgcactgttgactaccgatatggataacccagagaggaccggccctgaactgagccagctcaccgccctgcgttctgtggagttagaggagtccagcacagacgaggattttttccaaagttcaacagaccctaaagacagctccttacccggtgacctccatgtgactagtgggccagagtctcccttcaataatatcttcaacgatgtcgacaagagtgaggaccttcctagccatcagaagatcttcgatttaatggagcttaatggagttcaggcggactttaaaccagccacactgtcttcgagtctggataatcctaaggagtccgtgattaccggccattttgaaaaggaaaagcctcgtaaaatcttcgacagcgagcctttgtgtctctccgacaacttgatgcatcaggataattttgatccacttaacgtgcaggaacttagtgaaaatttcctattcctgcaggagaaaaatcttttgaaaggcagcctgagttccaaagagcacattaacgatctgcagactgagctgaagaatgctggctttacagaggctatgttggaaacgtcgtgccgcaattccctggatacagagctgcagttcgccgagaataaaccgggactgtcacttcttcaggaaaacgtaagcaccaaaggagatgataccgacgtgatgcttacaggcgacactctcagcacatccctgcagagctcgcccgaagtccaagttccacccacaagtttcgaaactgaggaaacccccagaagggtgcccccagattcgctccctacccagggcgagactcaaccaacgtgcttagatgtgatcgtgcctgaggattgcctgcatcaggacatttcccctgatgccgtgactgtgcccgtcgaaatactgagcactgatgctcgcacacattcgctagataaccggtcccaggacagtccaggcgagagcgaagaaacgcttagactaaccgaatccgacagcgtcctggctgacgatatcctcgctagccgcgtgtccgtgggaagctctctgcctgaactgggccaggaactccacaataagcccttcagcgaggaccaccactcccacaggcgcctggaaaagaatctggaagctgtcgaaacgctgaaccagcttaactccaaggacgccgctaaggaggctgggctggtcagcgctcttagctccgactcaacaagccaggactccctgctggaggactcactgtctgctccttttcctgcatccgagccaagtctcgagacaccagactcactagagagcgtggacgttcacgaagccttgctagattctctgggatctcatacacctcagaagctagtgcctcctgataagcctgctgactccggctacgaaaccgaaaatctggaaagcccggagtggactctgcatccagcaccagaaggaaccgctgactccgagccagctactactggtgatgggggacactctggtttgcctccgaaccctgtcatcgttatctcagacgcaggcgacggacacagaggaacagaggtcacaccagaaacatttaccgcgggttcccagggtagctaccgcgactccgcatacttctcggataacgactcagagcctgagaaaaggagcgaagaagttcctgggaccagcccgagcgcgctggtcctggtgcaggaacagccactacctgaacctgttctgccagagcaaagccctgctgcacaggactcctgcttagaggcacggaagtcccaaccagacgaaagctgccttagtgctctgcataacagttccgatttggaactgcgcgctactcccgagccagctcagaccggagtgccccaacaagtgcatcctacagaggacgaggcgtcaagcccttggtccgtactgaacgccgaactgagcagtggggatgacttcgagacccaggacgatcgtccatgcacattggccagcactgggaccaacacaaacgagctcttggcatacacaaatagtgccttggataaatccctctcctcgcattctgaggggccaaagctgaaagaaccagacattgagggtaagtacctcgggaagctcggcgttagcggtatgctagatctgtctgaggacggtatggatgcagatgaggaagatgaaaactcagatgattcagatgaggacctccgcgcttttaatttgcactctttatcatctgagtctgaggacgagactgagcatcccgtgcccattatactttccaacgaggacggacggcatctgcgcagcctgctgaagcccaccgctgctaacgcccctgatcctctgcccgaggactggaaaaaggagaagaaggcagtgactttttttgacgacgtgaccgtttatctcttcgatcaggagacgccaacaaaagagttgggcccatgtggaggcgaagcctgtggccctgatttgtcgggccctgcccctgcctctggcagtccctatctctccaggtgtatcaacagtgagtcaagcacggatgaagaggggggtggctttgaatgggatgacgattttagccccgatccctttatgagcaaaacgacctctaacttactgtcctctaagccttccctgcaaacatctaagtacttctctccgccaccaccggcaaggagtaccgagcagtcgtggccacattcagccccttactcgagattctccatatcccccgcaaacatcgcctccttctcgctgacccatttaaccgattccgacatagagcagggaggttccagcgaggacggtgaaaaagattac

SEQ ID NO: 228231 - DNA, 186 bp, synthetic construct
  misc_feature 1..186: note = Description of Artificial Sequence: Synthetic coding sequence
  source 1..186: mol_type = other DNA
atgcaaccacgaactcagccactggcgcagactctccctttctttctcggcggagcaccgagagacaccggactacgtgtacccgttataaagatgggaaccgggtgggaaggctttcagcgcacccttaaggaggtggcctatatcctgttatgctgctggtgcatcaaagagttgctagactag

SEQ ID NO: 228232 - DNA, 186 bp, synthetic construct
  misc_feature 1..186: note = Description of Artificial Sequence: Synthetic coding sequence
  source 1..186: mol_type = other DNA
atgcagccccgaacccagcccctcgcacagaccctgccattcttcttgggcggagcccctcgagatacaggcctaagagtgcccgtgataaaaatggggacaggatgggagggttttcagcgcactctaaaggaggtcgcttacatactgttatgctgctggtgtattaaagaattattagactag

SEQ ID NO: 228233 - DNA, 522 bp, synthetic construct
  misc_feature 1..522: note = Description of Artificial Sequence: Synthetic coding sequence
  source 1..522: mol_type = other DNA
atgtatagcttcatggggggtggactcttttgtgcatgggtcggtaccatcctgctggtggtggccatggctaccgatcactggatgcagtatcggctgagcggctctttcgcacaccagggactctggaggtattgtctcggaaataagtgttatcttcagactgactctattgcttattggaatgccacacgggctttcatgatcctcagcgcactctgtgcgatctctgggataatcatgggaatcatggcattcgctcaccagccaactttcagcagaataagcagacccttctcagctggcatcatgttcttcagctccacactctttgtcgtgctcgctctagccatctatacaggcgtcacggtgagctttctcgggagaaggttcggtgattggcgtttctcttggtcttacatcctgggctgggtcgccgtgctaatgaccttcttcgccggaattttttacatgtgtgcctatcgcgtgcatgagtgtcgtcggctcagcacccctagatag

SEQ ID NO: 228234 - DNA, 681 bp, synthetic construct
  misc_feature 1..681: note = Description of Artificial Sequence: Synthetic coding sequence
  source 1..681: mol_type = other DNA
atgcctggcggtcctggggtgcttcaggctctgccagctaccatctttttactcttcctgttgagcgccgtgtacctcggcccagggtgccaagccctatggatgcataaggtgcctgcctcactgatggtgagccttggcgaggacgcccactttcaatgcccccacaatagcagcaacaacgctaacgtgacctggtggagggtgctgcacggtaactatacatggccccctgagtttctgggccctggggaagatcccaacggcacactaatcatccagaacgttaacaaatcacacggcggtatctacgtatgtcgggtgcaggagggcaacgagtcctaccaacagagttgcggcacttatttgcgggtgaggcaacctccccctagacccttcctcgatatgggggaagggactaagaatcggattatcacagcggaggggatcattctactcttttgcgctgtggtccccggaacactgctgctgtttagaaagcgctggcagaatgagaagctgggcctggatgcaggggacgaatatgaagacgaaaacctctacgaaggtctgaacttagatgactgttcaatgtatgaggacatcagccgaggtctacaggggacataccaggacgtggggtcactgaacattggagatgtgcagctggagaaaccatag

SEQ ID NO: 228235 - DNA, 2001 bp, synthetic construct
  misc_feature 1..2001: note = Description of Artificial Sequence: Synthetic coding sequence
  source 1..2001: mol_type = other DNA
atggccgacatggaagatctctttggctccgatgcagattctgaagctgaacgcaaggattccgattccggctctgattccgactcagaccaagagaacgccgcatcaggctccaacgctagtgggtctgagtctgaccaagacgaacgtggcgactccggacagccctctaataaagagttattcggcgatgatagcgaggacgaaggtgcatcccaccacagcgggtctgacaaccacagtgaaaggagtgataacaggtcagaggcttccgagagatccgaccacgaagataacgatccctctgacgtcgaccaacatagcggtagcgaggccccaaatgacgacgaggatgaggggcataggagcgatgggggatcacatcacagtgaagctgaaggatcagagaaggcccattccgatgacgaaaaatggggccgagaagacaaatcagaccagagtgatgacgaaaagatacagaactcggatgacgaggaaagagcccagggctctgacgaagataagctgcagaactcagacgatgatgaaaagatgcaaaatactgatgatgaagaacgacctcaattgtctgatgacgagcggcagcagctgtcagaagaagagaaggcaaactccgacgacgaacggccagtggcgtcagacaatgacgatgaaaagcagaactccgacgacgaagagcaaccccagcttagcgacgaagagaagatgcagaactcagacgacgaaaggccacaagctagcgacgaggaacatagacatagcgacgacgaggaggagcaggatcataagtcagagagtgcacgtgggtccgactcagaggacgaggtgctaaggatgaaacgtaaaaacgctattgcctcggactccgaggctgacagtgataccgaagtccctaaagataattcaggaaccatggaccttttcggcggtgccgacgacatttcttccggcagcgacggcgaagataagcccccaacacccggacagcctgtggacgagaacggactccctcaggatcagcaggaggaggagccaattcctgaaacccggatcgaggtggaaatccctaaagtcaatacagacttgggtaacgacctctattttgtcaagctccccaacttcctgtcggtagaacctcggccatttgacccacagtattacgaagacgagtttgaggatgaggagatgcttgatgaagaagggcgtactaggctaaaacttaaggtagaaaacaccataaggtggagaatccgtcgggatgaagagggtaatgaaataaaggagagcaacgcccgtattgtgaagtggtccgatggaagcatgtccctgcacctgggcaacgaggtgtttgatgtgtataaggccccactccagggggatcacaaccatctgtttatacgacagggaaccggcctacagggtcaggccgtctttaaaacaaagttgacttttaggcctcattcaacggactccgctacccaccgaaagatgaccctgagcctggctgataggtgtagcaaaacacagaaaatcagaatcctgcctatggctggcagagatccagagtgccaaaggactgagatgatcaaaaaagaggaagaacgactgagagcaagcattaggagagaatctcaacagaggagaatgagggaaaagcaacaccaacgaggattgagtgcaagctaccttgaacctgaccggtacgacgaggaagaagaaggagaggagtcgatctccctggcggcaatcaaaaataggtacaaaggcggtatccgcgaggaacgtgctagaatatacagctctgatagtgacgaaggatccgaagaagacaaagctcaacggctccttaaggctaaaaagcttaccagcgatgaagagggagagccatccgggaagagaaaggctgaggatgatgataaagcaaacaaaaagcacaaaaagtacgtcatctctgacgaagaagaggaggacgacgattag

SEQ ID NO: 228236 - DNA, 1821 bp, synthetic construct
  misc_feature 1..1821: note = Description of Artificial Sequence: Synthetic coding sequence
  source 1..1821: mol_type = other DNA
atggccgacatggaagacctgttcggaagcgacgctgactcagaagcagagcggaaggattctgacagcggctccgacagcgattctgatcaggaaaacgcggcatccgggtccaatgcctctggctccgagtctgaccaagatgagagaggcgattccggtcagccgtcaaacaaagaattgtttggcgatgattctgaggacgaaggcgcttcccatcactccggctctgataatcactctgaaaggtctgataaccgatcagaggcttcagaacggtcggatcatgaagataatgacccctccgacgtggatcaacatagtggctcagaggccccaaacgatgacgaggatgaagggcacagatctgatgggggaagtcaccacagtgaggcagaaggatcggagaaggcgcattcagatgacgaaaagtggggcagggaggacaaaagcgatcagagcgatgatgagaaaatccaaaacagtgatgacgaggaaagggcccaggggagtgacgaagacaaactgcaaaattctgatgacgacgagaagatgcagaatacggacgacgaggaaagacctcagctctctgacgatgagcggcaacagctgtctgaggaagagaaagccaacagtgacgatgagaggcccgttgcgtccgacaacgatgacgagaaacagaattccgacgacgaggagcaaccacagttgagtgacgaagaaaaaatgcaaaattccgacgatgagcgtcctcaggcatccgacgaagagcaccggcacagtgacgatgaggaggagcaggatcacaaatctgagtcggcccgaggtagcgacagcgaagacgaggttctccgcatgaaaaggaagaatgctatcgcctcagactcagaggctgacagcgataccgaggtaccaaaggataattctggaacgatggacctgtttgggggagccgacgacatttcttcagggtctgacggagaagacaaaccaccaacacctggccagcccgtggatgagaatgggctgcctcaggatcaacaggaagaggagccaattccggagacccgtattgaagtggaaataccaaaggtgaataccgatctggggaacgatctttacttcgtcaagctgcccaactttctttccgtagaaccatccatgtctctccaccttggaaatgaagtcttcgatgtgtacaaggccccactgcaaggtgatcataaccatctctttatacgacagggaaccggattacaaggacaggctgtgtttaagactaagctgacattccgcccacactcgaccgactcagctacacatcggaagatgaccctgagccttgcggatcgttgctcaaagacacagaaaattcggattctacctatggccggacgtgacccggaatgccaaagaaccgagatgattaagaaggaggaagagaggcttcgcgcttccatcagaagggagtcccagcaacgcagaatgcgggagaagcagcaccagcgcggtctgagtgccagctatcttgagcccgacaggtacgatgaggaggaagagggggaagaaagcatttcgcttgcagcaattaaaaaccggtataaaggcggtattcgggaggaaagagccaggatctatagttccgactctgacgaaggaagtgaggaagataaggctcagagactgctaaaagctaagaagcttacttctgacgaggagggggaaccctcaggaaagcgtaaagccgaagatgacgacaaagcaaataagaaacataaaaagtacgtaatcagcgacgaagaagaggaggatgatgattag

SEQ ID NO: 228237 - DNA, 1935 bp, synthetic construct
  misc_feature 1..1935: note = Description of Artificial Sequence: Synthetic coding sequence
  source 1..1935: mol_type = other DNA
atggctgatatggaggacctgttcggctccgacgccgattcagaggctgagcgtaaagactctgacagcgggagcgattccgattccgaccaagagaatgccgcaagcgggtcaaacgcgagtgggtccgagtcggaccaggatgagagaggagatagtggtcagcccagcaataaggagctcttcggagacgatagtgaggacgaaggagctagccatcacagcggttcagacaatcacagtgagcggtccgacaacagatcggaagcaagtgagcgaagtgatcatgaggacaacgatccctcagacgtggaccaacactccggatctgaggctcctaacgatgacgaagacgaaggccacagatctgatggtggatcacatcattccgaggctgaggggtccgaaaaggcccacagtgacgacgaaaagtgggggcgtgaagacaagtcggatcagtcagatgacgagaagattcaaaacagtgacgacgaagaaagggcccagggatcagacgaagataaactccaaaatagtgacgacgacgagaaaatgcaaaatacagatgacgaggaaaggcctcagctgagcgatgatgagcgacagcagttaagcgaagaggagaaggcaaacagtgatgatgaaagaccagtggcctctgataatgatgatgacgatgagcggccacaggcatccgatgaagagcacagacactctgacgacgaagaggaacaagatcataagtcagaatccgcgagagggtccgactccgaagatgaggtgctcaggatgaaaaggaagaacgcaatcgcctcagatagtgaagcagatagtgacaccgaggtgcccaaagacaacagcggcacgatggatctgtttggtggcgctgatgatatttctagtggctcggacggagaggataagcctcctacacctggacagcccgtagatgaaaatggcttacctcaggatcagcaggaggaggaacccattcccgagactcgcattgaagtggagattccaaaagtgaacacggacctcggaaacgacctttactttgtgaaattgccaaatttcctcagcgtggagccacgtcccttcgacccgcagtactatgaagatgaatttgaagacgaagaaatgctggatgaggagggcaggacgagactcaagctgaaggtggagaataccattcggtggcgaatcagaagagacgaggagggcaacgaaataaaggaatcaaacgccagaatagtgaagtggagcgatgggtcaatgtctctccatctcgggaacgaggtttttgatgtctacaaggctccgctgcagggtgaccataatcacctctttatccgtcaaggcaccggattgcagggccaggccgtttttaaaacaaagcttacctttagacctcactcgacggattccgccacacacaggaagatgaccttgtctttagctgaccgctgctctaagacccagaagatcaggatactaccaatggccggtcgggaccctgaatgccaacggactgaaatgattaaaaaggaggaagaaaggctgcgagcatcaattcgtcgagagtctcagcagagacgcatgcgggagaaacaacatcagagaggtctctccgccagctacctcgaaccagaccggtacgatgaagaagaagagggtgaggagagcattagcctcgccgctataaagaatcggtataagggagggatccgggaggaaagggctcggatttacagcagcgattccgacgaagggtccgaggaggacaaagcgcagcgcttacttaaggccaaaaaactgacctctgatgaggagggcgaaccttcgggtaagcgcaaggccgaagatgacgacaaagccaataaaaagcataaaaaatatgtgatctccgacgaagaggaagaggacgatgactag

SEQ ID NO: 228238 - DNA, 2127 bp, synthetic construct
  misc_feature 1..2127: note = Description of Artificial Sequence: Synthetic coding sequence
  source 1..2127: mol_type = other DNA
atgcgtgagcgtatttgggcaccccctctcctgctgctgctgccactgctcttacccccaccactgtggggtggccctcctgattctccgagacgtgaactcgagctcgaaccaggccctctccagccattcgaccttctgtacgcctccggagcggctgcctattactccggcgactatgagagagccgtgcgcgacctcgaagcagccctccgaagccatagacgattgcgggaaatacggacacgttgtgcgcgacactgcgctgcgagacaccctctgcccccacctcctcccggtgaaggccctggtgcggaactcccactgttccgctccctgctgggcagggccagatgctatcgctcctgcgaaacacagaggctaggcggaccagcatcaagacatagggtcagcgaagatgttcgctcagatttccagcgcagggtgccatacaactacttgcagagagcctatataaaattaaatcagctggagaaggccgtggaggccgcacacaccttctttgttgccaaccccgagcatatggagatgcagcagaatattgagaattaccgcgcaacagcaggagtggaggccctgcaacttgtagaccgcgaggcgaaaccacacatggagagttataacgcaggcgtcaaacactacgaagctgacgattttgagatggccattaggcactttgaacaggcattacgggagtatttcgtagaagataccgaatgtcggactctttgtgagggaccccagagatttgaggagtatgaatacctgggatataaggcgggtctgtacgaggccatcgcggatcactacatgcaggtcctggtctgtcagcacgaatgcgtgagagagctagcgacacgccctggcaggctgtcccccattgaaaacttcctaccacttcattacgattatctccagtttgcttattatagggttggagaatacgtgaaggctcttgagtgtgccaaggcatacctgctgtgccaccctgatgacgaagacgtgctagataacgtggactattacgagtcactcctggatgattctattgaccctgccagtatcgaagcccgtgaggatctaacaatgttcgtaaagaggcacaagctcgagtctgaacttatcaagtctgcggctgaagggcttggtttctcatacaccgaacctaattactggatcaggtacggcggaagacaggatgagaacagagtcccttcaggtgtcaatgtcgaaggcgcagaagtccatggattcagcatgggaaagaaactgtctccaaaaattgaccgggacctgcgagagggcggtcccctgctatatgagaatatcacattcgtttataattccgagcagctcaacggcacccagcgggttctgttagacaacgttcttagtgaggaacagtgtagggagttacacagtgtcgcctctggaattatgttggtgggagacggctatagaggcaagacatctccgcacaccccaaacgagaaatttgagggcgctacagtgctgaaagccctcaaatctggctacgaggggagagtgccgttaaagagtgcgaggctgttctatgatatctccgagaaggcgaggagaatcgtcgaaagctactttatgctgaatagcacactatacttttcctacacgcacatggtatgtcgaaccgccctctccggacagcaggacagacggaacgatctgtcccacccaattcacgccgacaactgtttgttggacccagaagctaacgaatgctggaaagaacctccagcctacactttccgtgactacagcgctcttctgtacatgaacgacgactttgagggcggagagtttatattcactgagatggatgcgaagactgtgacagcatccatcaagcctaaatgtggcaggatgatatcattctcttccggtggggagaacccacacggcgtcaaagctgtgaccaaaggcaagcgatgcgcagtcgctctgtggtttacgctcgaccctctctacagagaactggagcggattcaggccgacgaggtgatcgccattcttgatcaggagcagcagggaaaacacgaattgaacatcaatcctaaagacgaactctag

SEQ ID NO: 228239 - DNA, 1584 bp, synthetic construct
  misc_feature 1..1584: note = Description of Artificial Sequence: Synthetic coding sequence
  source 1..1584: mol_type = other DNA
atggagatgcaacagaatatagagaactatagagcaacagctggcgtcgaagcactccagttggtcgatagagaggccaaaccacacatggagtcatacaatgctggcgtgaagcactacgaggcagatgactttgaaatggcaattcgacatttcgaacaagctctgcgtgaatactttgttgaagatacagaatgccgaactctatgtgagggccctcagagatttgaagagtatgagtatctgggctacaaagctggactgtatgaagcgatagcggatcactacatgcaagtgttggtatgtcagcatgagtgcgtcagggaactggcaacccggcctgggcgtctcagcccgatcgagaacttcctccccctccattatgattacttacagttcgcttattacagggtgggagagtacgtgaaggctctggagtgcgccaaagcctaccttctttgccaccctgatgatgaagacgtcctggataatgtggactactatgagtccttactggacgactctatagatccagcatccatagaggctcgagaagatctgactatgttcgtgaaacggcacaaattagaatcagagctaatcaaatcagccgctgagggactgggcttctcttacacggagccaaactattggatcagatatggaggcagacaggacgagaaccgggttccaagtggcgtgaacgtggagggagctgaggtgcatggctttagcatgggtaaaaagttatctcctaagatcgatcgcgaccttcgggaaggcggacctctcttgtacgagaatatcacattcgtgtacaacagtgagcagctaaatgggacacaaagagtgcttttagataatgtcctttctgaagaacagtgtcgggaactccactctgtggcttctggaatcatgctggtgggcgatgggtacaggggaaagaccagtccacacacgccaaacgagaagttcgagggggctaccgttctgaaggcacttaaatccgggtacgaaggcagagtacccctgaaatccgccagacttttctatgacatcagtgagaaggccagacgtatcgtcgagagctactttatgctgaattccacgttatacttctcatacacgcacatggtgtgtcggacagctttgagcggtcaacaggatagaaggaacgatttatctcaccccatccatgccgacaactgcctcctggacccagaggccaacgaatgctggaaggaaccaccagcatacaccttccgggattatagcgctttgttatacatgaacgatgacttcgagggtggagagttcatctttacagaaatggacgcgaaaacagtgaccgcgagcataaaacctaagtgtggcaggatgataagtttctcctccggaggagaaaatccccacggggtaaaagctgttactaagggaaaacgatgcgccgttgcgttatggttcacgttggaccccttgtaccgcgaactggagagaattcaggccgatgaggtgatcgccatccttgaccaggagcaacaagggaaacatgagctaaatatcaacccaaaggatgagctctag

SEQ ID NO: 228240 - DNA, 2721 bp, synthetic construct
  misc_feature 1..2721: note = Description of Artificial Sequence: Synthetic coding sequence
  source 1..2721: mol_type = other DNA
atgatttgtcagaagttctgtgtcgtgctcctccattgggagttcatctacgtcatcaccgccttcaatctgagctacccgattacaccttggcgattcaagctgtcgtgcatgcctcccaactcaacgtacgactactttctactgccagccggactgagcaagaatactagtaactccaacgggcattacgagaccgccgtggaacctaaatttaacagttcaggtacgcacttcagcaacctgtctaaaactacatttcactgctgtttccggtccgaacaagaccggaattgctccctttgcgcggacaatatcgagggcaagaccttcgtaagcactgtaaacagcctggtctttcaacaaattgacgccaactggaacattcagtgttggctaaagggagacctgaagctgttcatttgctacgtggaaagtctcttcaagaatctgtttcgcaattataattataaggtccacctcctgtacgttctcccagaggtgctggaagactcccccctcgtgcctcagaagggtagcttccagatggtacattgcaactgctctgtgcatgagtgttgcgaatgtctggtacctgttcctactgcaaaactgaacgacaccttactgatgtgcctgaaaatcacgtccggcggtgtcattttccagtcccccttgatgtccgtgcaacccattaatatggtcaagccagacccacctctcgggctgcacatggagattactgacgatggtaacctcaaaatctcttggtcgtcgccacccctggtcccctttccactgcagtaccaggtgaagtactctgaaaactccaccaccgttatcagggaggctgacaagatcgtaagcgccacatctttgctggtagattcaatcctgcctggatcttcttatgaggtgcaggtaagaggcaaaagacttgacggacctgggatatggtctgattggtccacacccagagtgttcactacccaggatgtgatttacttcccacctaaaatattgacttctgtgggctcaaacgtatctttccactgtatctacaaaaaagagaacaagatcgtgccttccaaggaaattgtttggtggatgaacctggctgagaagattccccaaagccagtacgatgtagtgtctgatcatgtttccaaggtcactttcttcaatttgaacgaaacaaagcctagaggtaagtttacatacgatgctgtgtattgttgtaatgagcacgaatgtcatcatagatacgcagagttgtacgtcattgacgtgaacattaatatttcttgtgagacagatggctatttgactaaaatgacctgtcgctggagcacctccacaattcagagtttagctgaatccactctgcagcttagataccatcgttcctcactgtactgttctgatattcccagcatccacccaatttcagagccaaaggactgttacctccaaagcgatggtttctatgaatgcatctttcagcctatctttctactcagcggttacacaatgtggattcgcattaatcattccttgggatctttagatagtcctcctacctgtgtgctgccagattcggtcgtgaagcccctcccaccaagtagcgtgaaagccgagataaccattaacatcggtctactgaagatatcttgggaaaaaccagtgttcccagagaacaacctgcaatttcagattcggtatggtttatcgggcaaagaggttcagtggaaaatgtatgaggtctacgacgccaaatcaaaatccgtgagcctgccagtgccagacctttgcgcagtatacgcagtccaggtgcggtgtaaacgcctagacgggctcggatattggtctaattggagcaatcccgcttataccgtcgttatggatatcaaggtgcctatgcgaggtccagaattctggagaatcatcaacggagataccatgaaaaaggagaaaaacgtgaccctcttgtggaagccgctgatgaaaaacgattcgctgtgctctgttcagcgttacgtaattaaccatcacaccagctgtaacggcacctggagtgaggatgtagggaatcacacgaagttcaccttcttgtggaccgagcaagcccacactgtgacagtgctggcgattaattccatcggagcatcagtggccaacttcaatttgacttttagttggcccatgtccaaggtgaatatagtccagtccctttctgcctacccactgaattcctcatgcgttatcgtgagctggatcctgtctccctccgattacaaactgatgtacttcattattgaatggaaaaacctgaatgaggacggagagataaagtggcttcggatttccagttcagtcaagaaatattacatccatgatcacttcattccaatcgaaaaataccagttctccctgtaccccatcttcatggagggcgtggggaagcccaagataattaattcattcacccaagatgacatcgaaaagcaccagtccgatgctgggctttacgtaatcgttcctgtgatcataagcagctctatccttcttctgggaaccttgctgattagtcaccaacggatgaagaaactgttctgggaggatgtgcctaacccgaaaaattgttcgtgggcgcagggcctgaattttcagaaaaagatgccaggaactaaggaattgctcggcggaggctggttgacctag

SEQ ID NO: 228241 - DNA, 3498 bp, synthetic construct
  misc_feature 1..3498: note = Description of Artificial Sequence: Synthetic coding sequence
  source 1..3498: mol_type = other DNA
atgatctgccagaagttttgcgtcgtcctgttacactgggaatttatatacgtaataactgcatttaacctgagctaccctataacgccatggcgatttaaactcagctgcatgcctcccaactcaacctacgattactttctgctccccgcagggttgtcgaaaaatacgtccaactcaaatggtcattacgaaaccgcagtggagcctaagttcaattcatccggcactcactttagcaatttatctaaaacgacctttcattgttgcttccggagcgaacaggaccggaactgttccctatgtgctgacaatatagaaggaaagaccttcgtgagcacggttaacagccttgtgttccaacagattgatgctaattggaacatccagtgttggctgaagggggatcttaagctgtttatttgttacgttgagtccctgtttaaaaatttgttcagaaattataattataaagtccacctgctgtatgtcctgccagaggtgcttgaggacagccccttggtacctcaaaaaggtagctttcaaatggttcattgcaactgtagcgtccacgaatgctgtgaatgcctggtgccggtcccgactgctaagcttaatgataccctactcatgtgccttaaaataacttccggaggggtcatcttccagagccctctgatgtcggtccaaccgattaacatggtcaagcctgatccccctcttggactgcatatggaaattaccgatgacggcaacttaaagatctcctggtcctcaccacctctagtccccttccctctgcaataccaggtgaagtacagtgagaacagtacaacggttattcgcgaggccgataaaatcgtttctgccactagcctgctggtagatagtatcttgcctggatcctcctacgaggtgcaggttcgcggaaagcgactcgacggcccagggatctggtccgattggagcacccctcgcgtgtttacaacccaggatgtgatctactttcctccaaagatccttactagtgtaggatccaacgtgagcttccactgcatctacaagaaagagaataaaatcgtgccgtctaaagagatcgtatggtggatgaatctcgctgaaaagatccctcagagccaatacgatgtagtttcagatcacgtgtccaaggttaccttcttcaatctgaacgaaacaaaacctcgtggcaagtttacttatgacgcggtgtattgttgcaacgagcatgagtgtcaccaccgctatgctgaactgtacgttatcgatgtcaatatcaacatcagctgcgagacagacgggtacctcactaagatgacatgcaggtggagtacatcgacaatccagagcctggcggagtccacactgcaacttaggtatcaccgttccagcctctattgcagcgatatcccctctatccatcctatctccgagcctaaggattgctatttacaatcagacgggttctacgagtgcatctttcagcccatattcttgctgagcggctacaccatgtggattagaattaaccattctctgggatctcttgactcgccaccgacatgcgtgctgcctgacagtgtggtaaagccactccctcccagctctgttaaagccgaaattaccattaatatcggccttctgaagataagttgggagaagcccgtcttcccagagaacaatttacaatttcagattcgctacggactgagcggcaaggaggtgcaatggaagatgtatgaggtctacgatgctaagagcaaatctgtgtctctcccggtgccagatttgtgtgctgtttacgcagttcaggtccgatgcaagcgtcttgacggattgggttactggagcaattggagcaacccagcctacactgtagtcatggacatcaaggtaccaatgcgcggacccgaattctggcggattatcaatggtgacactatgaagaaagaaaagaacgtgaccctgctttggaaacccttaatgaaaaacgacagcctatgcagcgttcaaaggtacgtcattaaccatcacacttcttgcaacgggacctggagtgaagacgtgggcaaccacactaagttcactttcctgtggaccgagcaagcccataccgtcaccgtcctagccataaattcaattggagcctccgtggccaacttcaatctgactttttcctggccaatgtctaaggtgaacattgtgcagtctctgtccgcttaccctctgaattcaagctgcgtgattgtcagttggattctgtcccctagcgactacaagttgatgtacttcataattgaatggaagaacctcaatgaggatggggaaatcaaatggctgaggatctcttccagcgtcaaaaagtattatatccacgatcattttatcccgattgaaaagtatcaattcagcctttaccccattttcatggaaggggtcggaaagccgaagattattaatagctttacgcaggacgacattgaaaaacatcagtcagatgctggtttatatgtgatagtgcctgttattatctccagttcaatcctcctcttgggtacgctccttatttctcatcagcgcatgaaaaaacttttttgggaagacgtgcccaaccccaagaattgtagttgggcacaagggttgaatttccaaaagcctgaaacatttgaacatctgttcatcaaacacaccgcgtccgtgacttgcggtcccctgcttctcgaacctgagaccatcagcgaggacatcagtgtcgacaccagttggaagaacaaggatgagatgatgcctactaccgtcgtgagcctgctgtccaccacagatctggaaaagggcagcgtgtgtatctcagaccagttcaactctgttaactttagcgaagctgaggggactgaggttacatacgaagatgagtcgcagaggcagccatttgtcaagtacgccacactgatctctaattccaaaccttctgagaccggcgaagaacaagggctgataaacagttctgtgaccaagtgtttttcaagcaaaaacagtcccttaaaggatagcttctccaacagtagctgggagatcgaggctcaggcttttttcattctgtctgatcagcaccccaacatcatctctcctcatctcacttttagcgaaggactcgatgaacttctgaagctagaaggtaactttccagaagagaataacgacaaaaagagcatctactacctgggagtcacaagtatcaaaaagcgcgaaagcggtgtgttactgactgataaaagtagagttagttgtccgttcccagccccatgtcttttcacagacattcgtgtcttacaagactcttgtagccattttgtggagaataacattaaccttggtacgtcgtcgaagaagacctttgccagttacatgccccagtttcagacctgctccactcagacccacaagatcatggaaaataagatgtgtgacctgactgtgtag

SEQ ID NO: 228242 - DNA, 2721 bp, synthetic construct
  misc_feature 1..2721: note = Description of Artificial Sequence: Synthetic coding sequence
  source 1..2721: mol_type = other DNA
atgatctgtcagaaattttgtgtggtgctcctgcactgggaattcatctatgtcatcactgctttcaatctttcttaccccatcacaccttggaggttcaaactgtcctgcatgccccctaactcaacttatgattattttctcttgcctgcgggtttgagcaaaaacacttccaattctaacgggcactacgaaactgccgttgaacccaagtttaactcctccggcacccacttttcgaacttgtccaaaacaacatttcattgctgcttccgcagcgaacaggaccgcaattgttctctttgcgcggacaatattgaaggcaaaactttcgtcagcacggtgaattccctggtatttcaacagatcgatgcaaactggaacatccagtgttggctgaagggtgacctgaaactgttcatttgctacgttgagtcgcttttcaaaaatctttttagaaattataattacaaagtccacctcctctatgtactgccagaagtgctagaggactctccccttgtgccacagaaagggtcctttcagatggtgcattgtaattgtagcgtacacgagtgttgcgagtgtttggtacccgtgccaaccgcaaagcttaatgataccctccttatgtgtcttaaaatcaccagtgggggagtgatctttcaatccccgctgatgtccgttcagcctattaacatggttaaaccagacccgccactcggcctgcatatggagatcactgacgacggcaacttgaagatatcttggagtagcccgcctctggtgccctttcccctgcagtatcaagtgaagtatagcgagaatagcaccaccgtcatccgggaggctgacaaaatagtctctgccacctcactactagtcgactctattctgccaggcagttcatacgaagtccaggtgagaggcaaacgtctagacgggccagggatctggtcagattggagcaccccgagagtcttcaccactcaggacgtcatttacttccctccaaaaattcttaccagcgtgggatccaatgtgtccttccactgtatctacaagaaggaaaataagattgtgccgtctaaagagatagtttggtggatgaatctggccgaaaaaataccccaaagccagtacgacgtagtgagcgatcatgtatcgaaggtgacattttttaatctcaacgagacaaagcccagaggcaagttcacatatgacgccgtgtactgttgcaatgaacatgaatgtcaccatagatacgctgaactgtacgtcattgatgttaatatcaacattagttgcgagaccgatggatatcttacaaagatgacatgcagatggtcaacctcaaccatccaaagcttagccgaatctaccctgcagctgcgctaccatcgaagctccctgtattgtagtgacatcccgagcattcatcccatttccgaaccaaaggattgctatttacagtcagatggattctacgagtgtatctttcagccgatttttctcctgtctggctatacaatgtggatcagaataaatcactcgcttggaagcctggattcccccccaacgtgcgtgctaccggattctgtggttaagccactaccgccatcgagcgttaaggcagagatcaccattaatatagggctgctgaaaatatcctgggagaaaccagtctttccggagaataacttacaattccagatccgctatggcttatcaggcaaggaagtgcagtggaagatgtacgaggtctacgacgccaagtcaaaatccgtcagcctccccgtccccgacctatgtgccgtttatgccgttcaagtgcgatgtaagcgcttggacggcctcggctactggagtaattggagcaatccggcttacactgtcgtaatggatataaaagtccccatgcgcggacctgagttctggaggataatcaatggcgacactatgaagaaggaaaaaaacgtgaccctgttatggaaacctcttatgaaaaatgattccctctgttccgttcagcgctacgttatcaaccatcacacctcttgtaatggcacgtggagcgaagacgtcggcaaccataccaaattcacgttcttatggaccgagcaggctcacacagtcacagttctggccatcaattccatcggggcatctgtagcaaactttaatctgacattttcctggcctatgagtaaagtgaacattgtccagagtctgtccgcttaccccctgaattcaagctgtgttatagtgagttggattctgtcacccagtgactacaagttaatgtacttcattatcgagtggaaaaaccttaacgaagacggagaaattaagtggcttcggatcagcagcagcgtgaaaaaatactacatccacgaccacttcataccaattgaaaaataccagtttagtctgtatccgatctttatggaaggagtgggcaagcccaagatcattaattccttcacccaggacgatatcgagaagcatcagagcgacgcgggtctctacgtgattgtccctgtaattatctccagtagtattctgttgttgggtactcttctgatctctcatcagcggatgaagaagctgttctgggaagatgtgcctaatccgaagaactgctcttgggcgcaaggactcaatttccagaagaaaatgcccggtacaaaggaactgctgggtgggggttggctgacttag

SEQ ID NO: 228243 - DNA, 2877 bp, synthetic construct
  misc_feature 1..2877: note = Description of Artificial Sequence: Synthetic coding sequence
  source 1..2877: mol_type = other DNA
atgatctgccagaagttttgtgtcgtcctactgcattgggagtttatttacgttattactgcgtttaatttgtcctatcccatcacaccctggcggttcaagctaagttgcatgccaccaaactcaacctatgattattttttgcttccagcaggattgagcaagaacacttcaaactccaacggtcattatgagacagctgttgagccgaagttcaactcatctggcacgcattttagcaatctgtcgaaaaccacctttcactgctgtttcaggtctgagcaagatagaaattgttctctttgtgcagacaatatcgaggggaagaccttcgtaagtaccgtcaattccctggtgttccagcagatcgatgctaattggaacatccagtgttggctgaagggcgacctgaagctctttatttgctacgtggagtcccttttcaaaaatctgttcaggaattataattataaggtgcatctgctctatgtcctgccagaggtcctggaggactctccactggtgcctcagaaagggtccttccagatggtacactgtaattgctctgtgcacgagtgttgtgaatgcctggtccccgtcccaactgctaagctcaatgacacattacttatgtgtctgaagatcacatcgggaggtgtgatcttccagtcccccctgatgagcgtacagcctataaacatggtcaagcccgatccacctcttgggcttcatatggagattacagacgatggtaaccttaagatcagttggtcctcaccacccctcgtaccgttccccctgcagtatcaggtcaagtattctgaaaattccactaccgttatacgagaagctgacaaaatcgtttccgcgacatcccttttggtggactccattcttccgggatctagctatgaggtgcaggtccggggaaagagactggatggtcctggtatctggtcagactggtcgacacctagagttttcacgacgcaggatgttatatattttcccccaaagatcctgacctctgttggttccaacgtttccttccactgtatttacaagaaagaaaataagattgtcccatcgaaggagatcgtgtggtggatgaatctggccgagaagataccgcagagccagtatgacgtcgtaagtgatcacgtttctaaggtgacatttttcaacctgaacgaaactaaaccaagaggcaaatttacctacgacgccgtgtactgttgtaatgagcatgaatgtcatcatcggtatgctgagctgtacgtgatcgacgtgaacataaatatcagctgtgagacagacggctacttgaccaagatgacttgccgatggtcgacctccaccattcaatcattggccgaatctaccttgcagctcaggtatcaccgatccagtctctactgttctgatatcccctcaattcatccaatatcagaaccgaaggactgctatttgcagagtgatggcttctatgagtgcatatttcaacccatctttctcttaagcggttacaccatgtggattcgtatcaatcacagtctaggatccctggattcccctccaacctgcgtcctccccgatagtgtggtgaagccacttccgccaagtagcgtcaaagctgagattacaatcaacatcggcctcctcaaaatttcctgggaaaaacctgtttttccagaaaataacctccagtttcaaatcagatatggcctgagcggcaaggaggtgcagtggaagatgtatgaggtgtatgacgcaaagtcaaagtctgtgtctttgccggtccccgatctgtgcgccgtgtacgctgtgcaggttcggtgtaaaaggcttgatggactgggctactggagtaattggagtaaccctgcatataccgtggtgatggacataaaagtgcctatgcggggaccagaattctggagaatcattaacggcgatacaatgaaaaaggagaaaaacgtgacgctgctgtggaaacccctgatgaagaatgactccctttgctccgtccagcgctatgtcatcaaccatcacacgtcgtgtaatgggacatggtcagaggatgttggtaatcatactaaattcacctttttatggaccgagcaagcccataccgtaacagtgctagccatcaactctataggagcctcggtggctaattttaatctgacatttagttggcctatgagcaaagttaatatcgtgcaatcacttagcgcatacccactcaactcctcatgcgtaattgtgtcatggatccttagtccttcagactacaaactcatgtatttcattatagaatggaaaaacctgaacgaggatggcgagattaaatggctgcgtatatcgtcgagcgtgaagaaatactatattcacgaccatttcattcctatagaaaaatatcagttttctctctatccaatttttatggaaggagtggggaagccaaagatcatcaactcgtttacgcaagatgacattgagaaacaccagtcagacgccggtctctacgtgatcgtgcccgtcatcatttcatccagcattctcctcctgggtacactgctgatttctcaccaaaggatgaagaaactgttttgggaagacgtcccaaacccaaaaaactgcagctgggcacaggggctaaatttccagaagatgttggagggcagtatgttcgttaagtctcatcaccattccttaatctcctcaacccagggacacaaacattgcggcagaccacaggggcctctacatcggaaaacacgcgacctgtgcagtttagtttacctgcttactctcccgccattactgagctacgatcccgctaagagcccttcagttagaaatacccaagagtag

SEQ ID NO: 228244 - DNA, 2691 bp, synthetic construct
  misc_feature 1..2691: note = Description of Artificial Sequence: Synthetic coding sequence
  source 1..2691: mol_type = other DNA
atgatttgtcagaagttctgtgtcgtgctgctgcattgggagtttatctatgttataactgctttcaacctctcttacccgattactccctggagattcaaactgagctgtatgcctccgaattctacctatgactacttcctacttcctgccggattgtccaaaaatacttccaattctaacggccattatgagacagcagtggagccgaagtttaactctagtggaacccacttcagcaacctgagcaaaactaccttccattgttgttttaggtcggagcaggacaggaattgctcactgtgtgcagataatatcgagggtaaaaccttcgttagcaccgtgaattccttggtcttccaacagatcgatgcaaactggaatatacagtgttggttgaaaggcgacctgaagttgtttatctgttatgtggagtccctatttaagaatctttttcgcaattacaattacaaagtgcacctgttgtatgttctgcccgaggtactggaagacagcccactggtgccacagaagggatcttttcagatggttcactgcaattgcagcgtgcatgaatgctgtgagtgcttagtgcccgtgcctaccgcaaagttgaatgatacactgttaatgtgtctcaagatcacttctggcggagtgatttttcaaagcccccttatgtccgtccagcctataaatatggtcaagccagatcctcctctgggactgcatatggaaatcaccgacgacggtaatctgaagatctcatggtcatccccaccactggtgccatttcctcttcaatatcaggtgaagtatagtgaaaactccacaaccgtgatcagagaggcagataagatcgtcagcgctacctctctgctggtggattctatccttcctggatcttcctacgaggttcaggtgcgcggaaagcggctggacggccctggtatatggtccgactggagcacaccaagggtgttcaccacacaggacgtaatttacttcccacccaaaattctcacaagcgtgggttctaatgtctcctttcactgtatctataagaaagagaacaagatcgtgccaagcaaggaaatcgtctggtggatgaacctagccgaaaagataccacaatcccagtatgacgttgtgagcgaccatgtttccaaggttacattttttaacctgaacgagactaagccacgtggaaaatttacatacgacgctgtctactgctgtaacgaacacgagtgccaccaccgatatgcagagctgtacgtgatcgacgtgaacataaacatctcttgtgagacagacgggtatttgaccaagatgacatgtcggtggtctacttccacgattcagtcactggctgagtccactctgcagctccgctaccaccgctcaagcctgtattgtagcgatatcccctctatccacccaatctctgagccaaaagactgctatttgcagtctgatggtttctacgaatgtattttccagcccattttcctcctgtcgggatatacaatgtggatacgaatcaaccacagtttgggatcactggatagtccaccaacctgtgtacttccagactccgtcgtgaaaccactgcccccatccagcgttaaagcagaaatcaccatcaacattgggctgctgaagatttcatgggagaaaccagttttccccgagaacaacctacagtttcagatccgatacggtctatcagggaaggaggtgcaatggaaaatgtatgaggtatatgacgcaaagtcaaaatctgtttcactaccagtgcccgacctgtgtgcagtctacgctgtgcaggtaagatgtaagcggttagacggcctaggctactggtctaattggagcaatccagcgtacaccgtagttatggacataaaggtgcccatgcgcggtccagaattctggcggattattaatggcgatactatgaagaaggaaaagaacgtcactctactttggaagccactgatgaaaaacgactctctgtgttctgtgcaacgctatgtcatcaatcaccacacctcctgtaatggtacctggagcgaggacgttgggaatcacacgaaatttacattcctgtggaccgagcaggcacataccgtgactgtgctggcaataaatagcatcggcgctagcgtggctaacttcaacttaacattcagctggcccatgtcaaaggtgaatatcgttcaaagcctgtccgcttatcccctgaatagcagctgtgttatcgtcagctggattctgtcgccctccgactataagctgatgtactttatcattgaatggaagaaccttaacgaggatggagaaattaaatggcttagaatctcaagttccgtgaagaaatactacatccacgatcattttattcctatcgagaaataccaattctccctgtacccaatctttatggaaggtgtcggcaagcccaagattattaactcgttcacccaggacgatattgagaagcaccagtctgacgccggtctttacgtgatagttcctgtcataatctcaagtagcatcttgctgctcgggaccttgctcatatcccaccaacgcatgaagaagttattttgggaggacgtgcccaaccccaaaaattgttcatgggctcagggactgaactttcagaagcgcacggacatcctgtag

SEQ ID NO: 228245 - DNA, 699 bp, synthetic construct
  misc_feature 1..699: note = Description of Artificial Sequence: Synthetic coding sequence
  source 1..699: mol_type = other DNA
atgatgcctactacagttgtgtctttgttgagcactaccgaccttgaaaaaggttctgtctgtatcagtgaccaatttaacagtgtgaatttttcggaggccgaggggactgaagttacgtacgaggatgagtcacagaggcagccatttgtgaaatatgccacattgatatctaactccaagccaagcgaaactggcgaggaacaaggactgattaactcctcagtgaccaaatgtttcagtagtaaaaatagtcccttgaaggattccttttctaacagtagttgggagatcgaggcgcaggcttttttcattctgagcgatcagcaccctaacattatcagtccacatctgactttttcggaagggctggacgagctgctgaaactggaaggaaacttcccagaggaaaacaacgacaagaagtccatctactacctgggcgtcacatctatcaagaagcgggagtcaggagtgctcctgaccgataaatcaagagtctcctgccccttccctgcaccttgccttttcacggacatcagagtcctgcaggacagctgtagtcactttgtagaaaataacattaaccttggcacttcgagcaaaaagaccttcgcgtcatacatgccccagttccagacttgctcaactcaaacccacaagattatggagaacaagatgtgcgacctgacagtgtag

SEQ ID NO: 228246 - DNA, 396 bp, synthetic construct
  misc_feature 1..396: note = Description of Artificial Sequence: Synthetic coding sequence
  source 1..396: mol_type = other DNA
atggctggggttaaggcactggtcgccctcagctttagtggagcaatcggactgaccttcctgatgctcggctgcgccttggaggactacggtgtgtactggcccctgtttgtgctgatattccacgcgatctcacctatcccacacttcattgccaagagggtgacttacgactctgacgcaacaagttcggcctgcagagagttggcatatttttttactactgggatcgtcgtatcagcttttggcttccctgtaattttggcacgggtggctgtcatcaagtggggcgcatgcggattggtcctggctggcaatgctgttatcttcttgacaatccagggttttttcctgattttcggacggggagatgactttagctgggaacagtggtag

SEQ ID NO: 228247 - DNA, 396 bp, synthetic construct
  misc_feature 1..396: note = Description of Artificial Sequence: Synthetic coding sequence
  source 1..396: mol_type = other DNA
atggcagggatcaaggcactgattagtctgtccttcgggggtgctattgggctgatgttcctcatgctggggtgtgcccttcctatctacaacaagtattggccactgttcgtgctgttcttttatatcctttccccaatcccttattgtatcgccaggagactggtggacgataccgatgcaatgtccaacgcgtgcaaggagctcgcaatttttctcaccactggcattgtcgtgtccgctttcggcctgcctatagtgtttgctagggcgcaccttatcgaatggggggcatgcgctctggtactgaccggaaataccgtaattttcgcaaccatcctgggctttttcctggtcttcgggagtaacgacgacttctcatggcaacagtggtag

SEQ ID NO: 228248 - DNA, 510 bp, synthetic construct
  misc_feature 1..510: note = Description of Artificial Sequence: Synthetic coding sequence
  source 1..510: mol_type = other DNA
atggctgggatcaaggccctgataagcctgagcttcgggggagcgatcgggctgatgttccttatgctgggctgcgccctgcccatttacaataaatactggccccttttcgttctcttcttctatatcctctccccgataccttactgcatcgccaggcgcctcgtagatgacactgacgctatgtctaacgcctgtaaggagttagctatctttctcaccacaggcattgttgtttccgcattcggcctgccaatagtcttcgctcgcgctcatcttatgggtagacttcctttttttagcaagatggggaccgccgaatccgaaggacgggaaaccctgacacagcaactgcctctcccagcagccgcaatgagaaggcttctgcccgcatcccgcgtaagcacccagccagtcttgcggctggcagattcagccgagtccctgctgggaaggcccgcactgtgggcgctgggtttcctcttgtgtcccccatcccaggctcagtag

SEQ ID NO: 228249 - DNA, 3195 bp, synthetic construct
  misc_feature 1..3195: note = Description of Artificial Sequence: Synthetic coding sequence
  source 1..3195: mol_type = other DNA
atgatgaagttcaggttcagacgacagggcgctgatccccagagggagaaactgaaacaggagttgtttgctttcaataaaactgtggagcatggatttccaaatcagccaagcgcactggcctttgatcctgaattacgcattatggccatcggaactcggtctggagccgtgaaaatctacggcgctcctggggtggagttcacaggacttcaccgggacgctgctaccgttactcagatgcatttcctaacaggccaagggagactgttatctctcctcgatgatagcagtctgcacctttgggaaatagtccaccataacggctgtgcccaccttgaagaggctttgagttttcagctgcctagcagaccaggatttgatggagccagtgcaccgttgtctctaactcgggtgacagttgtactcttagtggccgcttctgacatagcagccctgggaacagaaggttctagtgtattctttctggacgttacaacccttacactgcttgagggtcagacactggcccctggcgaagttctaaggagcgtgcccgacgattacaggtgcggcaaagccctgggccctgttgaatcgttgcagggccatctgcgcgaccccactaaaatcctcatcgggtactctagagggctactggtcatctggaatcaggcatcccagtgtgtggaccatatatttttggggaaccagcagctggaatcactctgctggggcagagattctagtaccgtcgtgagcagccatagtgacggctcatacgctgtgtggagcgttgacgctggttcattcccaacactgcagccgaccgtggccaccaccccctacggcccattcccatgtaaagccattaacaagattctttggaggaattgtgaatctggtggtcacttcataatcttctcagggggaatgcctcgcgcatcctacggggacagacattgtgttagcgtgctgcgtgcggaaaccttggtcaccctggattttaccagcagaattattgactttttcacagtccactcgactcgcccagaagatgagttcgatgaccctcaggctctggcagtccttctggaagaggaactggtcgtcctggatctgcaaactcccggttggcctgccgttcctgcaccttatctcgctccattgcactccagcgccattacatgttcagcgcatgtcgcaagtgtcccagccaagctctgggcacgtattgtttccgccggtgagcaacagagccctcaaccagttagcagcgccctgagttggcctattaccgggggtcgcaatttagctcaggagccctctcaaagaggtctgctcctgaccggtcacgaggacggaactgttcggttctgggacgcttctggggtggccctgcgcccactctataaattgtctactgcaggattgttccaaactgattgtgagcacgcagactctctcgctcaggccgctgaggacgattggcccccttttcggaaggtgggatgtttcgacccatactccgacgatccccgattaggtgtgcagaaggtggcactgtgcaaatacaccgctcagatggttgtggctgggaccgctggccaggtgctggtgttagaactcagcgatgtgcccgtggaacaggccgtgagtgttgcaataattgacctcctgcaggacagagaaggcttcacttggaaaggtcacgaaagactgtccccgcgaaccggaccactgccctggcctgccggatttcagccacgcgtattagtccagtgtctgccacctgctgccgtgactgcggtgactctccataccgaatggagcctggtggcgttcggaacatctcacggtttcggcctgtttgactaccagcgcaaaagcccggtactggccaggtgcaccttacatcctaacgacagccttgccatggaagggccactaagtcgcgttaagtctctcaaaaagtcactgcgccagagctttaggcgaatccgaaaatcccgggtctccggcaaaaagcgcgcagcgaacgcttcctctaagttacaggaggcaaatgcccagctggccgagcaggcctgccctcatgacgtggaaatgacaccagtgcaaaggagaattgagcctcgctcagctgatgatagtctgagtggtgtcgttagatgcctgtattttgccgacacgttcctcagggacggcgctcaccatggcccaacaatgtgggccggaactaattctggcagcgttttcgcctacgctttggaggtgcccgcagcagccgtcggcggtgagaaaagacctgaacaggccgtggaagccgttttgggcaaggaagtgcagctgatgcacagggcaccggtcgtggccatcgcggtattagatggacggggaaggcccttgcctgaaccttacgaggctagccgggatctggcccaggctcccgacatgcaagggggtcatgcggtcttgattgccagcgaggagcagttcaaagtgtttactctgcctaaagtctctgccaagaccaaatttaagctgactgctcacgagggctgtcgagtccgcaaagttgccctggctacgtttgcctcggtggcctgcgaagattacgctgagacctgtctagcgtgtcttactaatctgggcgacgtccatgttttctcagtgcccggactccgcccacaggttcactattcctgtatcaggaaagaggacatatcaggcatcgccagttgtgttttcaccagacacgggcagggtttctatttgatatccccttcagaattcgaaaggttttcgctttctgctagaaatattaccgagcccttgtgcagcctcgacatcaattggccacgagatgccacccaagcttcttaccgaattcgtgaaagccccaagctgtcccaggcaaatggtaccccaagcatcctgctggctcctcaatcactggatggatcaccagatccagcccattcaatgggcccagacacccccgagcctcccgaggcagcattgtctcctatgtcgatcgacagcgcaacctccgccgacacaaccctggatacaactggcgacgtcacggtagaggacgtaaaggatttcctcggatcttctgaagaaagcgagaaaaatctgcgcaacctggcggaggacgaggcccatgcttgcgcaattctcatcaagtag

SEQ ID NO: 228250 - DNA, 1056 bp, synthetic construct
  misc_feature 1..1056: note = Description of Artificial Sequence: Synthetic coding sequence
  source 1..1056: mol_type = other DNA
gaactgccctcagccgcaccagacagcaccttactactgaccgcccagcactgggtcgcaaacctgttcatccttgcaaccctgattggttggaccgtgcgatcattcttcctgggccgaatggagacgtgttgcagccatcttggtctccgatcaggacggaggtttgccgtgtcaattgggtattggcacgatccttatattcaacattttgttaggctcagtaaagagcggaaagcgccagaaattaatagagggtacttcgcacgggtacatggcgttagccagttgataaaggcatttctgcgtaaaaccgaatgtcactgtcagatagtgaacttgggcgcaggcatggacaccacgttctggcggcttaaggatgaggacctcctcccctccaagtacttcgaggtggattttccgatgatagtcaccagaaagctgcactctatcaaatgtaagccgccactgtcctctcccatcctggaactccactccgaagacactctgcagatggatggacacatactcgactctaaacggtacgcagtgataggagcagacttacgagacctgagcgagttggaggaaaaattgaaaaaatgcaatatgaacacacagcttcccaccctgctgatcgccgagtgcgtgttggtttatatgacaccggagcagtcagccaacttgcttaagtgggccgctaatagctttgaaagagcaatgtttatcaattatgagcaggttaacatgggggacagatttggtcagatcatgatcgaaaatctgagacggcgtcagtgcgatcttgcaggagttgagacatgtaaatcattggagtcgcagaaggagaggcttctctcaaacgggtgggagacggcatcggccgttgatatgatggaattatacaatagactgccaagggctgaagttagtcggattgagtcactagagtttctcgatgagatggaactgctggaacagctcatgcgccactattgtttatgttgggcaaccaaaggagggaatgagctgggactcaaagaaatcacgtactag

SEQ ID NO: 228251 - DNA, 840 bp, synthetic construct
  misc_feature 1..840: note = Description of Artificial Sequence: Synthetic coding sequence
  source 1..840: mol_type = other DNA
atggccacgaggcagagagagtcttccataacgagctgttgcagtacgtcttcttgtgacgccgatgacgagggcgtgagggggacatgcgaggacgcttccctatgtaaacgttttgccgtgagtatcgggtattggcacgacccctacatccagcatttcgtgcggctgtcgaaggagagaaaggccccagaaatcaaccgcggatacttcgcaagggtacatggcgtctcacagctaataaaagcattcctacgcaaaacagagtgccattgccagatcgtgaacctcggggcaggaatggatactactttttggagactaaaagacgaagacctcctgccgtccaaatatttcgaagtcgatttccctatgatcgtgacccggaagctgcatagcattaagctgccaacccttcttattgccgaatgtgtcctggtgtacatgactcccgaacagtctgctaatctgttgaagtgggctgcaaactcattcgaaagggccatgttcattaactacgagcaggtgaacatgggcgaccggttcggccagattatgatcgaaaacctccgccgaagacaatgtgacctggctggcgtcgaaacctgtaaaagccttgagtcgcaaaaagaacggttgttgtccaatggatgggaaacagcctctgctgttgatatgatggaattgtacaaccgcctgccgagagctgaagtcagcagaattgagtccttggaattcctggatgagatggagctcctcgaacaactcatgcgacattactgcctttgctgggcgacaaagggtgggaatgaactaggtcttaaggagatcacgtactag

SEQ ID NO: 228252 - DNA, 1005 bp, synthetic construct
  misc_feature 1..1005: note = Description of Artificial Sequence: Synthetic coding sequence
  source 1..1005: mol_type = other DNA
atggctacccggcagcgagagagcagtatcacctcttgttgctctacttccagttgcgacgccgatgatgaaggggttcggggtacctgcgaagacgcctccctctgtaagcggtttgccgtatctatcgggtactggcatgatccatatatacagcactttgtgcggctgagcaaggagcggaaagctcccgagattaaccgaggatactttgccagggtccacggagttagccagctgatcaaggctttcctgaggaaaaccgaatgccactgccagatcgtcaatctcggtgccggaatggacaccacattctggaggctcaaagacgaggacctgctccccagcaagtactttgaggtggattttccgatgatcgtcacacgcaaactgcactcaattaaatgtaagcccccactcagttctccaattctggagttgcattcagaagatacactccagatggacggtcatattctggactctaaaaggtacgccgtgatcggcgcagacctgcgcgatctctctgagttggaagaaaaactcaaaaagtgcaatatgaatacgcagcttccgacgctcctgatcgccgagtgcgtgttggtctacatgacaccagagcagtcagcaaacttactgaagtgggcggctaatagcttcgagagagcaatgttcattaactatgagcaggtgaacatgggcgatcggttcggccagatcatgattgaaaacctccggagacgccagtgtgatctcgccggagtggagacctgcaaatcgctggagagccagaaagaaaggcttctgagcaacggatgggagaccgcgtccgcagtggatatgatggagctctacaatcgtttgcctagggcggaagttagccgcattgagtctctagagttcttggacgagatggagctgttagaacaactcatgcgccactactgtctgtgttgggcaactaaagggggtaatgagctcggccttaaagaaatcacttactag

SEQ ID NO: 228253 - DNA, 2415 bp, synthetic construct
  misc_feature 1..2415: note = Description of Artificial Sequence: Synthetic coding sequence
  source 1..2415: mol_type = other DNA
atggcagtgagggcgctgaagctcctgacaactctgctggccgtggtggccgcagcgtcgcaggctgaagttgagagcgaagcgggttggggcatggtgacacctgacctgctgttcgccgagggtacggcggcatacgcacgcggagattggccaggcgtagtgctgagcatggaaagggcccttaggtcccgcgctgcactgcgggcactgcgactgcggtgccggacgcagtgtgcagctgactttccttgggagttggacccagattggtcgccctctcccgcacaggcctctggcgcagccgcattacgtgacctgtccttctttgggggtcttctccgcagagcagcctgtctcagaagatgcctgggcccacctgcagctcattcactcagcgaagagatggagctggaatttagaaagagaagtccctacaactacttgcaggttgcctactttaaaatcaacaaacttgagaaagccgtggctgcggcacacaccttctttgtggggaatcctgaacatatggagatgcagcagaatctcgactattatcaaaccatgtctggagttaaggaagccgattttaaagacttagaaacacagccacacatgcaggagttccggctgggcgttcggctatatagcgaggagcagccccaggaggccgtcccacatctggaggccgctttgcaggagtacttcgtggcctacgaagagtgccgggcactctgcgagggtccctacgattacgatggctacaactatctagaatacaatgcagacctctttcaagccattacagaccactacatccaggttctgaactgcaaacagaattgcgtgaccgagctggcatcccacccatcccgcgagaaacctttcgaggacttccttccctcacactacaattaccttcagttcgcctattacaatatcgggaattacactcaggctgtggaatgcgcgaaaacgtatctcctctttttcccgaacgatgaggtgatgaatcaaaatctagcttattatgccgctatgctcggggaggaacacaccaggagtattggtcctcgcgagtcagccaaagaatacaggcagaggtccctgctggagaaggagcttttgtttttcgcatatgacgtgtttggaatcccgttcgtcgatccagacagttggacacccgaggaagttatcccaaagcgattacaggaaaaacagaaatccgagcgcgaaacagccgtccgaatatctcaggagataggaaacttgatgaaagagattgaaactttggtcgaagagaaaacgaaagaatctctcgacgtcagcagactgaccagagaaggcggtcctttattatacgagggaatctctctcacaatgaacagcaaactgcttaatggatcccagcgggtggtgatggatggggtcatctccgatcacgaatgtcaagagctgcagagactgaccaacgtagccgctacctcgggcgatggctatcgaggccaaacatctccgcacacaccaaatgaaaagttctatggagtgaccgtgttcaaggccctgaaattagggcaggaggggaaggtgcccttacagagtgcccacctgtactacaatgtgacagaaaaagtcaggaggataatggaatcctactttagactggacacccccctgtatttctcatacagccacctagtgtgcagaactgctatcgaggaagtgcaggcagagaggaaagacgattcccaccccgttcacgtggataactgtattctgaacgctgagaccctggtctgtgttaaggaacctcctgcctatacatttcgagactatagcgctattctgtaccttaatggggatttcgacgggggtaatttttatttcacagaactggacgctaaaactgttacagccgaggtgcagccccagtgcgggagagctgtgggcttctcaagcggcacagagaatcctcatggtgtaaaagcagttactcgcggtcagagatgtgctatagcattatggtttaccctggacccacgacactccgaaagggtgagagctgccagagccggagaatcatcctggtgctgcggcgaccccttccctgagcgcccatggttcgcgttcctcttccctaaaagccattgtcagtggctgaggcatgaacggtccacttgggacactagcagcaacgctctatcactgtggagccattgcctggtcctgcccggaccagccgtcaatggaattcaggtggggaaagaggtcaagactgggagtgatgccgagttcttagttccgtccttgggaccgacatccgccgtgctttttcaaagagtggggccagcaggaaaagagatgagcctaggaccattacgaaacctgccgtgccccctaggctcctcctcctag

SEQ ID NO: 228254 - DNA, 2211 bp, synthetic construct
  misc_feature 1..2211: note = Description of Artificial Sequence: Synthetic coding sequence
  source 1..2211: mol_type = other DNA
atggctgtgagggccctcaagcttctaaccactttgctagccgtggttgcagctgcctcccaggccgaagtggagtcagaagccggatggggcatggttacacccgatctgctgtttgccgaggggacagcagcttatgcccgtggagactggcctggggtggtgttgtccatggagcgcgcactgcgctctcgggcagccctgcgcgctcttaggctgagatgcaggacccaatgcgccgctgattttccatgggagttggatccggactggagtccttcgcctgctcaggcatcaggtgctgcagctctgagagacctgtcctttttcggaggcctgctccggagggcagcgtgcctgaggagatgcctgggcccacctgccgcacatagtttatcagaggaaatggagctcgagttccgtaagcgatctccatataattacctgcaggtggcttacttcaaaatcaataaactggagaaagctgttgctgcagcacataccttttttgtggggaatccagaacacatggagatgcagcagaacctggactattaccagaccatgagcggtgttaaagaggctgactttaaggatctggaaacacaaccgcacatgcaggagttccggctcggggtgcggctctactctgaggaacagcctcaggaggcagttcctcacctcgaagctgccctccaggagtatttcgtagcatacgaggaatgcagggccctgtgcgaggggccttacgattatgatggctacaactatttagagtataacgccgacctgttccaagctatcacggatcattatatccaggtgctaaattgtaaacagaattgtgtgaccgagctggcttcccatccttctagagagaaaccatttgaagatttcctcccaagtcattataactacctgcagttcgcttattataacatcggcaattacactcaggcagttgagtgtgccaaaacatatcttctgttctttcccaacgacgaagtcatgaaccaaaacctggcctattacgccgctatgctgggagaggaacatacacggtccatcgggccacgggagtcagcaaaggagtacaggcagcgctcgcttctggaaaaagaactactcttttttgcttatgacgtgtttgggattccctttgtcgatcctgactcttggactcccgaggaagtcatacctaagcggctgcaagagaaacagaaatctgaaagagagactgctgtgcgcatctctcaggagatcgggaacctcatgaaggagatcgaaaccctagtggaggaaaaaaccaaggaaagtctggacgtcagccgcctgacgcgagaagggggacccctactgtatgaaggcatctccctcaccatgaattctaagttgctgaacggaagtcagcgtgttgtcatggacggtgtgatttctgaccatgagtgtcaggagctgcagcgcctcaccaacgtggccgcaaccagtggcgatgggtatcggggacagacttcacctcatactccaaacgagaagttctacggggtcacagtgttcaaggcactgaaactcggacaagaggggaaggtgcccctgcagtcagcgcacctgtactataacgtaacggagaaggtgaggaggatcatggagagctacttccggctcgacacccctctctacttttcatacagccatcttgtttgtcgtaccgctattgaagaagtgcaggcagaaagaaaggacgacagccatcccgtgcacgtggataactgcatactgaatgcggagaccttggtgtgtgtgaaggaacctccagcctatacatttagagactacagtgcgatcctctatctcaacggagactttgacggaggcaatttttattttaccgagctggatgcaaagactgtcacggccgaggtgcagccacagtgtggacgcgcagtcggattttcctccggaaccgagaatccacatggggtaaaggctgtgacaagagggcagagatgcgccattgcactctggtttaccctggacccaaggcatagtgagcgcgatcgagtgcaggcagatgatttggtgaagatgctgttcagcccagaggagatggatctgagccaagaacaacctctggacgcccagcaaggcccaccagaacccgcacaggaatcactctctgggtccgagtctaagcccaaggatgaactctag

SEQ ID NO: 228255 - DNA, 2094 bp, synthetic construct
  misc_feature 1..2094: note = Description of Artificial Sequence: Synthetic coding sequence
  source 1..2094: mol_type = other DNA
atggcagttagagctctgaagctactgaccaccctgcttgctgtggttgccgctgcatcccaggcggaagttgagtctgaggcagggtggggcatggtcacacccgatctcctgttcgccgagggaacagccgcatatgcgaggggagattggcctggggttgtcctgagcatggagagagcgctgagatcacgcgcagcgctgagagctttacgtctgcgatgccgcactcagtgtgcagcagacttcccatgggagctggatccagattggagtccatctcctgcacaagcctccggggctgctgcgctacgcgacttatctttcttcgggggacttctccgacgggctgcttgtcttagaagatgcctgggtcctcctgccgctcacagtctctcagaggaaatggaattggaattccggaagaggtccccctacaattacctccaggtggcgtattttaagatcaacaaattggaaaaggcagtcgccgcagcccacactttttttgtgggaaatcccgaacacatggagatgcaacagaacttggactattatcagaccatgtctggagttaaggaggctgatttcaaggacctggagacccaacctcatatgcaggagttcagactgggcgttagactctactcagaggagcagccacaggaggcggtcccccatctcgaggccgcactgcaggagtatttcgtcgcatatgaagagtgccgcgcattgtgtgaggggccatacgattatgacgggtataattacttggagtataacgctgacctgttccaggccatcacagaccactacattcaagtcttaaattgcaaacagaactgtgtaaccgaacttgcttcccacccttctcgtgagaagcccttcgaagattttctcccgagccattataactacctgcagttcgcctactacaacatcggcaactacactcaggctgttgagtgcgcaaaaacttaccttttgttctttccaaatgacgaagtaatgaatcagaatcttgcatactatgcggctatgctcggcgaggagcacacaaggagcattgggcctagagagtccgctaaggagtatcgtcagcgatcactgctggagaaagagcttcttttttttgcttacgacgtgttcggcattcccttcgtagatcctgattcttggactcccgaggaagtgatccccaaaagacttcaggaaaaacagaaatcagagcgtgagacagcggtgcggataagccaggagataggcaatctgatgaaagagattgaaaccttggtcgaggagaaaaccaaagagtctctggatgtgtccagactgaccagagaaggtggtccgctcttatacgaagggatcagccttactatgaactctaaactgctgaacggatcacagagagtcgttatggatggagtgattagcgaccacgagtgccaagaacttcagcgcctcactaacgttgccgcaactagcggagatggataccggggacagacatcgcctcatacacccaatgagaagttttatggggtgaccgtctttaaggcactcaagctgggtcaagagggtaaagtccctttacagtcagcacatctttattacaacgtgactgagaaggtcaggcggattatggaatcctacttccgcctggacacaccgctctacttctcctattcccatctggtctgtcgcaccgccattgaggaagtgcaggctgaacgcaaggacgacagtcatcccgtgcacgtcgataactgcattctgaacgctgagacactcgtgtgcgtaaaggaacctcccgcttacactttccgggactatagcgcaatactgtatcttaacggagactttgacggaggcaacttctattttactgaactggatgcaaagactgtaactgcagaagtgcagccgcagtgcggccgtgcagtagggttctcgtctggcacggagaacccgcacggagtcaaggcggttacaagaggacagcgctgtgcaatcgctctatggttcactctggacccaaggcattccgaaagggtccgcgcagctcgggctggtcagggagcaggcaggtag

SEQ ID NO: 228256 - DNA, 459 bp, synthetic construct
  misc_feature 1..459: note = Description of Artificial Sequence: Synthetic coding sequence
  source 1..459: mol_type = other DNA
tgagaaagggagactgccgttcggattagtcaggaaatcgggaatttgatgaaagaaatcgaaactctggtagaggaaaaaacaaaggagtctttagatgttagcaggcttaccagggaggggggaccgctgctgtatgagggcatctctctgaccatgaatagcaagctcctaaacggctcacagcgcgttgtcatggacggggtcatctctgaccacgaatgccaggagctgcagcgactgaccaatgtggcagcaaccagcggggacggatatcgcggtcagacatctccccacacacctaacgagaagttttatggcgtgactgtgttcaaggctttaaaaagaggcgtcgtgctagtgcgctttcacacagcggataaagacgtccccgagaccggccaattcactaaggaacgaggtttgctcggtcttacagtgccgtgcggctgggggtag

SEQ ID NO: 228257 - DNA, 1806 bp, synthetic construct
  misc_feature 1..1806: note = Description of Artificial Sequence: Synthetic coding sequence
  source 1..1806: mol_type = other DNA
atggagttggaattccgaaaaagatcgccatacaactatctgcaagtcgcttacttcaaaatcaacaagctcgagaaggccgtggccgctgcgcataccttcttcgtcggcaaccccgaacacatggaaatgcaacagaacctggactactatcagacaatgtctggcgttaaggaggctgactttaaggatctggaaacacagccacatatgcaggaattccgcctcggtgtgaggctgtacagcgaggagcagccccaggaggccgttccgcacctcgaagctgcgctgcaggagtattttgtcgcttatgaggagtgccgggctctatgtgaaggcccttatgattatgacggctataactacctcgagtacaatgccgacctgtttcaggctatcaccgatcattatatccaagtgctaaactgtaagcagaattgtgtaaccgaattggcgtctcacccttcgcgcgagaaaccatttgaagattttctgccatcacactacaactatctccagtttgcatactataatataggcaactatacccaggccgtagaatgcgccaaaacgtatttactgttctttcccaatgacgaagtgatgaaccaaaatctggcttactacgctgcaatgctcggagaggagcacacccgtagcataggccctagagaatctgccaaggagtatcggcagagatctttgctcgaaaaggagctgctgttcttcgcctacgacgtttttgggattccgtttgttgatccggattcttggacaccggaggaagtgatcccaaaaagattacaggaaaagcagaagtccgagagggaaactgcggtgcggatcagtcaggaaattggtaacctgatgaaggaaatcgagaccctggtcgaggaaaagaccaaggaaagcttggatgtatctaggctgacccgggaggggggaccactcctttatgagggcatctccctcacaatgaattccaagctcctcaacggatcgcagagagtggtaatggatggcgtcattagcgatcacgaatgccaggagttgcagcgcctgacaaacgtggccgctaccagcggcgatggataccgcggacagaccagtcctcacacaccaaatgaaaaattctatggcgtcaccgtctttaaagctctgaagctgggccaagaaggcaaagtccccctccagtccgcccatctttattataatgtgacagaaaaggtccgacgcatcatggagtcgtactttaggctggacaccccactttatttctcatattcacacctcgtctgtaggaccgcaatcgaggaggtacaagcggaaagaaaggacgatagtcatcccgtgcatgtggataactgtatcttaaatgccgagacactcgtgtgtgtcaaagaacctccggcatatactttccgagattattcagccatcttatacctcaacggggattttgacgggggaaatttctactttaccgaactggatgctaaaacggttactgcggaggtgcagccccagtgcggaagagctgtggggtttagtagtgggacagaaaacccccacggcgtgaaagccgtgacacggggacaacggtgcgccattgctttatggtttaccctggatccacgacattcagaacgggatcgggttcaggctgacgacttagtgaagatgctcttcagcccagaggaaatggacttgtcacaagagcaacccctggacgcccaacagggccctcccgagccagcacaggagtcactaagcggctcagaatcaaaacccaaggacgagctatag

SEQ ID NO: 228258 - DNA, 2355 bp, synthetic construct
  misc_feature 1..2355: note = Description of Artificial Sequence: Synthetic coding sequence
  source 1..2355: mol_type = other DNA
atgacgtcgccagccgcagcccagtccagagagatcgattgtctgtctcccgaagcccagaaactggctgaagctagactggcggcaaagagagccgcaagggccgaagcgagggaaatcaggatgaaagagctggagaggcaacagaaggaggaagactccgagagatactcaaggcgaagtcggcgaaatacatctgcctcagatgaggacgagcgaatgagcgtcgggtctcggggttcgctccgcgtcgaagagcgtccagagaaagattttaccgaaaaggggagcagaaatatgccaggcctgtcagctgccacactagcctctctggggggaacaagctctcgacgcggtagcggggatacttccatcagtattgacactgaagcttccatcagagagattaaggacagcctcgctgaagtggaggaaaaatacaaaaaggctatggtgagtaacgcccagctagacaatgaaaaaactaactttatgtaccaagtggacacattaaaggacatgctcctggaactggaggagcagctggccgagtctcgcaggcagtacgaggagaaaaataaagagtttgagcgggaaaaacatgcacatagtatattgcagtttcagttcgctgaagtcaaggaagcactcaaacaacgggaggaaatgctggaaaagcacgggatcatactcaatagtgagattgctacaaatggggagacaagcgacacactgaacaatgtcggttaccagggacccactaagatgacaaaggaagagctcaacgctctgaaatctactggagacggcacactgggacgcgcttctgaggtggaggtgaaaaacgagattgttgctaatgtggggaagagagagattctgcataatacagagaaggaacagcacactgaggacacggtcaaagattgcgtggacattgaagtgttccccgctggggagaatacagaggaccaaaaatccagtgaggacacggctccctttctcgggacactggccggtgccacttacgaagagcaggtacagtctcagatcctggagagctctagcctaccagagaatacagtccaggtggagtcaaacgaggtgatgggggcacctgacgacagaactcgaacgccccttgaaccgtcgaattgctggtccgatctggacggcggaaatcataccgagaacgtaggggaggcagctgtgactcaagtggaggagcaggccggaactgtagccagctgccccctgggacactctgatgacaccgtgtatcacgacgacaagtgcatggtcgaagttccccaagagctggaaacgtcaaccggccacagcctggaaaaagaatttaccaaccaagaagccgctgagcccaaggaggtgccagctcacagcacagaggtgggccgtgaccacaacgaggaggaaggagaagaaacaggattgagagatgagaaacctataaagaccgaggtgcccggatcacccgcagggactgaaggcaactgccaggaggccaccggcccttcaaccgtggacacccagaacgagcccttggacatgaaagagcctgatgaggagaagagcgaccaacagggtgaagccctcgattcctcccagaaaaaaaccaagaacaaaaagaagaaaaacaagaagaaaaaatccccagtgcctgtggagactctgaaggacgtgaaaaaagaactaacatatcaaaacacagatctgagcgagatcaaagaggaggagcaggttaaaagcaccgacagaaagtcagcagtggaggcacagaacgaggtgacggaaaaccccaaacagaaaatcgcagccgaaagcagcgaaaatgttgactgtccagagaacccgaagataaaattggatggcaagttggaccaggagggagatgatgtgcagaccgccgcagaagaggtgcttgcggatggcgatacactggacttcgaagacgacacggtgcaaagtagcgggccacgggcaggcggagaagaactcgacgagggggtggccaaggacaatgctaaaatcgatggtgctacacagtcgagtccagccgagcctaaaagcgaggacgccgaccgctgcacactgcccgaacacgaaagcccatcacaggatatcagcgacgcctgtgaggccgagtcaaccgagaggtgcgagatgtccgaacacccgagccaaaccgtaaggaaggcactagactccaacagcttggaaaacgatgatctgtccgcccctggtcgtgagcccggacatttcaatcccgagagccgagaagacacgagagggggtaacgagaagggaaagtcaaaggaggattgtaccatgtcatag

SEQ ID NO: 228259 - DNA, 2259 bp, synthetic construct
  misc_feature 1..2259: note = Description of Artificial Sequence: Synthetic coding sequence
  source 1..2259: mol_type = other DNA
atgacaagtcccgcagccgcacagtccagggaaatcgactgcctgagcccggaagcccagaagcttgccgaggctagactggctgcaaagcgggcagcacgtgcagaggctcgcgaaattaggatgaaggagctcgagcgccagcagaaggaagtggaggaaaggccagagaaagattttactgagaaaggttctaggaatatgcctggcctctccgcagcaactctcgccagcctaggcggaacctcctccagaaggggatccggcgacacaagtatatcaattgatacagaagctagcatccgcgagatcaaagactccctggctgaagttgaagagaaatataaaaaagcgatggtgtcaaacgctcaactggacaacgaaaagactaactttatgtaccaagtggacacattaaaggatatgctgctggagctggaagaacagctagccgaatctagaaggcagtacgaggaaaagaacaaagaattcgagcgggagaagcacgcccatagtattctgcagtttcagttcgccgaagtgaaagaggcccttaagcagagagaggaaatgctggaaaaacatggcattattttaaacagcgagattgccactaacggggaaacatcggacacgttaaataacgtgggctaccagggtccaaccaagatgacaaaggaagaactgaacgcactgaagtcaactggagatggcaccttgggacgcgcaagcgaggttgaggtgaagaacgagattgtggcgaacgtagggaaaagggagatcttacataataccgagaaggagcagcacacagaggacacagtcaaagactgcgttgatattgaggtgttcccagctggagaaaatactgaagatcagaaaagttctgaggacaccgccccttttctcggcacccttgctggcgctacttatgaggaacaagtgcaatcacagattcttgagagctctagtttgcccgaaaataccgtacaggtcgagtccaatgaggtgatgggcgctcccgacgaccgaacacgaacaccgcttgaaccttctaattgctggagcgacctcgacgggggtaaccacacagagaatgtgggcgaggctgccgttacgcaggtggaggagcaggccggaaccgtggcgtcctgtccactggggcactctgacgataccgtgtaccacgatgacaagtgtatggtagaagtaccacaggagctcgagacctctacagggcacagtctggagaaggaatttacgaatcaggaagcggctgagcccaaggaggtgccagctcacagcacagaggtcgggagagaccataacgaggaggaaggggaggagactggcctacgtgacgagaaacctattaaaaccgaagtacccggaagccctgcaggcactgaaggcaactgtcaagaagccaccggacccagtactgtcgacacccagaacgagcctctcgacatgaaagaacctgatgaggaaaagagtgaccagcagggggaagcactggactcaagccagaagaagacgaaaaacaaaaaaaagaaaaataagaaaaagaagagccccgtccctgtcgaaactctgaaggacgttaagaaggagttgacctaccaaaatacggacctgtccgagatcaaagaggaggaacaggtcaaaagtaccgacagaaagagcgccgtggaggcgcaaaacgaagtcactgagaaccccaagcagaagatagccgctgaatcatctgaaaatgtcgattgcccagagaatccgaagatcaaacttgacgggaaactcgaccaagagggggatgacgtccagactgccgctgaggaggtgttggccgacggggataccctcgacttcgaggatgacaccgtgcagtcctccggacctagggcgggtggggaggagcttgacgaaggcgtggcgaaagacaatgccaaaattgacggagccactcagagcagtcccgcagaacccaaatctgaggatgcagaccgctgtacactgcccgagcatgagagtccctcccaggatatcagcgatgcatgtgaggcggaatcaacagagcggtgtgaaatgagcgagcacccgtcacaaaccgtaagaaaggcattagattcaaattctttggagaacgacgatttatcggctcctgggagggaaccaggccattttaacccagaatccagagaggacactcgtggagggaatgagaagggcaagagtaaagaggactgcacgatgagctag

SEQ ID NO: 228260 - DNA, 1893 bp, synthetic construct
  misc_feature 1..1893: note = Description of Artificial Sequence: Synthetic coding sequence
  source 1..1893: mol_type = other DNA
atgacctcccctgcagcagcacagtctcgggaaattgactgtctgagccccgaggctcagaaacttgctgaagctaggcttgcagctaagcgagccgcacgcgcagaggctagagagattagaatgaaagagctagaacggcagcagaaggaggtgaccagtgcgcaagagaagtactacggcctagacacaaaatggggcgatattgaacagtggatggaggatagcgagcgatattccaggaggagtaggcggaacaccagtgcaagcgatgaagacgagagaatgagcgtcggctcaagggggagcctgcgcagtcaacccgacttggagtatggtggcccttacgcatggaccaacggatatgacggcgagctgtacggcagccagagtctaaatcgcagaagcggcagacctagttgtctctactctgccgcacgtccctccggaagctaccgggcttccgtgctggatgagggctccttcgggggtacccgcagaggatccacatctgggtcacgtgctccttccgaatactccggccacttgaactctagctcgagggcaagttcgagagcatcaagcgccagagcctcccccgtcgtagaagaacgtcccgaaaaggactttactgaaaaaggctccaggaatatgccaggcctgagcgctgccactttggcctccctcggaggcacctcgtccagaagagggtctggcgacacctccatttctatcgacacagaagcaagcattagggaaataaaggagctgaatgaactgaaagatcaaatccaagacgtcgagggcaagtacatgcagggacttaaggaaatgaaagattctcttgctgaggtggaagagaaatataaaaaagctatggtctctaacgcccagctggacaacgagaagaccaactttatgtaccaagtggacacactgaaggatatgttgctggaactagaggagcaactcgccgagagtcgcaggcaatacgaggaaaaaaataaagagttcgagcgtgagaagcatgctcacagcattctccaattccagtttgctgaggtgaaagaggcacttaagcagagggaggaaatgctggaagagatccgtcagttgcagcagaaacaagcgagtagtattagagagatatccgatctgcaggagaccatcgaatggaaggacaaaaaaatcggtgcactggagcgccagaaagagtttttcgatagtgtgaggtccgagcgcgacgacttgagggaagaggtagttatgctgaaggaggagctcaaaaagcatgggataattctcaactcagagatcgccaccaacggagagacaagtgacaccctgaacaatgtaggataccaaggccctaccaagatgaccaaggaggagttaaacgctctgaaatccacaggggatggcacacttgacattcggctgaagaagctggtagatgagagagagtgcttactagaacagattaagaaactcaaagggcaactggaggagcgccaaaaaataggaaaacttgacaacctaaggtctgaggatgacgtcctcgagaacggtacagacatgcacgtcatggatctgcagagagacgccaaccggcagatctcagatctgaaatttaaactggctaagtccgaacaggagataactgcattggaacagaatgtcattcgcctcgagtcccaggtttcgcgatataaaagcgcggcagagaacgctgagaagattgaggacgagcttaaagcagagaagaggaagcttcagcgcgagctgaggagcgctttagataaaactgaggaactggaggtctcaaacgggcaccttgtgaagcgtctggagaaaatgaaagcaaatcgctcggctttactttcccaacagtag

SEQ ID NO: 228261 - DNA, 2427 bp, synthetic construct
  misc_feature 1..2427: note = Description of Artificial Sequence: Synthetic coding sequence
  source 1..2427: mol_type = other DNA
atgacctcaccagccgctgctcagtcacgagagatcgattgtctttcccccgaggctcagaagctcgctgaagcacggctcgccgctaagcgtgcagccagggctgaggcgcgagagattcgcatgaaggagctggagcgccaacaaaaagaagaggactccgagagatactctaggcgttctcgcaggaacacaagcgcatctgatgaggatgaacggatgagcgtgggctccagagggtccttacgcgtcgaggagagacctgaaaaggactttactgagaaaggatcaagaaacatgccaggcctgtctgcagctactcttgctagtcttgggggaaccagtagccgcaggggcagtggggacacctctatttcaatagacaccgaggccagcattagggaaatcaaagagctgaacgagctcaaggaccagattcaggacgtggaaggaaaatacatgcagggcttaaaagaaatgaaagattccttagcggaggtcgaagagaaatataagaaggcaatggtgagcaacgcacagctggacaacgagaagactaatttcatgtaccaggtggacacacttaaggacatgcttttggaactggaagagcagttagcagaatcgcgtaggcagtacgaagagaaaaataaggaattcgagagagaaaagcatgcccactccatcctgcagtttcagtttgccgaggtcaaggaggccctgaaacagcgtgaggagatgctcgaaaaacacggcatcatcctaaactcagaaatagccactaatggagagacatcagatactttgaataacgtgggttaccaaggccctacaaagatgactaaggaggaactaaacgcgctcaaaagcaccggcgatggaactctggggagagccagtgaggtggaggtcaagaacgagatcgtggcaaacgtagggaagagggagatactccacaacacagaaaaggagcagcacaccgaagataccgtgaaggactgtgttgatatagaggtttttcctgctggagaaaatacagaagatcagaagtcaagcgaggacactgccccttttttaggtacgctggccggagccacttacgaggagcaggtccagagccagattttggagtcctcctcactgcccgaaaacactgtccaggttgaatctaatgaagttatgggagcccctgacgataggacaaggactcctcttgagccatccaattgttggtccgacctggacggagggaatcataccgagaatgtgggcgaggctgctgtgactcaagtggaagaacaggcaggaacagttgcctcatgtcctcttggacattcggacgacaccgtgtaccatgatgataaatgcatggtagaagtccctcaagaactggagaccagtaccggacacagccttgaaaaagagtttacaaaccaagaagcggcagaacctaaggaagtgccagctcacagtaccgaggtgggtcgagaccataacgaggaggagggcgaagagactggtctcagagacgaaaaaccaataaaaacagaagtgcccggaagtccagcgggaacagaaggcaactgccaggaggcaaccggcccttccacagtggatacgcaaaatgaacctctggatatgaaagaaccagacgaggaaaaatccgatcaacagggggaagcgctggattcctcccagaagaagaccaagaacaaaaagaaaaaaaacaagaaaaagaaatctccagtccccgtggaaacactaaaggacgtgaaaaaagaattgacatatcaaaacactgatctgagtgagattaaagaagaggaacaggtcaaaagcactgacagaaagtctgcggtggaggcacagaacgaggtgaccgagaatccaaagcagaagatcgcggctgagtccagcgagaacgtagattgccccgaaaatccgaaaattaagctagacggaaagcttgaccaggagggcgatgatgtgcaaaccgcagctgaagaagttttggcagacggtgataccctcgattttgaggatgatacggttcagtcttccgggcctcgtgctggtggggaggagctggatgaaggcgtcgcaaaagacaatgctaagattgacggcgctacgcagtcatctccagctgagcctaaaagtgaggatgcagaccggtgtaccctgccagaacacgaatcccctagccaagacatttccgacgcatgtgaagcagaatctacagagcgttgtgagatgtccgagcacccctcacaaacagtcagaaaagctctggactcaaactcactggaaaacgacgatttgagcgcgccagggcgagagccaggccacttcaatcccgagtccagggaggatacacgtggcggaaatgagaaggggaaatccaaagaggactgtactatgagctag

SEQ ID NO: 228262 - DNA, 1923 bp, synthetic construct
  misc_feature 1..1923: note = Description of Artificial Sequence: Synthetic coding sequence
  source 1..1923: mol_type = other DNA
atggatatgggcacccaggggtccgggaggaagagactccctaacagggaacggctgactgctgaagacgatgccctaaatcagattgctcgcgaggccgaagcaaggctagctgcaaagagagccgcacgtgccgaggctcgcgagatccgaatgaaagagctcgagcggcaacagaaagagatttaccaggtgcagaagaagtattatgggctagataccaaatggggggacattgagcagtggatggaggatagcgagaggtacagcaggcgctcccgacggaacacctcagccagcgacgaagacgagaggatgtcagtggggtcccggggatccctcaggtcccaacccgacctggaatacggcggaccctatgcctggactaatggctatgatggggaactttacggttcccaatctctgaacagaaggagcggccgtccctcctgcctctacagcgccgctaggcctagtgggagttatcgcgcaagtgttctggatgagggctctttcggcggtacccggagagggtctacatccggctcccgggctccgtcagaatacagtggacatttgaactcaagtagtcgggcaagctcacgagcttcttctgcccgagcttctccggtggtggaggagcgacctgagaaagacttcactgagaagggctcgaggaacatgccgggtctgtctgctgctaccctggcttcgctgggcggaactagttcccgtagggggagcggggataccagcatcagtattgacaccgaggcctctatccgcgaaatcaaggagttgaatgagctcaaagaccagatccaagatgtggaaggtaaatacatgcagggactcaaggagatgaaggatagtcttgccgaagtcgaggagaaatataagaaagccatggtctctaacgcgcagttagataatgaaaaaactaattttatgtatcaggtcgacaccttgaaagacatgcttctagagctagaggagcagctcgcagagtctagaaggcagtacgaggagaagaacaaggagttcgagcgagaaaaacatgcccacagtattctgcagtttcagtttgcagaagtcaaagaggcgcttaaacagagagaggaaatgctggaagaaattcgacagttgcagcaaaagcaggcgtcgtccattagggagatcagtgacctccaagagacaatcgagtggaaagataagaaaattggggctttggagcggcagaaggagttcttcgattcggtgagatctgagcgcgacgatctacgtgaggaagtcgtcatgctcaaagaggaactcaagaagcatggcattatcttgaactcagagattgccactaatggagaaacgtccgacactctaaacaacgtcgggtatcaaggtcccacaaaaatgaccaaagaggaactgaatgcactgaaatctaccggcgacggcaccctggacattcgactaaagaagctcgtagatgagcgagagtgccttttagagcaaatcaaaaagcttaagggtcaacttgaagagcggcaaaagatcgggaagcttgacaacctgcgctccgaggacgacgtactggaaaacggtactgacatgcatgtgatggaccttcagagggacgctaatcgacaaattagcgatcttaagttcaagttggctaaaagtgagcaggagatcacagctctcgagcaaaatgttattagactcgaaagtcaggttagcaggtataaatctgcggcagagaacgctgagaagatagaggacgagttgaaagcagaaaaaaggaagctccaacgcgaattgaggtcagcacttgacaagaccgaagagctggaagtctcaaacgggcaccttgtgaagagactggagaagatgaaggctaataggtccgcgctgcttagccagcaatag

SEQ ID NO: 228263 - DNA, 2166 bp, synthetic construct
  misc_feature 1..2166: note = Description of Artificial Sequence: Synthetic coding sequence
  source 1..2166: mol_type = other DNA
atgggcacccccgctagcggaagaaaaaggacacctgtgaaggacagattttccgccgaggacgaagcactgagcaatatcgcccgagaggccgaggcacgattggcagctaagagggcggcacgcgcagaagccagggatataagaatgcgagagctcgaaaggcagcagaaagagtattcgctgcactcttttgatcgcaagtgggggcaaattcagaaatggctggaggattcagagcgggctcgatatagtcaccggtcatcccatcataggccttacctaggagtggaagacgctctgagcattcgcagcgttggctctcaccggtacgacatgtttaaggataggagctctcgtcttagctccctcaaccattcatacagccatagtcatggcatgaaaaagaggtctagtgactctcataaagacctgctgtctggcctttacttcgaccagcggaactactctagtttgcggcatagcaaaccgacatctgcatattacactcgacagagcagcagtctatactctgaccctctggctacttacaagtcagatcgcgcttcccctacagcaaacagtgggctgctcagatctgccagcttagcctccttatataacggcggtctgtacaatccctacggcccaagaacaccgtcagagtgctcctactacagcagccgtatctcttctgccagatctagtcctggctttacgaatgatgataccgcgtctatcgtctcttccgatagggcttccaggggaaggcgtgagagtgttgtgtctgcggcagattatttctctcggtccaatagaagaggctctgttgtgtctgaagtcgacgacatttcaatccctgacctatctagcctagatgaaaagtctgacaagcagtatgctgagaactacacccgaccctccagccgtaactccgcctccgcaacgacacccctgtcgggcaattcttctcgccgaggctctggggatacttcctctctcattgatcctgatacctcgctcagcgagctgagggacatatacgacctaaaagaccagatccaggacgtggagggaaggtacatgcaggggctaaaggagttgaaagaaagtcttagcgaagtagaggaaaaatacaagaaagctatggtatcaaacgcacagctggacaacgaaaaaaacaaccttatctaccaggtggacaccctgaaggacgtcatcgaggagcaggaggagcagatggcggaattctacagagagaacgaggaaaagtctaaagaactggagcgccaaaagcacatgtgttccgtcttgcagcacaagatggaggagttgaaagagggtctgagacagcgcgatgagcttatcgaagaaaagcagagaatgcagcagaaaatagacaccatgacaaaagaagttttcgatctgcaggagaccctcctctggaaggacaaaaagatcggggctttggagaagcagaaggaatacatagcttgtttgcggaacgagcgggatatgctgagagaagagcttgcagatctccaggagactgtcaagactggggaaaagcacggtcttgtgattattcctgatggcacgccaaacggggacgtgtctcacgaacctgtggccggagccatcaccgtggtgtctcaggaagctgcccaagtcctggagagtgccggagaaggcccactcgatgtgcgccttcggaagctggccggtgagaaggaagagcttctcagccaaatccgcaagctgaagcttcaactggaggaggagcgacagaagtgctctagaaatgatggcacagttggagacctggctggactacaaaacgggagcgatctacaatttatcgaaatgcagagagatgcaaatcggcagatatcggagtataaattcaagctctcgaaggcggagcaggacatcactacactcgagcagagcatctcccggctggaaggtcaagtgctaaggtacaagactgcagctgagaatgcggaaaaggtggaggacgaactcaaggccgaaaagcggaaactgcagagggagctgcggacagcattggacaaaattgaggaaatggagatgactaactcccatcttgcgaagaggctcgaaaaaatgaaagctaataggacggccctactcgcacagcaatag

SEQ ID NO: 228264 - DNA, 1203 bp, synthetic construct
  misc_feature 1..1203: note = Description of Artificial Sequence: Synthetic coding sequence
  source 1..1203: mol_type = other DNA
atgggaacccctgcttcaggtaggaagcggacacctgtgaaggaccgattcagtgcggaggacgaagcgctgagcaatatagcccgagaggcagaagccaggctcgcagcaaagagagcggcacgagcagaagcacgggatatccgcatgcgcgagctcgagcggcagcagaaggaactggacgaaaagagcgataagcaatacgcagagaactataccaggccatcctcgcggaatagcgcttctgcaaccacaccactgagcggcaattcaagccgtcgtggttctggcgacacttcgtccctgatcgatcccgacacatccctgtccgagctcagggagtccctgtccgaagtggaagagaagtacaagaaagccatggtgagcaacgctcaactggacaacgagaaaaacaatctgatttaccaggtggatacattgaaagacgtgattgaggaacaggaggaacaaatggcagagttctacagagagaatgaggagaagagcaaggaactggagaggcaaaaacacatgtgttccgtcctgcaacataagatggaagagctgaaggagggtctcaggcaacgagacgagctcatcgagaaacatggactcgtgatcatccccgacggtaccccaaacggcgacgtgagtcatgaaccagtcgcaggagctattacagtggtgtctcaagaggcagctcaggtccttgagagcgctggcgagggacccttggacgtaaggctacgcaaacttgctggcgagaaggaagagctgctcagtcagatccggaaactcaagcttcagttggaggaggagaggcaaaaatgctccaggaatgatggcacagtgggcgacctcgcaggactccaaaatggctccgacctgcaatttatcgagatgcaacgtgacgccaataggcagatctctgaatataagttcaagttgtctaaagctgagcaggacatcactacccttgagcagagcatttcgagactcgaagggcaggttctcaggtataaaacagctgccgagaatgcagagaaggttgaagatgagcttaaggcagagaaacgtaaactacaacgggaactgcggaccgccctcgataagatcgaggaaatggaaatgaccaattcccatctcgccaagcgccttgagaagatgaaggccaaccgtacagcgttgcttgcccagcagtag

SEQ ID NO: 228265 - DNA, 2166 bp, synthetic construct
  misc_feature 1..2166: note = Description of Artificial Sequence: Synthetic coding sequence
  source 1..2166: mol_type = other DNA
atgggcacaccagcctctggaagaaagcgcactccagtgaaagatcgattctcagccgaagacgaggctttgagtaacattgccagggaggcggaagcaagactggcagctaagagggccgctagggccgaagccagagatatccgtatgagagagctggaacggcagcagaaggagtatagcctgcattcctttgatcgtaagtggggacagattcagaaatggctggaggacagcgagagagctcggtactcccacaggagctcccatcataggccttacttaggggtggaagacgccctcagcatccggtcggttggttcccacaggtatgatatgtttaaggataggagttcccgcctgagctccctgaaccattcttatagtcatagccacggaatgaagaagcgttcatccgacagccacaaggatcttttgtctgggctgtatttcgaccaacgaaactactcgtccctgcgccacagcaagccaacgagcgcatattacactcgccagtcatcgtccctctatagtgaccctctagctacctataagtctgatcgggcatctcccaccgccaactctggcttattgcggtccgcctctttggcttcactttacaatgggggactgtacaacccctacgggcctcggaccccctcagagtgctcatactactcttcacgaattagttctgcaagaagctcaccagggtttactaatgacgacacggcttccattgtctcctctgacagagcctctcgtggaaggagagagtccgtcgtgtccgcggctgattacttcagccgttcaaacaggagaggctccgttgtgagtgaggttgacgatattagtatccctgacctgtctagtctggacgaaaagagcgacaagcagtatgctgaaaattatacccgtcccagtagtcggaattccgccagcgcaaccacccccctgtccgggaattcatccaggcggggaagtggtgatacttcctccctgattgaccccgatacctctttgtctgaactccgcgacatctacgatctaaaggaccagatccaggatgtggaagggagatacatgcaggggttgaaggaattaaaggaatctctatccgaggtggaagaaaaatacaagaaagccatggtttccaacgctcaactggacaatgagaagaacaacctgatctatcaagtggacactcttaaggatgttattgaagaacaggaggaacagatggccgaattctatagagagaatgaggagaagtcaaaagaactggagcggcagaagcacatgtgttctgtgcttcaacataagatggaggagctgaaggaaggcttacggcaaagggacgaactcattgaagagaagcagagaatgcagcaaaagatcgacacaatgacaaaggaagtgttcgacctccaggagactcttttgtggaaagataagaaaatcggagccctagagaaacagaaggaatacattgcgtgtttgagaaacgagcgcgacatgctcagggaagagcttgccgatctccaagagactgtaaagaccggagagaaacatggacttgtgataatccccgacggaaccccgaacggtgatgtctctcatgagccagtggcgggagctattaccgtggtttcgcaggaagcagcacaagtgctcgaaagcgccggagagggaccgctggacgtgcgactccgaaaactcgcaggtgagaaggaggagttgctgagccagatccggaagctgaagttgcagctcgaggaggaaagacaaaagtgctcccggaatgatggaaccgtgggggacctcgcaggattacagaacggttcagacctgcagttcatcgaaatgcagagagatgccaatagacaaatcagcgagtacaagtttaagctctctaaagctgagcaggacatcacaacactggagcagagtattagtagactagagggacaggttctgaggtacaagactgctgccgagaatgcggagaaggttgaggacgagctgaaagcagagaaaagaaaactccagagagagcttaggaccgcgctggataaaatcgaggaaatggagatgaccaacagccacctggctaagagactggagaagatgaaagcgaaccgcacagccttgctggcccagcagtag

SEQ ID NO: 228266 - DNA, 180 bp, synthetic construct
  misc_feature 1..180: note = Description of Artificial Sequence: Synthetic coding sequence
  source 1..180: mol_type = other DNA
atgggtacaccagcatctggacgcaaaagaacccctgtgaaagataggtttagtgcggaggatgaggccctgagtaatattgcaagggaagcagaagcgaggttggccgcaaagagggctgccagggctgaagcccgagacatccgaatgcgggaattagaacgacagcagaaagagtag

SEQ ID NO: 228267 - DNA, 180 bp, synthetic construct
  misc_feature 1..180: note = Description of Artificial Sequence: Synthetic coding sequence
  source 1..180: mol_type = other DNA
atgggaaccccagcgagcgggagaaagcgcacaccagtaaaggataggtttagcgccgaagacgaggccctctctaacattgcccgagaggcagaggcccgactcgcagctaagcgcgcagcccgagccgaagctcgtgatatccggatgagggagcttgagaggcagcagaaagaatag

SEQ ID NO: 228268 - DNA, 180 bp, synthetic construct
  misc_feature 1..180: note = Description of Artificial Sequence: Synthetic coding sequence
  source 1..180: mol_type = other DNA
atgggcactccagcctcgggtagaaagaggacacctgtcaaagatagatttagcgccgaggacgaggccttgagcaatatagcccgtgaagccgaagcacgtcttgctgcaaaacgggcagcccgagccgaagcccgagatattagaatgcgagaactggaacgacagcagaaagagtag

SEQ ID NO: 228269 - DNA, 1275 bp, synthetic construct
  misc_feature 1..1275: note = Description of Artificial Sequence: Synthetic coding sequence
  source 1..1275: mol_type = other DNA
atgggcaccccggcatctggtcgaaaaaggactcccgttaaggaccggttcagtgcagaagacgaggctttatccaacatcgctagagaggccgaagcccgtctcgcagcgaaacgggcagccagagcggaggctagagacatccggatgcgtgagttggagcgccagcagaaagagctggacgagaagtctgacaagcagtatgccgagaactacacccgcccatccagtcgtaactcagcatccgctactactcctctgagcggcaattcaagccgcagaggcagcggagatacctcctctctcatcgacccggatacctcccttagtgaactgcgcgatatttacgatttaaaggatcagattcaggacgtggagggcaggtacatgcagggtctgaaggaactgaaagaatctctgagcgaggtagaagagaagtataagaaggccatggtgtccaacgctcagttggataacgagaaaaacaatctcatctatcaagttgatactctgaaggatgtgatagaagagcaagaagaacagatggccgagttttaccgggagaatgaggaaaaatcgaaagaactggaacggcagaagcacatgtgtagcgttctgcaacacaaaatggaggagctgaaggaaggcctacgtcagcgggacgagctaatcgagaagcatggattggtcatcatccctgatggcacgccaaatggagacgtgagtcacgaacccgtcgctggggctatcacagtagttagccaggaggcagcgcaggtgctcgaatctgcaggggaagggcctctcgatgtgcggctccggaagctcgccggagagaaagaggagctgttgtcacagattcgcaagcttaagctccagctggaggaagaacgacagaagtgctcgcgcaacgatggtaccgtcggagacctggcaggcttgcagaacggaagcgatctccaattcattgagatgcaacgggacgccaacaggcagatatcagagtataagttcaagctgtcaaaggcagagcaagacattaccaccctggagcagtcaatcagtagactcgagggccaggtactgcgatacaagacagcagcagagaatgccgaaaaagttgaagatgagcttaaggccgaaaagagaaaattgcagagggagttacgtactgccctagataagatagaagagatggaaatgacaaactcgcacctcgctaaacgtctggagaaaatgaaagcaaatcgcacagcccttctggcccaacagtag

SEQ ID NO: 228270 - DNA, 2316 bp, synthetic construct
  misc_feature 1..2316: note = Description of Artificial Sequence: Synthetic coding sequence
  source 1..2316: mol_type = other DNA
atggctccaggtccctttagctccgccctgctctctcctccacctgccgctctccctttcctgcttctcctctgggccggagcatcgaggggccagccctgtcctggcaggtgtatctgccagaatgtagctccgaccctaacgatgttgtgcgcaaagacgggactgctgttcgtgccacctgccatagatcgaagagtagtcgagctgcgcctcacggacaatttcattgctgccgttcggagaagggactttgcaaacatgaccagcctagtccaccttacactatctcggaacaccatagggcaagtggctgcaggggcattcgccgacctgcgggctctccgcgctctccaccttgactctaatcgtctcgccgaagtgagaggcgaccaacttcgagggcttggaaatctgagacacctaattctgggcaataatcaaattagacgtgtcgagagcgccgctttcgacgctttcctgtccactgttgaagacctcgacttgtcgtacaataatcttgaggccttgccctgggaagccgtcggacagatggtgaacctgaacacccttacacttgatcataacctcatcgaccacattgcggaggggacctttgtccaactacataagttggtaagacttgatatgaccagtaacagactgcacaagctgcccccagacggtctcttccttagaagtcagggcactggacccaaacctccaacgcctttgaccgtgtcttttgggggtaacccacttcactgtaactgcgagctgctttggttgcgcagattgacaagggaagacgatctcgagacatgtgccacgcccgagcacctcacagaccgctacttttggtctatccctgaagaagagtttctttgcgaacctccactaatcacacggcaggcaggcggacgagcgctcgtggtcgagggacaggccgtatcgctccgatgtcgagctgtcggcgatcccgaaccagtcgtacactgggtggcaccagacggcagactcttgggaaatagctcccgaacccgggtgcgaggagatggaaccctggacgtgactattaccaccttgcgggacagtggaacttttacctgcattgcctcgaatgccgctggggaggctaccgcacccgtggaagtgtgcgttgttcctctgccactcatggctccgcctcccgctgcacccccaccattaaccgagcctggcagctccgacattgccacaccgggacggccaggagccaacgatagtgcagccgagcgaaggcttgtggctgccgaattgaccagcaacagtgtccttattcggtggccggctcaacgacctgtcccaggaatccgtatgtaccaggtccagtacaactccagcgtggacgactccctagtatacagaatgatcccttccactagccagacttttttggtgaacgacctcgccgctggcagggcctatgatctttgcgtcctcgccgtatacgatgacggagccaccgccctgccggctacaagagttgtgggttgcgttcaattcaccaccgccggtgatcccgcaccgtgtagacccttacgggctcacttcctcggaggtacaatgatcattgccatcggcggagttatcgtggctagtgtgctcgtatttattgtgctcttaatgattagatacaaggtgtatggggatggcgattcaaggcgagttaagggatcgcggagcctgcctagggtgtcccatgtgtgttcgcagacaaacggtgccggtacaggtgctgcgcaggcccctgcactgcccgcacaggaccactacgaagccctgcgggaggttgagagccaagccgctcctgccgtagccgttgaggcgaaggcaatggaagctgagactgccagtgccgaacctgaggtcgtcctgggaagatctctgggcggaagtgccacctccctctgcctgcttccttcagaagagacatccggcgaggagtcacgcgctgcggtggggcctagacgatcacgctccggggcacttgagccacctacaagcgcccctccgaccctcgccttggtgccgggtggcgcagcagcccgtccccgacctcaacagcgttactcatttgacggtgattatggcgctctttttcagagtcactcctatccgaggcgggcaagacggactaagcgacatcggtcgaccccacatttagacggagcaggcggaggggctgcaggcgaggatggggacctgggtctcggttctgcccgagcgtgtctggccttcactagcactgaatggatgctggaaagcacggtgtag

SEQ ID NO: 228271 - DNA, 2370 bp, synthetic construct
  misc_feature 1..2370: note = Description of Artificial Sequence: Synthetic coding sequence
  source 1..2370: mol_type = other DNA
atggagacacttttgggcggattgctagcttttggcatggccttcgccgtcgtggatgcgtgtcccaaatactgcgtgtgccagaacttgtccgagagcttagggaccctatgcccaagtaaaggtctactcttcgtcccccctgatattgaccggcgaaccgtggagttgagactgggagggaacttcataatccacatcagcaggcaggatttcgctaatatgacaggtctggttgacctgaccctgtccaggaataccataagccatattcaaccgttttccttcctagacctggagagcctgaggtcactgcaccttgacagtaatcggcttccttcccttggggaagatacactgcgagggctagtgaatttgcagcaccttatcgtaaataacaaccaattaggaggcattgctgacgaagccttcgaagattttctgcttaccttggaggaccttgacctgtcgtataataacctgcatggtctcccctgggactctgtgcgcagaatggtcaacttacaccaactatcgctggatcataatttactcgatcacatcgctgaagggactttcgcggatctccagaagttggcccgtctggacctaacgtcaaatagactgcagaagctcccaccagacccaatcttcgcacgatcccaggcttcggccctcaccgccacccctttcgcaccaccattatcttttagtttcggaggcaacccactccactgtaactgcgaactactatggctacggcgactggaacgcgatgatgaccttgagacatgtggcagcccaggaggactgaaggggagatacttctggcatgtacgcgaagaagagttcgtctgcgaacctcccctgattacccagcacacgcataagctcctcgtactggagggccaggccgcaacacttaagtgtaaagccataggtgatccttcacccctgatacactgggttgcccctgatgatcgcttggtagggaactcctctaggactgcagtctacgataatggcacgttagatatcttcataacgacctctcaagactcaggcgctttcacatgtatagcagctaacgccgctggcgaggcaacagccatggtggaagtgtcaatcgttcagctgcctcacctgtctaattccaccagcaggacagctccacctaaaagtcgactatcagacatcaccggcagttctaagacttcccgaggaggtggcggtagcggtggaggggaacctccgaagtcacccccagaacgcgctgtactagtgtctgaagtcaccacgacttctgcccttgtgaaatggagcgtgagcaaatcggcgccaagggtgaaaatgtatcagctacaatacaactgctccgacgatgaggtgttgatataccggatgattcctgcttcaaataaggctttcgtcgtaaataaccttgtgtcggggacaggctacgacctgtgcgttctcgctatgtgggatgacaccgcgaccactcttaccgctaccaacatcgtcggttgcgctcagtttttcacaaaagccgattaccctcagtgccagtctatgcattcacagatcctggggggaactatgattctggttatagggggtattattgtcgcaacattactcgttttcatcgtgatcctcatggtcaggtacaaagtgtgcaatcacgaggctccatctaagatggcagccgcagtgtctaatgtttattcgcagaccaatggagcccagccccctccaccatcttctgctcctgctggggctcccccacaggggcctccgaaggtggtggtgcgaaatgagttactggacttcacagccagtctggcacgcgctagcgactcaagtagctcgtcaagtctcgggagtggggaggccgcaggcctcggcagagcgccttggcggattccacctagcgcacctagacctaagccttcactggatcgcttgatgggcgcatttgcaagtctcgacctgaagagtcagcgcaaggaggaattgttggactctcgcacgcccgctgggagaggagccggaacctctgcccgagggcatcatagcgatcgagaacccctcttgggcccacctgccgcacgagctcggtccctgctccccctccctttggagggcaaggccaaacgaagccactccttcgatatgggcgacttcgcagctgcagctgcgggtggagttgtccctgggggttatagtcctcccaggaaggtcagcaatatctggaccaaacgaagcctgagcgtgaacggtatgctgttacctttcgaagagagtgacctggtgggggcacgtggaactttcggtagttccgagtgggtgatggaatctacagtatag

SEQ ID NO: 228272 - DNA, 1887 bp, synthetic construct
  misc_feature 1..1887: note = Description of Artificial Sequence: Synthetic coding sequence
  source 1..1887: mol_type = other DNA
atggcaatactgccactcttgctctgcctcttgcctctggctcctgcttcatctcctccacagtctgctaccccatctccatgtccgcgtcgctgtagatgccagacacagagcctgccgctaagcgtgctttgccccggagctggactcctctttgtacccccttcccttgacaggagagcagccgagctgagactcgctgacaattttatagcttcagtcagacgcagagacctggccaatatgacaggtttgctccacctgagtctttcgaggaacacaattcgacatgtcgccgctggtgcatttgcagacttgagggcacttcgggctctgcacctggacggcaataggcttacctctctcggagagggccagttaagagggttggttaaccttcgtcatctaatcttatctaataaccagctggccgcactggctgccggagcactcgatgactgtgcagagaccctcgaagaccttgacttatcctacaacaatttggagcaacttccctgggaggctctgggcaggcttgggaacgtaaacactctgggtctcgaccacaatctgcttgcctcagtgccggcaggcgcatttagcaggctacataagctggctaggctggatatgacatctaaccggttgactaccataccccctgatcctttattctcaaggcttccactcttggcacgcccaagggggagtccagcttccgctctggttctagcttttggcggtaatccgctgcactgcaattgtgagttggtctggctgcggaggctggctcgggaagatgatttggaggcctgtgcctccccccctgctttaggtggaaggtatttctgggcagtcggtgaggaggaatttgtctgcgaacctccagtggtgacccatcgctctcccccacttgctgtgccagcaggacgccctgctgctcttcggtgtcgcgctgtgggcgatccggaacctcgggttagatgggtatcaccccagggtaggctactgggaaactcctctcgcgcacgagccttcccaaacggcacgctggagctcctagtgacagagcctggcgacgggggaatcttcacttgcatcgccgctaacgccgctggagaagctaccgccgctgtagagctcactgtggggccacctcctcccccacaattggcaaactccacatcgtgtgaccctccacgggatggggacccagacgcactgacaccgcctagcgcagcttctgcatctgccaaggttgctgacacaggtcctcccacggatcggggtgttcaggtaactgagcacggggctaccgcagcgttagttcagtggcctgaccaacgccctatcccaggcatccgtatgtatcagattcagtacaactcgagcgccgatgacatactggtctaccggatgatccccgctgagagtaggtcttttctgctgaccgacctggccagcggcaggacatatgatctctgcgtgctggccgtctatgaagattctgccactgggctcacagcaactaggcccgtaggctgtgccaggttttcaacagaacccgcacttagaccgtgtggtgctcctcacgctccttttctcgggggaaccatgattatcgcattgggtggcgttattgtagcctctgtactcgtcttcatctttgtgctcttaatgagatacaaggtccatggcggtcagccccctggtaaggcaaaaatacctgctcccgtatcttccgtctgtagccagactaatggggcactgggccctaccccaacaccagctccccctgctccggagcccgctgctctgagggctcacaccgttgtccagctagactgcgaaccctgggggcctgggcatgagccagtcggtccttag

SEQ ID NO: 228273 - DNA, 1887 bp, synthetic construct
  misc_feature 1..1887: note = Description of Artificial Sequence: Synthetic coding sequence
  source 1..1887: mol_type = other DNA
atggcgattctgcctctccttttgtgtttgctgcccttggcacccgcatcctcacccccacaatctgccacccccagcccatgccccaggcggtgccgctgtcaaacacaatccctgcctctgtcagtgctgtgtccaggagccggactgctgttcgtgccaccgagccttgatcgccgtgcagcagagcttaggttggctgacaattttatcgccagcgtgagaagaagggatctggcaaatatgaccggacttttgcacctgagtctcagcaggaatactattcggcatgtagcagccggagcattcgccgatctgcgtgcactgcgcgcactccaccttgacggaaaccgactgacctcccttggcgagggccagttaaggggacttgttaacttgcgacatctgatcttgtctaacaaccaactggccgcactggcagcaggagctctcgatgactgcgctgaaaccctggaagacctagacctgagctacaataacctcgagcagctgccttgggaggcactcggaaggctcgggaacgtcaatacgcttgggctggaccacaaccttcttgcatccgtgccagccggagccttcagcagactgcataagctggcaagactggatatgacgtcaaacaggctaactaccatccctcctgatcccttattctccagactgcccctactagcaagaccaagaggttctccagcatccgctctcgtgctggcattcggaggtaaccctctgcactgtaattgtgagttagtgtggctgagacggttggcaagggaggatgatctggaggcctgcgcctctcccccagcactcgggggacgatacttttgggcagttggggaggaagagttcgtctgtgagccacctgttgttacccacaggtctcctccactggctgtgcctgcgggacggcctgcggcactccggtgccgggctgtaggagacccagaaccaagggtgcgctgggtgtctcctcagggacgtctgctcgggaatagctcacgagctagagcattcccgaacgggacgctggagctcctcgtcactgagcctggtgatggcggaatctttacatgcattgctgcaaacgcagccggagaagcgacagcggctgttgaactgacggtcggcccaccccctcctcctcagctggccaatagtaccagctgcgatccccctagagacggagaccctgatgcattgactcctccctctgctgcttccgcatccgccaaggtggccgacacagggccaccaaccgaccgaggcgtgcaggttaccgaacacggcgctacggcggcactcgtgcaatggcccgatcagagacctataccaggcatcagaatgtaccaaatccagtacaactccagcgctgacgacatcctcgtttaccgcatgattccagcagagtctagatcctttctacttaccgatctggcaagcgggaggacatatgatttatgcgtgctcgccgtgtatgaggactccgccactggccttaccgccacacgtccagttggttgtgcgagatttagcactgaacccgcattgcggccttgcggggctccacacgcaccatttttaggaggcactatgatcattgctctgggaggggtgatcgtcgccagcgtcctcgtgtttatcttcgtgctgctgatgcgttataaggtgcacgggggtcagcctcctggtaaagcaaagatacctgcccctgtctcatccgtgtgctcccagacaaatggggcattgggcccaactcccacaccggctccacccgcaccagaaccagctgcactgcgcgctcataccgtcgtgcagctggactgcgaaccctggggccctgggcacgagcctgtggggccatag

SEQ ID NO: 228274 - DNA, 1908 bp, synthetic construct
  misc_feature 1..1908: note = Description of Artificial Sequence: Synthetic coding sequence
  source 1..1908: mol_type = other DNA
atggctccccctctgttgctgctccttctggccagcggggcagccgcttgcccactgccatgtgtgtgtcagaatctttctgagtcgctgtcaactctgtgcgcgcaccgtggcctgcttttcgtcccacccaatgtggatcgcaggactgttgagttgcggctagccgataattttatccaggcccttgggccaccagattttagaaacatgactggcctggtcgatctgactctgtctcggaacgccataacaaggatcggcgcaagagcgttcggcgatctggaatctttacgttctcttcatctcgatggtaatagactcgtggagctcggaacaggaagcctgagagggcctgtgaatctccagcatttgatccttagcgggaatcagctgggcaggatagccccaggcgcattcgatgactttctggagtctctcgaggaccttgacttgtcctataacaatctccgacaggtaccctgggccggtattggagcaatgccggctctccatacgctcaatctagaccacaatctgatcgacgcactgccaccaggtgcctttgcccagctgggacaactgtctcggctggacctcacatccaaccggctggctaccctcgcgccagatcccctgttcagccgaggacgggacgctgaagctagtcctgctcctctggttctctcgttctctggaaatcccctccactgcaattgtgagctcctgtggctacgcagacttgcccgtcccgatgatctcgagacttgtgcatctcctccgggtctggccggtcgctacttctgggcagtgccagaaggggagttctcctgcgaacctcccctaatcgcccgtcacactcagaggctgtgggtactggagggccaacgcgctaccttaaggtgtcgagccctgggcgacccagctcctacgatgcattgggtgggcccagacgaccggctggtgggcaacagctcacgagccagggcctttccaaacgggaccttggagataggggttacaggggcaggggacgcgggaggatatacatgtatagcaactaatcccgcaggagaagcaaccgcccgtgtcgaactgcgagttctcgccctgcctcatggaggcaattcatcagctgaaggtgggagacctggcccttctgacatcgccgcatctgcccgtaccgcagcggagggtgagggaacactggagtcggaacccgctgttcaagtgacagaggtgacggccactagtggattagtgagttgggggcctggacggcctgccgaccccgtttggatgttccaaattcaatacaacagtagtgaagatgagactctgatctaccgcattgtccccgcaagctcccatcactttctgctcaaacacctggtgccgggtgccgattatgatctttgcctgctcgctttgagccccgctgccggtccatccgacctcacagctacccggctgttaggatgcgctcatttctctaccctgcctgcctcccctttgtgccatgctttacaggcccatgtgctgggcggaacactgaccgtagcagtgggaggcgtgctggtggccgctctcctggtattcacagtagccttgctggtgagaggcaggggcgctggaaatggcaggctgcctcttaaacttagtcacgtgcagtcccagacaaacgggggaccatcacctactccaaaagcccacccccctagaagtcctcccccaagaccacagaggtcatgttctctggacctaggcgacgctggatgctacggctacgcccgtcgcttaggcggagcctgggcacgcaggtctcacagcgtgcacggcggtctgctgggtgcagggtgccgcggagttgggggtagcgccgagagactggaggaatcagtggtgtag

SEQ ID NO: 228275 - DNA, 2160 bp, synthetic construct
  misc_feature 1..2160: note = Description of Artificial Sequence: Synthetic coding sequence
  source 1..2160: mol_type = other DNA
atggaaaaaattttgttctacctttttctgattggcattgccgtaaaagcacagatttgccctaaacgatgcgtgtgccaaattctgtcccctaatttggccaccttatgtgctaagaagggcttactgttcgtgcctccgaatatcgatcgaaggactgtggagttgcggctggcagataacttcgtaaccaatattaaacgcaaagactttgccaatatgacctcgttggtcgacctgactctgagcaggaacaccatctcttttattaccccacacgcatttgcggatctgcggaacctcagagcacttcacctgaacagcaataggctcacaaaaatcaccaatgacatgttctccggactgagtaacctgcatcacttgatcctgaacaacaaccaactgacactgatctcatcaactgccttcgacgacgtgttcgcccttgaagaattggatctctcttacaacaacttagaaaccattccttgggacgccgtggaaaaaatggtcagcctgcacaccctttctctcgaccacaacatgatcgataacatacctaaaggcactttttcccatttacacaaaatgaccaggctggatgtcacaagcaataagctgcagaagctgcccccagacccactgtttcagcgggctcaagtgctggccactagcggtatcatatcacctagcactttcgccctgtcctttggcggtaacccactgcactgcaattgcgagcttctttggcttcgtcgcctgtcacgcgaggatgacctcgagacatgcgcatcccctcctttgctcacagggaggtatttttggtccatcccagaagaagagtttctgtgtgaaccgcctctgatcacccgccacacacatgaaatgagggtgctagaagggcagcgcgctaccctgcggtgtaaggcccgaggggatcccgaacctgccatccactggatctccccagaaggcaagctgatttctaatgcgacccgctccctcgtctatgacaacggtaccctggacattctcattactactgtgaaggacaccggcgctttcacttgtatcgcgtccaatcccgctggcgaggccacccaaattgtggacctgcatatcatcaaactgcctcatttgcttaactctactaaccacatccacgagcccgaccccggtagctccgacattagcacctccactaaatctggatccaacaccagtagcagcaatggggacacgaagctttcccaggataaaatcgtggtagccgaagctacctcatctacagcattgctaaaatttaactttcagcgcaatattcctggaattaggatgtttcagatccaatacaatggaacatatgacgacacactggtgtaccgcatgatacccccaacatccaagacattcctggtgaacaatctggcagccggaactatgtatgatttatgtgtgctggccatttatgatgacggaatcacctctttaaccgcaacgcgtgtggtaggatgcattcagtttaccacggagcaggactacgtgcgatgtcactttatgcagtctcagttcctcgggggaactatgataattatcatcggagggattatcgtcgcctcagtactggtctttatcattattctcatgatccgttacaaggtgtgtaacaacaacgggcagcacaaagtcactaaggtctcaaatgtttactcccagacaaatggcgcacagatccagggctgctccgttacccttccacaatccgtcagcaagcaggccgtgggtcacgaagagaacgctcaatgttgcaaggccacgtccgataatgtgatccagagctctgagacctgtagctctcaggatagtagcacgaccactagcgcactgccaccaagctggacgtcatctacaagcgtgagccagaagcagaagaggaagacaggaactaagccaagcacggaacctcaaaacgaagctgttactaacgtggagtcccagaataccaatagaaataattccactgctctgcaactggcctcacgacctccagacagcgtgaccgagggaccgacaagcaaacgcgctcatatcaagccaaacgccctattgaccaacgtggatcagatcgtccaagagacccagcggctagaactgatctag

SEQ ID NO: 228276 - DNA, 1863 bp, synthetic construct
  misc_feature 1..1863: note = Description of Artificial Sequence: Synthetic coding sequence
  source 1..1863: mol_type = other DNA
atgcaggtaagcaagaggatgttggcagggggagtgaggtccatgccatcacctctgctggcctgctggcagcccatcctgctcctggtgctgggctccgtcctctcgggtagcgctaccgggtgtcctcctagatgcgagtgttctgcccaagaccgcgcagtgctgtgccaccgcaaaaggttcgtggccgtgccagaaggcatccccacagagactcgccttttggacttaggtaaaaatagaatcaaaactctgaatcaggacgaattcgcatcctttccacacctggaggaattggaacttaatgagaatatcgtgtccgctgtagagcctggggctttcaataacctgtttaatctaagaacactcggcctgcgctccaacagactgaaactgatcccgttgggggtctttactggactgtctaacttgaccaagcttgacattagcgagaataaaatagtcatccttctggactacatgtttcaggatctgtataacctcaaatctctggaggtgggcgataacgatctggtgtacatcagccaccgagccttcagcggtctcaatagccttgagcaactcacactggagaaatgcaacttaacgtctatacccacagaggccctgagccatctacatggtctcatcgtcctgcgtctgcgccacctgaacatcaacgccattcgcgactacagctttaaaagactttatcgcctgaaggtcttggagatttcacactggccctacctggacactatgactccaaattgcctctatggactaaacttgacctcgctgtccattactcactgcaacctcaccgccgtgccctacttggccgtccgccacttggtttacctgaggttcttaaatctatcctacaaccctatttccacaatagagggctcaatgctgcacgagctcctcaggttgcaggagatccagctggtcggtggccaattggcagtggtggagccctacgcatttaggggacttaattacttgagggtactgaacgtatccggaaatcagctgacaacattggaggagtccgtcttccactcagtcggcaacctggagactcttatcttagattcaaaccctctggcctgtgactgcaggctgctgtgggtcttccgcaggaggtggcgtctgaactttaaccgtcaacagcccacatgcgctacccccgaattcgtacaagggaaggagtttaaagactttcctgacgtgctcctgccaaattacttcacatgccgtagggcacgcattcgcgatcggaaggcccaacaggtgtttgtggatgagggtcacacggtgcagtttgtgtgccgggctgatggtgacccccctccagctatcttgtggttaagtcctaggaaacacttggtgtccgctaaaagtaacgggaggttgactgtcttccccgatggtacgcttgaagtgcgctatgcgcaggtccaggataacggtacatatttgtgtatagcggctaatgccggaggcaacgacagtatgcccgctcacttgcatgtgcggagttacagtccggattggccgcatcagccaaataaaacattcgcttttatctctaatcagcccggtgagggtgaggctaatagcaccagggccacagtcccatttcctttcgatattaagactctcatcattgctaccacgatggggttcatctcctttctcggagtcgtgctcttttgtcttgttctcctcttcctgtggagccggggaaaggggaatacaaaacataacatcgagatcgagtatgtgccacgcaagagtgacgcagggatttcttcagccgatgcacctcgcaaattcaatatgaaaatgatttag

SEQ ID NO: 228277 - DNA, 168 bp, synthetic construct
  misc_feature 1..168: note = Description of Artificial Sequence: Synthetic coding sequence
  source 1..168: mol_type = other DNA
atgctcgcaggcggagttaggagcatgccctccccattgctcgcctgttggcagcccatactgctacttgtactcggatcagtgctaagcgggtccgccacggggtgcccacccagatgcgagtgttcagctcaggacagggccgtgctttgtcatcggaagcgttag

SEQ ID NO: 228278 - DNA, 1845 bp, synthetic construct
  misc_feature 1..1845: note = Description of Artificial Sequence: Synthetic coding sequence
  source 1..1845: mol_type = other DNA
atgctggctggtggggtaaggtccatgcctagccctctcttagcttgttggcagccgatactgcttctcgtcctgggatctgtactgtcaggatctgccacgggctgtccccctaggtgtgagtgtagcgctcaggatagagccgtactttgtcaccggaagcggtttgtggcggttcccgagggaatccccaccgagaccaggctccttgacctagggaagaatcgaatcaagactctcaatcaggatgagtttgctagctttcctcatctggaggagctcgagctaaatgaaaatattgtgagcgccgtggagcctggcgcttttaataatctcttcaaccttcgaactttaggtttaaggtcaaacagactcaagcttattccccttggggtattcactggcctgagcaacttgacaaagttggacatctctgaaaacaagatagtgatattgcttgactacatgttccaggacctctataatcttaaatccctcgaagtcggggataacgacctcgtgtatattagtcatcgggcttttagtggactgaacagtttggagcaactcaccttggagaaatgtaacctgacttctatcccaaccgaggctctgtctcatctgcatggacttatagttctcaggcttaggcacctgaatattaacgcaatccgggactattcattcaaacgcttataccgcctcaaggtcttggaaatatctcactggccatatctggatactatgacccccaattgcttatacgggctgaatctgacgtcactatccataacacactgcaacctcaccgccgttccatatctggccgtccggcacctggtttatctgcggtttctgaacttaagctataaccccatttctacaatcgaagggagcatgctgcatgagctcttacgcctgcaagaaatacagctggtggggggacaactggcagtggtggaaccctacgcctttagagggctgaactacctgcgcgttctgaacgtgagcggaaaccagctgaccaccctcgaggagtcagtgtttcattctgtggggaacctggagacactcatccttgattcaaaccctctcgcctgcgactgtaggcttctttgggtgtttcggcgacgctggcggctaaatttcaaccggcagcagcccacttgtgccactcccgagtttgtacaaggcaaggagtttaaagactttcctgatgttctgctgcctaattatttcacatgcaggcgcgcacgcatcagagataggaaagcccagcaagtgtttgttgatgaaggacataccgttcagttcgtgtgcagagcagatggcgatcctcctcctgctattctgtggcttagcccaagaaaacatctggtttctgccaagtccaacggacgtctgacagtgttcccagatggaacactggaggtgcggtatgcccaggtgcaggataatggcacttacttgtgtattgccgcaaatgctggcggtaatgacagtatgcctgcccacttgcacgtgaggagctactcacccgattggcctcaccagcccaataaaaccttcgctttcatatccaaccagccaggggagggtgaggcaaatagtactagagctactgtaccatttcctttcgacatcaaaacgctgatcatcgcaacaactatggggttcatcagtttccttggcgtcgtgctcttctgtcttgtgctcctgttcttgtggagccggggaaaaggcaatactaagcataacatcgaaatcgagtatgtccctagaaaatctgacgccggtatctcctccgctgatgctcctcggaagtttaatatgaagatgatctag

SEQ ID NO: 228279 - DNA, 1821 bp, synthetic construct
  misc_feature 1..1821: note = Description of Artificial Sequence: Synthetic coding sequence
  source 1..1821: mol_type = other DNA
atgctgcacactgctatttcctgctggcagccttttctcgggctcgcggttgtgctgatcttcatgggtagtaccattggatgtccagcgagatgtgagtgcagcgctcagaacaagagcgtgtcatgtcatagacggagactcattgctatacccgaaggtatcccaatagagactaagatcctggacttgtcaaagaacaggctgaaaagcgtaaatcctgaagaattcatctcatatcccctcctggaagagattgacttatctgataatataatcgccaacgtggaacccggagcgtttaataatctattcaatttgcgatctctgcgcttgaaggggaacagacttaagttagtgcccctcggggttttcacagggctgagtaatctcacaaagctggatatttccgagaataaaattgtgatcctgttggactacatgtttcaggatctgcataacctgaaaagtttggaggtgggggacaacgacctggtctatatcagccatcgcgctttttctgggctgcttagcctcgaacagctgaccctggagaaatgtaacttgaccgccgttccgacagaagccctgagccacttgcgatccttgatttcactgcacctaaagcacctgaacatcaacaatatgccggtgtatgcttttaagcgcctgttccatctcaaacacctcgagatagattactggccactactcgacatgatgcccgctaactctttatacggcctgaatctcacctctctgagcgttacgaacacgaacctgtctactgtgccttttttggcgttcaaacaccttgtctatctgacgcatcttaatttatcttacaatcccataagcaccatcgaagctgggatgttttctgacctcattcggttgcaggagctgcacattgttggggcacaactgcggaccatagaacctcattcctttcaaggcctccgcttcctgagggtgctgaacgtgtcccagaacctcttggagacactcgaggagaacgtgttcagcagcccacgagctctggaggtgctgtcaatcaataacaaccctctcgcgtgcgattgcaggctgttgtggattctccagaggcaacctaccctgcaatttggtggtcaacagccaatgtgtgcaggaccagacactataagagaacggtcgttcaaggactttcattctactgccctgagcttctacttcacttgtaagaaacctaagatccgtgagaagaagctgcagcacctgctggtcgacgagggtcaaactgtgcagctcgaatgcagcgccgacggcgacccccagcctgtcattagttgggtgaccccaaggcgtcggtttattacaaccaagtccaatggcagagctacagtgttgggcgacggcactttggaaatcagatttgcgcaggaccaggacagcgggatgtacgtctgcattgcctcgaacgccgctggcaatgatacgttcacagctagtctgacagtcaaaggatttgcaagcgacagatttctctacgccaaccggacgccaatgtacatgactgattcgaatgatacaattagcaacggaacaaacgctaacacctttagcctggatttaaaaaccatcctggtttctaccgccatggggtgcttcacattcctgggggtggtcctgttttgcttcctgctgttgtttgtttggtccagagggaaagggaagcataaaaatagcatcgatctggaatacgtaccgcgtaagaacaacggtgccgtggtggaaggggaagtggcgggacccaggagattcaacatgaaaatgatttag

SEQ ID NO: 228280 - DNA, 1821 bp, synthetic construct
  misc_feature 1..1821: note = Description of Artificial Sequence: Synthetic coding sequence
  source 1..1821: mol_type = other DNA
atgctccatactgccatttcgtgctggcaaccttttttaggacttgcagtagttttgatttttatggggtcaaccattggttgccccgctaggtgtgagtgcagcgctcagaacaaaagcgtttcctgtcacagacgcagactgatcgcaattcctgagggtatacccatagagacgaagatcttggatctctccaaaaaccgtttaaaatctgtgaaccccgaagaatttatcagctaccctttgttggaggagattgacttgtcagacaacataattgctaacgtggaacctggcgcatttaacaatctcttcaacctgagaagtcttcggctgaaaggtaaccggttaaaactcgtgccgcttggcgtgttcaccgggctgagcaatctcacgaagctggacataagcgagaataagatagtgatcctcctggactatatgttccaggacttgcacaacctcaagagtcttgaagtaggcgacaatgatctggtatatatctcacatcgagcgttttccggcttgctttccttggagcagctgactcttgagaaatgcaatctgactgccgtgccaactgaagccctgagccatctgaggagtctcatcagccttcacctgaaacacctgaatatcaacaacatgcccgtctatgcttttaaaaggctgttccacctcaagcatcttgagattgactactggcctctgctagatatgatgcccgcaaattccctgtacgggctgaacctcacttctctctcagtgacgaataccaatctgtccaccgtccctttcttggccttcaagcatttggtttatcttacacatctgaatttatcttacaaccccatttctactatcgaggccggtatgttcagtgaccttataaggctgcaggaactccatattgttggtgcccagcttcgcaccatcgagccccacagctttcagggactacggttcctccgtgtgttaaacgtgtcacagaacttattagagacactcgaggagaatgtcttttcgtctccccgagccctggaggtactgtcaatcaataataatccactggcgtgcgactgtcggctgctttggatcctgcagagacagccaaccctgcagtttggagggcagcaacctatgtgcgcaggcccagacaccatccgggaaaggtcatttaaggatttccactcgaccgcacttagcttctactttacatgtaagaagccgaagattagagaaaaaaaactccagcacctgctcgtcgacgaggggcaaacagttcagctggaatgtagtgccgatggcgatccccagcctgtgatttcttgggtaacacctcgcaggcgcttcattaccacaaagtcgaatgggagagctacagtcctgggagacgggacactggagattagatttgcccaggatcaggattccggcatgtacgtgtgcatcgcaagcaacgcggcaggcaacgacacgtttacggcctccctcacagtcaagggattcgcgtccgatcggtttctatatgccaaccgcacacccatgtacatgacagactccaacgatacaatctccaacggaaccaacgccaacacattctctttagacctgaagacaattctggtttccaccgctatgggatgtttcacatttctgggggtcgtgctcttttgcttcctgcttctgtttgtgtggagccggggaaaagggaaacacaaaaattccatagacctggaatatgtccccagaaagaacaatggggctgtcgttgaaggagaggtggccggtcccagaaggttcaacatgaaaatgatttag

SEQ ID NO: 228281 - DNA, 1779 bp, synthetic construct
  misc_feature 1..1779: note = Description of Artificial Sequence: Synthetic coding sequence
  source 1..1779: mol_type = other DNA
atgacttgttggctgtgtgtgctctcactcccactgctgctgctcccagcagcacctccacccgctgggggttgcccagctcgctgtgagtgtactgtgcaaacaagagcagtggcttgcactagacggagactgaccgcagtgcctgacggtataccagccgagacacgcctgctggaactctctaggaacagaataagatgcctgaaccccggagacttagccgcattacctgctcttgaggagctggatctgtccgaaaacgccatcgcacacgtcgagccaggtgcctttgcaaatttgcctcgcctacgcgtactgaggctgaggggcaaccagcttaaactgatcccacccggtgttttcactcgtcttgataatctcacactcctggacctttctgaaaataagctagtgattctgctggattacacatttcaggacctgcatagcttacggagactggaagtgggggacaacgatctggtatttgtgtcgagacgcgctttcgccggactgctggcactggaggagctcacgctggagcggtgtaatctgacagccttgtctggggaatcattggggcacctgagatcgcttggggcactgcgcctccgccacctcgccatcgcaagcctggaagatcaaaattttagacggttgcccggactgcttcacctggagatcgataattggcctttacttgaagaagtggccgctggtagcctgaggggtttgaatctgacttcactcagtgtgactcatactaacatcacagcagtccctgccgcagcactgcgacatcaggcccacctcacgtgtctcaaccttagccacaatcctatcagcactgtgcctaggggctcctttagagatctcgtaagactgcgtgaacttcatctagctggagccctgctcgctgtggtggaaccccaggcctttcttgggttacgccagatccgcctgttgaacctcagcaacaacctattgtcaacactcgaggagtcaaccttccatagtgtgaacacccttgaaacacttcgagtcgatggtaatcctctggcttgtgactgtcggcttctgtggattgtgcagcggcgtaagacgctcaacttcgatggaaggctgccagcttgtgccactcctgcagaggtaagaggcgatgccctgcggaacctgcctgatagcgtgttatttgaatatttcgtatgccgtaagccaaagattcgcgagcgacgcctccaaagggtaacagccaccgccggagaagacgtgcgtttcttatgtagggccgagggagaacctgcacctactgtagcctgggtgaccccacaacaccggcctgtgacagctacatctgcaggtagggcccgtgttctacctggtggcacactggagatccaggatgccaggccccaggattctgggacctatacctgtgtggcatcgaatgccggagggaatgacacttacttcgccaccctcaccgttaggcccgagcctgcggcaaataggactcccggtgaagctcataacgagacgcttgccgcactcagggcacccttggatctcaccaccatcctcgtatcaacagctatgggatgtattactttcctgggcgtggttttattctgctttgtgctgcttttcgtctggtcccgcggacggggacagcataagaacaatttcagcgtagaatactctttccgcaaagtggacggacccgcagcagcggctgggcagggaggagcacggaagttcaacatgaaaatgatttag

SEQ ID NO: 228282 - DNA, 2172 bp, synthetic construct
  misc_feature 1..2172: note = Description of Artificial Sequence: Synthetic coding sequence
  source 1..2172: mol_type = other DNA
atgccactcttctttcggaaacggaaaccgtctgaggaagcaaggaaacggcttgaataccagatgtgtctggcaaaagaagccggtgcggacgatatactcgatatttctaagtgcgagttgtctgaaattccttttggcgctttcgcgacctgcaaagtgctgcagaagaaggtgcttattgtccacaccaatcacctgactagcctgttacccaagagctgcagcctgctatctctcgccacaatcaaggttctcgacttgcacgacaaccagctgacggcccttcctgatgatttagggcaactcacagcccttcaagtgctcaatgttgagagaaatcaactcatgcagcttccacgttccataggcaacctgacccaattgcagaccctgaacgttaaagacaataaactgaaggagctgcccgacactgttggcgaactgagatctttaaggacacttaatatctcgggaaacgaaatccagaggctgccacagatgttagcacacgttagaaccctggaaatgctgagccttgacgccagcgctatggtgtacccccctcgggaggtgtgcggcgcaggcacggccgctattctacagttcctttgtaaggagtccggcctagaatattaccctccgtcccagtacctcctccccattctagaacaggatggaatagagaattcacgggatagccccgatggccctacagatcgtttttcacgagaggagttagagtggcagaaccgtttttctgactacgagaagagaaaggagcagaagatgctggagaagctggaatttgaaaggcgtctcgagcttggtcagagggaacatacgcagttgctgcaacagagtagctcccagaaggatgaaattctccagacagtcaaggaagagcagagcaggttagagcagggactctccgaacaccagcgccacttgaacgccgaaaggcaaagactgcaggaacagcttaaacagaccgagcagaacatcagctcccggatccaaaagctactgcaagacaatcagaggcagaaaaaatcttctgagatcctaaaatcgttggaaaacgagagaattcggatggaacagctaatgtcaataactcaggaggaaactgaatccttgcgcaggcgagacgttgcatccgctatgcagcagatgctcaccgaaagctgtaagaatcggctcattcagatggcttacgagtcccagcggcagaacctcgtgcaacaagcttgttcgtcaatggccgagatggatgaacgctttcagcagatcttatcatggcagcaaatggatcagaataaggcaattagccagatcctgcaggaatcggccatgcaaaaggctgccttcgaggcactccaggtaaaaaaagatctcatgcataggcagatacgatcacagattaagttaatagagacagagctcctccaactgacccagctcgagctcaagagaaaaagtctggacactgaaagcttgcaggagatgatcagtgagcagaggtgggccttatcttcccttctgcagcaattactaaaggaaaaacagcagcgcgaggaagagctgcgagagatcctcacagaactggaagccaagagcgagactagacaggagaactattggttaatccaatatcagaggctgctgaatcagaagccactgagcttgaaactgcaagaggaaggtatggagaggcagctggtggcgctcctggaagagttgagcgccgaacactatttacctattttcgcgcaccaccgcctgagcttggatttgctgtctcagatgagtccaggcgatcttgccaaggttggagtgagcgaagccggactgcaacacgaaatcttgcgacgagtgcaggagttgctcgacgccgctcgaatccagcccgaactgaagccacctatgggggaagtcgtgaccccaactgcacctcaggaacctccggagtcggttcggcctagcgcgcctcctgcagaacttgaggtgcaggcaagcgaatgcgttgtgtgcctcgaacgcgaagcacaaatgatcttccttaactgcggacatgtgtgttgctgccaacagtgttgccagcctttaaggacatgcccactgtgccggcaggatattgcccagagactgaggatctaccattcctcctag

SEQ ID NO: 228283 - DNA, 2172 bp, synthetic construct
  misc_feature 1..2172: note = Description of Artificial Sequence: Synthetic coding sequence
  source 1..2172: mol_type = other DNA
atgccactgtttttcagaaagcgcaaacccagcgaggaggccaggaagagactagagtatcagatgtgccttgccaaggaggccggtgccgacgatatcctggatattagcaaatgtgaacttagtgagatcccatttggggctttcgctacttgtaaggtcctccaaaagaaagtcttaattgtgcacaccaatcacctgactagtctcctgcccaagagctgcagcctcctgtctctggccaccataaaggtgttggacttgcatgataaccaactgactgccctcccagacgatctgggccaacttaccgcccttcaggttctcaacgtggagcgcaaccaactgatgcagctcccacgcagcatcggaaacttgacccagctgcagactttgaatgtgaaagataataagcttaaagagctgcctgacacagtcggcgagctcaggagcttgagaaccttgaacatttctggcaacgagatccaacggctgccccagatgttggctcatgtgaggaccctagaaatgctgagcctggacgcctccgccatggtctatccaccccgagaagtgtgcggagcgggaaccgccgcaatcttgcagtttctgtgcaaggagtctggcctggagtattacccccctagccagtaccttttgccaatactcgagcaggacggtatcgaaaattctagagatagtcccgacgggcctaccgaccggttcagccgcgaggagctggaatggcagaataggttttctgattacgagaaacgaaaggagcagaagatgctcgaaaaactcgaattcgagcgacgacttgagcttggccagagggaacacacgcagcttcttcagcagtcaagctctcagaaggacgaaatcttgcagacagtgaaggaggaacaaagtcgcctggaacagggcctctctgaacaccagcgccatctgaatgccgagcgccagcgcctgcaagagcagctgaagcagaccgaacagaatatctccagccggattcaaaaactcttgcaggacaatcaaagacagaagaaatcctcagaaatactgaagtccctcgagaatgagcgcatacgtatggagcagttaatgtctattacacaggaggagaccgaaagcctcagacgccgagacgtggcatccgcaatgcagcagatgctgactgagtcctgtaagaaccgcctgatccagatggcgtatgagtcacagcgacagaatctggtgcagcaggcctgtagctctatggccgagatggatgagcgttttcaacagattctctcatggcagcagatggaccagaataaagcaataagtcaaatattacaggaaagcgctatgcagaaagctgcgttcgaggcattacaagtgaaaaaggatctgatgcatagacaaatcagaagccagatcaaattgattgaaaccgagctgttacagctcacccagctagaactgaaacgcaaatctctggacacagagtctctacaggagatgatatctgagcaacgctgggccctctcctctctgctccagcagctcctcaaggagaaacagcaaagagaagaagagctgcgagaaatcttgactgagttagaggctaaatcagagactagacaggagaattactggctgattcaatatcagagactgctgaaccagaagccgctgtctctgaagctacaggaggagggcatggagcgacagctggtcgcgctcctggaagaattgagcgccgagcactacctgcccattttcgcccaccacaggctgagcctcgacctcctgtcacagatgtccccaggcgacctagcaaaagtgggagtgtcagaggccggattgcaacatgagatccttcgcagggtacaagaactcttagacgcggctagaattcagcccgaattaaagccaccgatgggcgaggtggtgacaccaaccgccccacaggagcctcctgagagtgtgcggccaagcgcccctccagctgagttagaggtgcaggcttctgagtgtgtggtgtgcttggaacgggaagcacagatgatctttctcaattgcggccacgtatgttgttgtcagcagtgttgtcagccacttaggacttgtcctctgtgccggcaggatattgcgcaacggctgaggatctaccattcatcttag

SEQ ID NO: 228284 - DNA, 2172 bp, synthetic construct
  misc_feature 1..2172: note = Description of Artificial Sequence: Synthetic coding sequence
  source 1..2172: mol_type = other DNA
atgcccttgtttttcaggaagaggaaacccagtgaggaggcccgtaagaggttagagtatcagatgtgcctcgctaaggaagctggagccgacgacatccttgatatctctaaatgcgaactctccgaaattccgtttggggcattcgccacatgtaaggttctccagaagaaagtgcttatcgtacacacgaaccacctcacatcactgctgcctaagtcatgtagtctcttaagcttggcaactatcaaggtgcttgacctgcatgacaatcagttgacagcccttcccgatgatctggggcagcttactgctctccaggtgttaaatgttgagaggaaccagcttatgcagttgccgcgaagcattggaaatcttacgcagctgcagacgctgaacgtgaaggacaacaaactgaaagagctccctgatactgtaggggaactccgcagtttgcggacacttaatatttcgggtaacgaaattcagcggttgccgcagatgctcgcacacgtgcggactcttgaaatgctctcactggatgcatccgccatggtttatccaccacgggaggtgtgcggcgcaggtacggctgctattctccaattcctctgtaaagaatctggtctcgagtattaccctcctagtcaatacctcctccccattctggagcaggacggcattgaaaactcccgggactccccggatggtcctaccgatcgattttcaagagaggagttggaatggcagaaccggttcagcgactacgaaaagcggaaagagcaaaagatgctggaaaagttagaattcgagcgccgactggagctgggtcagcgggagcacactcagctcttacagcagtcatctagtcagaaagacgagatcctccagactgtaaaagaggaacagtcacggctggaacagggactttcggagcatcagagacatctcaacgccgagcggcagagactgcaggaacagctgaaacagactgaacagaatatttctagcaggattcaaaaactgctccaggacaatcaacgccaaaaaaagtcctccgaaattctgaaaagtttggaaaacgaacgaatccgaatggagcagctgatgtccattacccaggaggaaaccgaatcgctcaggcgaagagatgtagccagcgccatgcagcagatgttgactgagagttgtaaaaacaggttgatccagatggcttatgagtctcagcgacagaacctggtccagcaagcttgtagcagcatggccgaaatggatgagcggttccagcagattctgagttggcagcagatggaccagaataaagcaatctcccaaatactccaggagagtgctatgcagaaagcagccttcgaggctctccaggtgaaaaaggacctgatgcaccgccagattagatcacagatcaaactgatagagaccgagcttttgcagctgacacagcttgaactgaagaggaagagcttggatacagaatcgctgcaagagatgattagcgagcagagatgggccctgagctccctactgcagcaacttcttaaagaaaaacagcagcgggaagaagaactgcgcgagattttgacagagctggaagcaaagagcgagacacgacaggaaaattactggctgattcagtatcagagactgctgaaccagaagcctttatctttgaagctccaggaagagggaatggaaaggcagctcgtggcactccttgaggagctgtcagctgagcactatctgcccatttttgcccatcaccgtctctctcttgacctgttgtcccaaatgtctcccggagacctggccaaagtgggtgtctctgaggccggattgcagcacgaaatcttacgccgtgtgcaggaattactggatgcagctagaattcaaccagaattaaagccacctatgggtgaagttgtaacccccaccgcgcctcaggaacccccagaatccgtccgaccctccgcgccacctgctgagctcgaggtgcaggcatctgaatgtgtggtctgcctagaacgagaagcacagatgatcttcctaaactgcggccacgtgtgctgttgtcagcaatgctgtcagccactccgaacatgccccctgtgcaggcaggacatcgctcagagactcaggatctatcatagcagctag

SEQ ID NO: 228285 - DNA, 2091 bp, synthetic construct
  misc_feature 1..2091: note = Description of Artificial Sequence: Synthetic coding sequence
  source 1..2091: mol_type = other DNA
atgccactcttctttagaaagcgaaaaccttcagaagaggctaggaagaggctggaatatcagatgtgtctcgcgaaggaagccggtgcagatgacatccttgatatttccaagtgtgagctgtctgagattccatttggtgcttttgctacctgtaaagttttacagaaaaaagttttgatagtgcataccaatcacctcacttcactactgcctaaaagctgctctctgctttccctggcgactattaaggtgctcgatcttcatgacaaccaactgaccgctctgcccgatgacctcgggcaactgactgccctgcaggtgttgaatgttgaacgtaaccagctcatgcagttgccacggtctatcgggaacctgacgcaactccaaaccctcaacgtgaaggataacaaattgaaagagctgcctgacaccgtaggcgagttgagatcactccgcactcttaatatctccggcaacgagatccaacggctgccgcagatgctggctcacgtcagaacactggagatgctaagcttagatgctagcgctatggtctacccaccacgagaggtatgcggggctggaacggccgctatcctgcagtttctctgtaaagagagcgggctggaatactatcccccatcccaatatctactacccattttagagcaggatggaatcgagaattcacgagattccccagacggacccaccgaccgcttctctagggaggagcttgaatggcaaaatcgcttcagtgattatgaaaaaaggaaagaacagaaaatgctggagaaattagaattcgaacggagattagaacttggacagcgggaacacacacagctgttacaacagtcttctagccagaaagacgaaatcttgcagaccgtgaaggaggagcaaagcagactggaacagggactgagcgagcatcaacgccatctaaacgctgagcgacaacgcctacaagagcagctaaaacagaccgagcagaacatttcgagtagaatccagaaactgttacaggacaaccagcggcagaagaaatcctcagagatcctgaaatcactggagaacgaacggattagaatggagcagctgatgagtattacacaggaggaaacagagagcctgagaaggagagatgtggcttctgcgatgcaacagatgttgacagaaagctgcaaaaatcggctgatccagatggcatacgaatctcagcgccaaaacctggtgcagcaggcttgcagcagcatggccgagatggacgaacgctttcagcagatcctcagctggcaacagatggatcagaataaggcgatatcgcagatcctgcaagagtctgcgatgcagaaggccgcattcgaagcgcttcaggtcaaaaaagacctgatgcaccgacagattagaagccaggagatgatatctgaacaacggtgggcactaagctccttattgcagcagcttctcaaggagaaacagcagcgagaagaagagcttcgggaaattctgactgagctggaggcaaagtcagaaacccggcaggagaactactggctaattcagtaccagcgtttacttaaccagaaaccactgtctctgaaactgcaggaggagggcatggaaaggcagcttgtggctctcctcgaggagctgtctgccgaacattatttgcctatttttgctcatcatagactcagtctggacttgctctcccagatgtctcctggcgatctggcaaaggtgggcgtctccgaggcaggactccagcatgagattctccgacgggtacaggaactccttgatgccgctcgtatccagcctgagctcaagccccctatgggagaagtggtgaccccaactgcccctcaggaaccaccagaaagcgtacgcccatcagcgccaccagctgaattggaggtgcaggcctccgagtgtgttgtgtgcctggaacgcgaagctcaaatgatttttctgaattgtggccatgtatgttgctgccagcagtgctgtcagccccttaggacctgtcccctgtgcagacaggacatcgctcagaggctccggatttaccattccagttag

SEQ ID NO: 228286 - DNA, 465 bp, synthetic construct
  misc_feature 1..465: note = Description of Artificial Sequence: Synthetic coding sequence
  source 1..465: mol_type = other DNA
atgttccactgcatcccactgtggcgctgcaatcggcatgttgaatccatagacaagcgacactgttccctggtttacgtgcccgaggaaatctaccggtatgcaagaagcctggaggagctgctcctagatgctaaccagcttagagaactcccagaacagtttttccagctagtaaagcttcgaaagctgggactgagcgacaatgagatacagcgcctgccgccagagatcgcgaacttcatgcagttagtggaactggatgtcagccgcaatgagatcccagagatccctgagtctattagcttctgcaaagcgttacaagtcgctgatttcagtggaaatcctctgactaggctgccagagagtttcccagaattgcaaaacctgacctgtttatccgtgaatgatattagtttgcaaagcctgcccgagaacattggcaagcagaaaacgacaagttag

SEQ ID NO: 228287 - DNA, 1575 bp, synthetic construct
  misc_feature 1..1575: note = Description of Artificial Sequence: Synthetic coding sequence
  source 1..1575: mol_type = other DNA
atgttccattgcattcccttgtggaggtgcaacaggcacgtggagagtatagataagcgacattgcagtctagtgtatgtgcctgaagagatctatcgttacgcacggagcctagaagagctcctcctggatgcgaatcaactgagagaactgcccgaacaatttttccagctggtgaaactgagaaagttagggttatcagataacgaaattcagagactcccccctgagattgcaaatttcatgcagcttgttgaattggatgtttcccggaacgagattccagaaattcctgagtccatttccttctgtaaagctttacaggtggctgatttctcaggtaaccctcttacacggcttccagagtccttccctgaactccaaaacctcacgtgtctgagtgtaaacgacataagcctgcagagcctccccgaaaatattggaaatttgtacaacttggcatctctggagctgcgagaaaatcttctgacctatcttccagattcacttacccagctccgtagactggaggagctggatcttggaaacaatgaaatttacaatctccctgagtccatcggagccctactccatcttaaagacctctggcttgacggtaatcagctgtcagagctgccacaggagataggcaacctcaaaaatctgctgtgccttgatgtctcagaaaaccgccttgagagacttccagaagaaatcagcggtctgaccagcctgaccgaccttgtgatcagccaaaatcttctggagacaataccagatgggatagggaagctgaagaagttaagtattttaaaagtggaccagaatcggctgactcagttgcctgaggccgtcggtgagtgcgagagcttaacggagctggtgttaactgaaaaccagttgctcactttgccaaaatctataggcaagctcaagaaactctctaacctgaacgcagaccgcaataagctcgtgagcctgcccaaggagatcggcggatgttgctccctcactgtcttttgcgtcagggacaacagactaacaaggatacccgctgaggtgagccaagcaactgaactacatgtcttagacgtagccggtaaccgactcctccacttaccgctgagcttgactgccttgaagctcaaggctctgtggctgagtgacaaccaatcacagcccctgctaaccttccagacagataccgattatacaaccggtgaaaagatcctgacatgcgtcctgctaccccagctgcccagcgaaccaacttgccaagaaaatctgccacgctgtggcgctcttgagaatctagttaatgacgtgagcgacgaggcctggaatgaaagagcggtcaaccgcgtctctgccatacggttcgtcgaggacgaaaaggatgaggaggataacgagacccgaaccctactgagacgggcaaccccacatcccggagagcttaagcatatgaagaaaacagtggagaacttgcgtaatgatatgaacgcagctaaggggctggacagcaacaaaaacgaagttaaccatgctatagaccgggttaccaccagcgtctag

SEQ ID NO: 228288 - DNA, 834 bp, synthetic construct
  misc_feature 1..834: note = Description of Artificial Sequence: Synthetic coding sequence
  source 1..834: mol_type = other DNA
atggggaacacaatacgcgcactggtagcgtttattccagcagaccggtgtcagaactacgttgttcgcgatctgagggaaatgccactggacaaaatggtcgatctctccggtagccagcttagacggtttcctttgcatgtttgctcatttagagagctggtgaagctgtacctttctgacaaccacctcaattcactgcctccagagctaggacagttgcagaatttgcagattctggccctcgacttcaacaattttaaggcactgccgcaggtcgtttgcacactgaaacagttgtgcatcctgtatctaggtaacaacaagctgtgtgacctcccgagtgagctgtctctgctgcagaatctgaggacactgtggatagaggcgaactgtcttactcagttgcccgacgttgtgtgcgagctctctcttctgaagacccttcacgccggtagcaacgctctccggctactgcctggtcagcttaggcgcctgcaggagctgcggacgatctggctgtcgggaaacagattgaccgatttcccaaccgtgctcctgcacatgccttttctggaggtgatcgatgtcgactggaatagtatcagatactttcctagcctcgctcatctctctagcctcaaactggtcatttacgatcacaacccctgtagaaacgcaccgaaggtcgcgaagggagtacggcgagtcggccgttgggctgaggagaccccagagcctgatccccgtaaagcccgacgctatgcgctggtgcgggaagagtctcaggagttgcaggcccctgtcccactactgccccctactaactcctag

SEQ ID NO: 228289 - DNA, 4116 bp, synthetic construct
  misc_feature 1..4116: note = Description of Artificial Sequence: Synthetic coding sequence
  source 1..4116: mol_type = other DNA
atgaccgaagagtcgtctgatgtccccagggagcttattgagagtatcaaagacgtcattggcaggaaaattaagatatctgtaaaaaagaaagtaaagttggaagtgaagggcgataaagtcgaaaataaagtgttggtactaactagctgtagggctttcctggtgaccgcacgcataccaaccaaactggaacttaccttctcctaccttgagattcacggcgttgtgtgctcaaaatccgctcagatgatcgtagaaactgagaaatgcagcatctctatgaaaatggcctctcctgaggatgtgtccgaggtgttggcacacattggtacatgtctaagaaagatctttccagggttgtccccagtccggattatgaagaaggtctcaatggagccgtccgagagactagcctcactccaggcattgtgggactctcagacagtggcagagcaaggcccttgcggcggattctcccagatgtatgcctgcgtgtgcgactggctcggattttcataccgcgaagaggtgcagtgggacgtcgataccatatatttaacacaggatacgcgtgagcttaatctgcaggatttctctcatctggaccatcgcgatctgattcctatcattgccgcattggagtataaccagtggttcacaaagctgtctagcaaggacttgaagctttctactgacgtctgcgagcaaattctgcgcgtggtgagccggtccaacagactggaggaactcgtgcttgagaatgctggcctacgcaccgactttgctcaaaaactggcctctgcgctggcccataaccctaactcaggtctacacacgatcaatctcgccggtaatccacttgaggaccgcggtgtgtcttcactttcgattcagttcgccaaactgcccaagggactaaaacacctcaacctgtccaagacgtcattgtcacccaaaggggtgaatagcctgtcccagtcgctgagtgctaacccgctaactgcatccaccctggtgcacctcgatttgagcggcaatgtgttgcggggtgacgacttatctcacatgtataactttctggctcagcctaacgccatagtgcatctcgatctcagcaacacagagtgctctcttgacatggtgtgcggggcactcttaaggggttgtctgcaatacttggcggtgctcaacctgtcccgcaccgtgtttagtcatcgaaaaggaaaagaggtgccaccctcctttaaacaattcttttctagcagcctggccctcatgcatatcaatttgtccggtacaaaattatctccagagccactcaaggccctactgctgggactggcgtgcaaccataacctaaaaggagtctccttggatctgtctaactgtgaactgcggtccggcggtgcccaggttctggaaggatgtattgccgagatacacaacattacctctctggacatcagcgataatggcctggaatccgacttaagtactctgattgtatggctgtcaaagaataggagtattcaacatttagctctgggtaagaacttcaacaatatgaaaagtaaaaatctgaccccagtcttggataacctggtgcagatgattcaagatgaggagtcacctctgcaaagcctctccctcgccgatagtaagctcaaaacagaggtaaccataattataaatgctcttggcagtaatacctctctgacaaaggtggacatcagcggcaatggaatgggggacatgggagccaagatgctagcaaaggctctccaaattaacacaaaactgaggacagtgatctgggacaaaaataacattacagcacagggtttccaggatatagctgtcgctatggaaaagaactatacactgcgcttcatgcctatcccaatgtacgatgcatcgcaggctctcaaaactaacccggagaagaccgaagacgccctgcagaaaattgaaaattacttactgagaaaccacgaaactcgaaaatatctgcaagagcaggcctacagacttcagcaagggatcgtaacgagtaccacacagcaaatgatcgatcggatctgcgtaaaagtgcaagaccaccttaactctctgcgcaattgcggtggcgatgctatccaagaggatttgaaatcagccgagaggctgatgcgtgacgctaagaatagcaaaaccctactccctaacctgtaccatgtcggcggtgcttcttgggcaggggcttcaggactgctctccagccccatacaggagactctggagtccatggccggagaggtgacacgggtggttgacgagcaattgaaggccctgctggagtccatggtggacgcagctgagaatctctgcccaaacgtgatgaaaaaggcacatatacgacaagacctgatccatgcatctacagagaagatttccattcccaggaccttcgttaagaatgtgttacttgagcaatccggaattgacattttgaacaaaattagcgaagtgaaactgacggttgctagtttcctgagtgatcggatcgttgacgaaattcttgacgcacttagtcactgccatcataagctagctgaccacttctcaagaagagggaagactttaccacagcaggaaagccttgaaattgagctagccgaggagaaaccagtgaagcggagtataattacagtcgaggagctgaccgaaatcgaacggctggaagatctcgacacatgtatgatgacacccaagagtaaacgaaagagcatccacagtagaatgctgcgccctgttagcagagcgtttgagatggagtttgatctggacaaggctcttgaggaggtgccaatccatattgaagatccaccatttccctcgctgcggcaagagaaaagatcctccggatttatttctgagttgccttccgaggagggtaaaaaacttgagcatttcaccaagttgcggcctaagaggaacaaaaagcaacaacccacgcaagctgcggtgtgcgccgctaacattgtgagtcaggacggggaacagaatggattgatgggacgggtggacgaaggcgtcgacgagtttttcacaaaaaaagtgacaaaaatggactctaagaagtggagcacccggggttcagagtcgcacgagttaaacgagggcggagacgaaaagaaaaagcgggactctcggaagtcttccggctttctcaatctgatcaaaagccgcagtaaatcggaacgtccacctacgattcttatgaccgaagagccaagcagccctaaaggggcagtgcggagtcctcccgtcgattgtccaaggaaggacaccaaagctgccgagcacaatggaaatagcgaaagaatcgaggaaatcaagacccctgacagttttgaggaatctcaaggcgaagaaatcggtaaagtggagaggtctgacagcaagtcatccccccaggcaggaaggcgttatggcgtccaggttatgggatctggactgctggccgagatgaaagccaagcaagagaaaagggccgcttgtgcccaaaagaaactcggtaatgatgctgtatcccaagacagcagcagccccgcacttagcggcgtggaaaggagtgacggaggcggtgcagtccctaaactgcaccccggactacctgagaaccgattcggcctgggaacccccgaaaaaaatactaaagccgagccaaaggcagaagctggctccagatccagaagctctagtagcacacccacttcacccaagcctctgctgcagtccccaaagccatcacttgctgctcggcctgttatcccacagaagcccaggacagcatcccgcccagatgacattcctgacagtcctagcagccccaaggttgccctacttccacccgtgcttaaaaaagtcccaagcgataaggagagggacggtcagtcctcaccacaacctagtccccgtaccttttcccaggaggtgagtcgcagatcatggggtcagcaggcacaggaataccaggagcagaaacaacggagtagcagcaaagacggtcatcaggggtcgaagtccaacgactcgggtgaagaggccgaaaaggagttcatttttgtatag

SEQ ID NO: 228290 - DNA, 531 bp, synthetic construct
  misc_feature 1..531: note = Description of Artificial Sequence: Synthetic coding sequence
  source 1..531: mol_type = other DNA
atgtacgcatgtgtttgtgattggctgggattttcatacagagaagaggtgcagtgggacgtggatacgatatacctgacgcaggacacccgcgaactgaacctgcaggacttctcacacctggatcatcgggatctgattcctatcattgccgctctggagtacaatcagtggtttaccaaactgtctagtaaggacctgaagttgtctacggatgtatgcgaacagattctgcgcgttgtctcacgaagtaaccggctggaggagttggtgctcgagaacgcagggctgcggaccgattttgctcagaaattggcgagtgccctggcacataacccgaatagcggcctgcataccattaacctcgcgggaaacccactcgaagatagagaaacaaccactaagatcaaacgccagaacgtacccaccgtgctccagacttatctagtggtttgcccctcagattatcagccatgtcctctcccattgggcaaggataattactactcagactttagtcacgacggatag

SEQ ID NO: 228291 - DNA, 3981 bp, synthetic construct
  misc_feature 1..3981: note = Description of Artificial Sequence: Synthetic coding sequence
  source 1..3981: mol_type = other DNA
atgacagaggaatcaagcgatgttcctagagagctgatcgagtccatcaaggatgtgatcggtcggaaaatcaagatctcagtgaaaaaaaaggtgaagctcgaggtcaagggagataaggtagagaacaaagttctcgtgctaactagttgtcgcgctttcttggttactgcacggattccgactaagctcgaactgacgttcagctacctcgagattcacggcgtggtgtgtagtaagagcgctcagatgatcgtggaaaccgaaaagtgctccatttccatgaaaatggcgagtccagaggacgtgtccgaagtgctggcccacataggaacatgtctgcgcaagattttccccggattgagtcctgttagaattatgaaaaaggtatctatggaaccatcagagcggctggcttccctccaagccctttgggattcgcagactgtggcagagcagggcccatgcgggggattctctcaaatgtatgcttgcgtatgcgattggctcggctttagctatcgagaggaggtgcagtgggacgtggatacaatctacctgacacaggacactcgcgaactgaatctacaggatttctcacacctagatcacagagatttgatccccatcatagcagccctggaatataaccaatggtttactaaattatcgtcgaaagatctgaagctgtccactgacgtgtgcgagcagattcttagagtcgtgagcagatccaataggctggaggagctggtactggagaacgcgggattgcgtactgatttcgcccaaaaacttgcatcagccctcgctcacaatcctaacagtggactgcatacaatcaacctggctgggaacccacttgaggatcgcggagtcagttctctttccattcagttcgctaaactgcccaaggggctcaagcacttaaacttgtctaagacctcactgtctcctaagggcgtaaattcactgtcccagtcactgagtgcgaaccccctgaccgcaagcacgctggttcatcttgatctgtctgggaatgtgctgcgcggagacgatttgagccacatgtacaacttcctggctcagcccaatgccatcgtccatctggacctttctaatactgagtgttctcttgacatggtctgtggcgcactcctgcggggatgcctccaataccttgccgtgctcaatctgtcccgtaccgttttctcccatagaaagggaaaggaggtgcctcccagtttcaaacagtttttttcgtcctcgctggccttgatgcatataaatctcagcgggaccaaattatcaccagaacccctgaaagccctgctgttggggctggcatgtaaccacaacttgaagggtgtgagcctagacctgtctaactgtgaactcagatctggcggagctcaagtgttggaaggatgcatcgcagaaatccataacatcacctccttggatatcagtgacaacggcctcgaatcagacctgtcgacactgatcgtgtggctgagcaagaaccgctccatccaacacttagccctaggcaagaacttcaacaacatgaagtctaagaatctgacaccagtactggataatctagtacagatgatacaggacgaggagagcccgctgcagagcctgagcttggccgatagcaagttgaagacagaggtaacaatcataataaatgccctcgggtccaacacgagccttactaaggtagacattagtggcaacggaatgggtgatatgggagccaagatgttggcaaaggctctgcagattaatactaagttaaggactgtcatatgggacaaaaataatataaccgcccagggattccaggatattgcggtcgcaatggaaaaaaattacacactgcgctttatgccaatccctatgtacgatgccagtcaggcgctgaagaccaaccctgagaagacggaggacgctctacagaagattgagaactacctactgcgcaaccacgagaccaggaaatatttgcaggagcaggcctaccggctgcagcaggggatcgttacttcgactacccagcagatgatcgatagaatatgtgtgaaggttcaggatcatttaaattctcttcgaaattgtggaggtgacgccatccaggaagacttaaagtccgcggaacggctgatgcgggacgcgaagaactctaagacccttttacctaacctttaccatgtcggcggagcgtcatgggcaggagcttctggcctcctgtccagcccaatccaggagactctggaatcaatggctggggaagttacccgggttgtagatgagcagcttaaggcactgctcgagtctatggtagatgctgcagagaatctctgccctaatgtgatgaagaaggctcatatacgacaggacctcatccacgcctcaactgagaaaattagcattccaagaaccttcgtcaagaatgtactgctggagcaaagtgggatcgatatccttaacaagatcagtgaggttaagctgacagtggccagtttcctgagtgaccgcatcgtggacgagatattggatgcactgtctcactgtcatcacaagctggccgatcacttttcccgaagggggaagactttaccccagcaagaaagtttggaaatcgagcttgcagaagaaaaacccgtcaagagatccatcattactgtggaagaactgactgagatcgaacggctcgaagatctggatacctgtatgatgacgcctaagagtaagaggaaatcaatccactcacgcatgttgcgacctgtaagcagggccttcgagatggaattcgatttggacaaggcccttgaagaggttccaatccatatcgaggaccccccattccccagcctgaggcaggagaaacggagctcgggctttatttcagagctgcccagcgaggaggggaaaaagctagagcacttcaccaaactccgccctaaacgaaacaagaagcagcaacctacacaggctgccgtgtgtgcggctaacattgtcagtcaggacggggagcagaatgggttgatgggcagagtcgatgagggcgtggatgaatttttcacaaagaaagtgaccaagatggatagcaagaagtggtccacaaggggaagtgagagccatgaactgaatgaagggggtgatgagaagaagaaacgagactcccgcaagagtagtgggttccttaacctgattaagagtcgctctaaatccgaaaggcctccaactatcctgatgaccgaagaaccttcttccccaaagggcgctgtgagatccccaccggtggattgtccccgtaaggacactaaagctgctgagcacaacgggaactctgagagaatcgaggagatcaagacgccagatagctttgaagagtcccagggagaggagattgggaaagtggaacggtcagatagtaagtctagcccccaggctggacggcgttatggcgtgcaggtgatggggtctggacttttggcagaaatgaaggcaaagcaggaaaatagatttgggctgggaacaccagagaagaatacgaaggcagagcctaaggccgaggcagggtccagatcacgctcttctagtagcaccccgacctctccaaagccactactacaatcaccaaagccttccctagccgctcgtccggtcatcccccagaagcccagaactgcgtctagaccagacgatattcctgactcaccaagctctcccaaagtggccctgctgcctccagtgctgaagaaggtccctagtgacaaggaaagggacggacaaagttcacctcagcctagccccagaacgttttctcaggaggtctctcgcagaagttggggacagcaagcccaggagtaccaggaacagaagcaaaggagttcttcaaaagatggacatcagggcagcaaatctaacgactcaggggaagaggctgaaaaggagttcatcttcgtctag

SEQ ID NO: 228292 - DNA, 1116 bp, synthetic construct
  misc_feature 1..1116: note = Description of Artificial Sequence: Synthetic coding sequence
  source 1..1116: mol_type = other DNA
atgggacacaaggtcgttgtgttcgacatatctgtcattcgggctctgtgggagactcgggtcaaaaagcataaggcttggcagaagaaggaagtcgagcgcctggaaaagagcgcgctcgagaagatcaaggaggaatggaattttgtcgctgagtgtaggcgcaaagggattcctcaggctgtctattgcaagaatggcttcattgacacctcagtgcgactgctagacaaaatcgagcgcaatactctaactcggcagtcatccttaccaaaggaccgaggcaaacgttcatctgcattcgtgttcgagctttccggagagcattggacagagttaccagacagccttaaagaacagacccacctgcgcgagtggtatatctccaacactttgattcagattattcctacctacatccaactcttccaggctatgagaattctcgatcttccaaagaatcaaatctctcacttgcccgctgagattgggtgtcttaaaaatctaaaagaacttaatgttggcttcaactatctcaagagtatcccccctgagctgggagactgtgagaatctcgagaggctggactgttccggtaatctagaattgatggagctgcctttcgagctctctaacctgaagcaggtaactttcgtggacatttcagccaacaagttcagctccgtgccaatttgtgtcctccgaatgtctaatctgcagtggcttgatatttcatctaacaacctgaccgatctgccccaggatatcgacagattagaggagctgcagtccttcctgctttataagaataagctgacctacctgccttatagtatgctgaacctgaagaagctgaccttgttagtggtcagtggcgaccatctggttgaacttcccacggccctctgcgactcctccactccccttaaattcgtaagcctcatggacaatccaattgataacgcccaatgtgaagacgggaacgaaattatggaatccgagcgggatcgccaacactttgataaagaggttatgaaggcgtacatagaagacctcaaggagagggagtcagtgcccagctatacaaccaaggtgagcttcagcctccagctgtag

SEQ ID NO: 228293 - DNA, 1116 bp, synthetic construct
  misc_feature 1..1116: note = Description of Artificial Sequence: Synthetic coding sequence
  source 1..1116: mol_type = other DNA
atgggacataaggtcgtggtcttcgacatttctgtcatcagagccctatgggaaacgcgggtgaagaagcacaaggcctggcaaaaaaaagaggtggagcgcctggagaagtcagcccttgagaaaattaaggaagagtggaattttgttgcagaatgtcgtagaaagggaatcccccaggctgtgtattgtaaaaacggatttattgacaccagcgtacgactactggacaaaattgaaaggaacactttaaccagacagagcagcctgcccaaagaccgtggcaaacgcagctcagcttttgtgttcgaactgtctggagagcattggactgagctgcctgacagcctgaaagagcagacccacctgcgggagtggtatatttctaacacattgatacagataattccaacctacatccaactgttccaggccatgcggatcttagatttgccaaaaaatcagattagtcacctgccggctgaaataggctgcctgaaaaatctgaaagagctcaatgtgggcttcaattatctgaagagcatcccaccggagctcggagactgcgagaacctagaacgcctggattgtagcggaaatctcgaacttatggagttacccttcgaactgagcaaccttaagcaggttacttttgtggacatatctgccaataagttctcttctgtgcctatctgtgttcttcgcatgagcaacctgcagtggcttgacatttccagcaacaatttaactgacttgcctcaggacatagatcgcttggaagagctgcagtctttcctactgtataagaataagttaacatacctcccctacagtatgctgaatctaaagaagctgaccctgctggttgtcagcggtgatcacctggtggaattgccaaccgcgttgtgcgattcctccacacccctcaagtttgtcagcctgatggacaatccgatcgacaacgcacagtgcgaggacggaaatgagatcatggaaagcgagcgggatcgccagcacttcgacaaggaagtaatgaaggcttatatcgaggaccttaaagagagggagagcgtaccctcttacactaccaaggtttcattcagcttgcagctttag

SEQ ID NO: 228294 - DNA, 918 bp, synthetic construct
  misc_feature 1..918: note = Description of Artificial Sequence: Synthetic coding sequence
  source 1..918: mol_type = other DNA
atggggggtaccttagcctggaccctcctccttcctctgctgctgcgtgagtcagatagcctggaaccatcatgtacagtgtcctccgccgatgtggattggaacgccgagttcagtgcaacctgcctcaacttctccggtctgtcactctctcttccccacaaccagtccctgagggcgagcaatgtgattctcctggatctctccgggaacggcctccgtgagctgccagttacatttttcgcacacctgcaaaaactggaggtgcttaacgtcctgcggaacccactgagtcgcgtggatggggcactcgctgcgcgatgcgatctcgacctgcaggcagactgcaattgtgctttagagagctggcacgacatcagacgagacaactgctccggtcagaagcccttgctttgttgggacacaaccagttctcagcataacctgtcagccttcctcgaagtgtcatgcgctccaggtctggccagtgctactatcggggctgttgtagtatccgggtgcctgctactgggtttggccatcgccggtccggtactggcttggcgtctttggagatgtcgcgttgcgaggtccagagagctgaacaagccttgggctgctcaggatggccctaagcctggactcggcctgcagccaaggtacggctcacgcagcgcgccaaaacctcaggtcgccgtgccctcttgcccctctacccctgactacgagaatatgtttgttggccagcccgctgcagaacaccagtgggatgagcaaggggcacatccttcggaagacaatgatttctacattaactataaagacatcgatcttgctagccagccagtctattgcaacctccaatcccttggacaggccccaatggacgaagaagaatatgtaatcccaggacactag

SEQ ID NO: 228295 - DNA, 1005 bp, synthetic construct
  misc_feature 1..1005: note = Description of Artificial Sequence: Synthetic coding sequence
  source 1..1005: mol_type = other DNA
atgagagggccatcttggagcagaccgagaccactgctgttactgctcttactgctgtctccctggcccgtctgggcccaggtatccgccaccgcctctccttcaggctccctgggggctcccgactgccctgaagtgtgtacatgtgtaccaggtgggctggcttcatgctccgctctgtccttgcctgccgttccccctggactctcactgcgcctgagggcgctgctgctcgaccataatagagtaagggctctccccccaggagcatttgccggtgcaggagctctgcagaggcttgacctccgggagaatggcctccattccgtgcacgtaagggccttctgggggctgggtgcactacagctgctggaccttagtgctaaccagctggaagctttggccccagggacttttgccccattgcgggcattgcgaaacctttcgctcgcagggaaccgccttgcccgactcgaaccagcagcactgggcgctctcccattgctgcggagcctctccttgcaggacaacgaactcgccgctcttgcacctggtctgctgggcagattgcctgcactcgacgcgctgcacctaaggggcaatccttgggggtgtgggtgcgctctgaggccattgtgtgcctggctccgaagacacccccttcctgccagcgaagcagaaacagtgctgtgcgtctggcccggacgtctcaccttgtcacccttaaccgctttttctgatgctgccttctctcattgcgctcagcctttggccttgagggaccttgcagtggtatacacactgggtcctgcctccttccttgtttctctggcatcctgtctggctctggggagcggcctgacagcatgcagggcccgacgtaggcggctgaggaccgcggcattgcgtccacctcgacctcctgatccaaatccagaccctgatccccacggctgcgcctcaccagccgatcctggcagcccggcagctgcggctcaggcctag

SEQ ID NO: 228296 - DNA, 1923 bp, synthetic construct
  misc_feature 1..1923: note = Description of Artificial Sequence: Synthetic coding sequence
  source 1..1923: mol_type = other DNA
atgctaaataagatgacactgcatccccaacaaatcatgattggacccagatttaatcgtgccctgttcgacccattactggttgtcctgctggcactgcagttactcgtggtggccggacttgtccgcgcacaaacatgcccctctgtttgctcatgttccaatcaattctcaaaggtgatctgcgtgcgcaagaatttacgggaggtgccagacggaatttccacaaatactcgactgctgaacttgcacgaaaaccagatacagattataaaagtcaattcgtttaaacacctgaggcatctggaaatactccaactcagtcgtaaccacatccgcacaatcgagatcggcgctttcaatggcctcgccaacctcaatacccttgagcttttcgacaatcggcttaccaccatcccgaatggcgcatttgtctatttgtctaagcttaaggaactttggctgcgcaacaaccctatcgagagtataccatcatacgcttttaacaggataccaagcctgaggagactggatctgggcgagttgaagaggctgagctacatttcagaaggcgctttcgagggactgtcaaacctgagatatctgaacctagccatgtgtaacctcagggagatcccgaatttgacccccctgatcaagctggacgaacttgatttgtccggtaaccatttgtctgcaatacggcctggcagctttcagggactgatgcacctgcagaagctctggatgattcagtcgcagattcaggtcattgagcgcaatgccttcgacaatttgcagtcattggtggagatcaatctggcgcacaataacctcactctcctgccccacgacttattcaccccccttcatcatctggaaagaattcacctgcaccataacccttggaactgcaattgtgacattctctggctctcttggtggattaaggacatggccccttctaatacagcatgctgcgctcggtgtaacacaccacctaatttgaaaggtcggtatataggagaactggaccaaaattacttcacctgctacgccccagtcatagttgaaccacctgcagatcttaacgtgacagagggaatggccgcagaattaaaatgtcgcgcaagtacctccttgacaagcgtaagctggataactccaaacggcactgtgatgactcacggggcttataaggtgaggatcgcagtgttatccgacggaaccctcaacttcaccaacgtgaccgtgcaggacaccgggatgtatacctgtatggtcagtaattcagtggggaacactactgcaagtgcaacactaaatgtaaccgcagctacgactacgccttttagctacttctcaaccgtgactgtcgaaactatggagccttcccaggacgaggcccgaaccaccgacaataatgttggcccaacaccagtagtcgactgggaaacaactaatgtaaccactagcctgactccacagtcgactaggagtaccgagaaaacttttacgatcccagttactgatataaactcaggaatcccaggtatagatgaggtgatgaagaccactaagatcattattgggtgtttcgtcgctatcaccctgatggccgcagtcatgctggtgatattttacaagatgagaaagcagcaccaccgccagaaccaccatgcgcctactcggaccgtggaaattatcaatgtggatgatgaaatcacaggagatacaccaatggaatcccatttgccgatgccagcaattgaacatgagcatctgaaccactataatagctataaatctccattcaaccatacaacaacagtaaacacaatcaacagcatccattcctcagttcacgagcccctgttaatcagaatgaatagcaaggataatgtccaggaaactcagatttag

SEQ ID NO: 228297 - DNA, 1923 bp, synthetic construct
  misc_feature 1..1923: note = Description of Artificial Sequence: Synthetic coding sequence
  source 1..1923: mol_type = other DNA
atgttgaataagatgaccctgcaccctcagcagatcatgatcggccctcggtttaatcgcgcactcttcgatcctctgctggtcgttctcctggccctccagctgctggtggtggccggactcgtgagagcccaaacatgtcctagcgtctgttcttgttctaatcagttttcaaaggtaatttgtgtacgcaaaaatttgcgggaggtgcccgacggaatttctacaaacacacgcctgctgaacctgcacgaaaatcagatacagataatcaaggtgaacagctttaagcacctgcggcacctggagatcctgcagctgtccagaaatcatatcagaactattgagatcggtgcctttaacgggctcgctaatttgaataccctggagctgttcgacaaccgcctgaccactatcccaaacggtgcatttgtgtatttgtccaagctgaaggaattatggctccgcaataatcctatcgagagcatcccgtcgtacgccttcaatagaatccctagcctcagaagactcgacctcggcgaactgaagcggctctcatacatttcggaaggagcattcgaaggcttgtcaaatctacggtatctgaacttggccatgtgcaacctccgcgaaattcccaaccttacacctttaattaagctggatgagcttgatctatcaggaaatcatctgtccgctatcaggcctggctctttccagggtctcatgcacctgcagaagttatggatgatccaatcccagatccaggtcattgaaaggaacgccttcgataacttacagtcactggtggaaattaatctggcccacaacaatctcactctacttccccacgacctgttcaccccccttcaccacctggagcgtatccaccttcaccacaacccctggaattgcaattgcgacatcctatggctgagttggtggatcaaggacatggccccatccaataccgcctgctgcgcgagatgcaacacaccaccgaatctgaagggtcgctatatcggcgagctggatcagaattatttcacctgttacgcacctgtgattgttgaaccacccgctgatctcaatgtgaccgagggaatggcagcagaactgaaatgcagagcttctacctcactcacatctgtctcctggattacccctaatggaactgtcatgactcatggtgcttataaagtccggatagccgtgttgtccgatggaacccttaacttcacaaacgtgactgtgcaagatactggcatgtacacgtgtatggtgtcaaactccgtggggaacacaaccgccagtgctaccctgaacgttaccgccgctaccacgactccattctcttatttctctaccgtcacagtcgaaactatggaaccctcccaggacgaggcacgaaccacagacaacaatgtcggacccactccggtggtcgactgggagacaacgaatgtgactacctccctgactccccagtctacccgaagcactgaaaaaacatttactatcccggtgacagatattaactccgggattcctggcatcgacgaggtcatgaagaccaccaagatcatcataggttgttttgtcgccatcactctgatggcagccgtgatgcttgtgattttttacaagatgaggaaacaacatcatcgccaaaatcatcacgccccaacaagaactgtggagatcattaacgtggatgatgagatcacaggggataccccaatggagagccatcttccaatgcccgcaattgaacatgagcacctcaaccactataactcctataagtcaccctttaaccatacaacaaccgttaacactatcaactcaatccatagcagcgtgcatgagccactgctaataaggatgaattctaaggacaacgtccaggagactcagatttag

SEQ ID NO: 228298 - DNA, 1923 bp, synthetic construct
  misc_feature 1..1923: note = Description of Artificial Sequence: Synthetic coding sequence
  source 1..1923: mol_type = other DNA
atgttgaataaaatgacattacatccccaacagattatgatcggacctaggtttaaccgggcactattcgaccctcttttggtcgtgctcctagctctccagctactggtggtggccggtctggtgagggctcagacctgccccagtgtgtgctcatgctcaaatcagtttagcaaagtcatctgtgtgagaaaaaacctaagagaagtccctgacgggatctcaaccaatacccggctgttgaacctccacgagaaccagatacagatcatcaaagttaactccttcaagcacctgagacatctcgaaatattgcaactatctcgcaatcacatccggacaattgagataggagctttcaatggactggccaacctgaacacccttgagttgttcgacaaccgattgactaccatccccaatggggcattcgtctatctctccaagcttaaggagctctggttgaggaataatcctattgagagcatccctagctacgcgttcaaccggatcccatctttaagaaggctggacctgggagagctcaagagactctcctacatcagcgaaggcgcatttgagggtctgagtaacctgagatatcttaacctggctatgtgtaatcttagggaaattcctaatctcaccccactgatcaagctggatgagcttgatctgtccgggaatcacctgtccgccattagacctggtagttttcagggacttatgcatctgcagaagctttggatgatccagagccaaattcaggtgatcgagagaaatgccttcgacaatcttcagtcactggtggaaatcaacttggcccacaacaaccttactctgctaccacatgatctgttcactcctttacaccatcttgagcgcatccacctccaccacaacccatggaattgcaattgtgatatactctggctttcctggtggattaaagacatggcaccatctaatactgcctgttgtgcccgttgtaacactccacccaacctaaaaggcagatatattggtgaactcgaccagaattactttacttgctatgcaccagttatagtggagcctcctgccgatctcaacgtgaccgaagggatggctgcagagctcaagtgccgggctagcacttcactgacctccgtctcctggattacgcccaatgggactgtcatgacgcatggagcttataaggtcagaatcgcagtgcttagcgatggtacattaaattttaccaacgtgaccgtccaggatacagggatgtatacttgtatggtgtcaaacagtgtgggaaacactacagcctccgccaccttaaatgtgactgctgctaccacaactcccttttcatatttctcgaccgtgactgttgagaccatggagcccagccaagacgaggccaggacgacagataacaatgtgggtcctacaccagttgtggattgggagaccacgaacgtgaccacttcccttacacctcagtctacgcgaagtacagagaagaccttcacaatccctgtgaccgatatcaacagtgggatcccaggaattgatgaagtgatgaaaaccacgaagatcattataggatgtttcgtggccattactctcatggccgctgtaatgctggtcattttttacaagatgcggaagcagcaccaccgccaaaaccaccatgcccctactcgcacagtggaaattataaatgtagacgatgagattacaggggatacacctatggagtctcacctccccatgccagctatcgaacacgaacatctgaaccattacaactcctacaaaagtcctttcaaccacacaactaccgttaataccataaatagcatccacagcagcgtgcacgaaccattgctcattcgcatgaactcaaaagataacgtgcaagagacccagatctag

SEQ ID NO: 228299 - DNA, 1923 bp, synthetic construct
  misc_feature 1..1923: note = Description of Artificial Sequence: Synthetic coding sequence
  source 1..1923: mol_type = other DNA
atgctgaataagatgactcttcaccctcaacagattatgattggacctcggttcaatagagccctttttgatccgctgcttgttgttctgctcgccctgcagctcctggttgtcgccggactggtacgagctcaaacgtgcccgtctgtgtgcagctgttccaatcagttcagcaaagtgatttgcgttcgtaaaaacctgcgcgaggtcccggacggaatatcaaccaatacgcgactgctcaacttgcacgagaaccagatccagattattaaagtaaatagttttaagcatctgagacacctcgaaattctgcagctgtctcggaaccacattaggacgatcgaaatcggggcttttaacgggcttgctaatctcaacaccttggagctcttcgataaccgccttacgacaatcccaaacggcgcttttgtgtatctttcgaaacttaaggagctttggcttcgaaacaacccaattgagtccatcccctcctatgcctttaaccggattccatcactccgcaggctggacctcggtgagctcaagcggttatcctacatttctgaaggggcatttgagggattgtctaacctgcggtaccttaacctggccatgtgtaacctccgtgagatccctaatctgacaccactgataaaactggatgagctcgacctgagcggaaaccatctgtctgcgattcggccaggatcctttcagggactgatgcacctccagaaactttggatgatacagagccagatccaagtaatcgaaagaaacgccttcgataatctgcagtccctcgttgagatcaacctggctcataataatctgaccctgctgcctcatgacctgttcactcccttacaccacctggagcggatccacctccatcataacccttggaattgtaactgcgacatactgtggctgagctggtggataaaggacatggccccatctaatacagcctgctgtgctcgatgcaatacccctccaaatctgaaaggacgctatatcggtgaactggatcagaactactttacatgttatgcgcctgtgattgttgaacccccagcagacctgaacgttacagaggggatggcagctgagttgaagtgcagagcctccacatcgctcacctctgtaagttggatcaccccgaacgggaccgtgatgactcacggcgcttataaggtcaggatcgcagttctgagtgacgggacactgaacttcacgaacgtcacagttcaggacacggggatgtatacatgcatggttagtaattccgtcgggaacacgacggcatctgctaccctcaacgtcacagctgccaccaccactccattttcctattttagtacagtcacggtagagactatggagccttcacaggacgaagcgaggacaactgataacaatgtgggtcctacgcctgtggtggactgggagacaactaacgtgactacctccctgacaccccaaagtacacgatcaaccgaaaagacattcaccatcccagtgactgatattaacagtgggattccgggaatcgacgaagtgatgaaaacaacaaagattataattggatgtttcgtcgccatcaccttgatggcagctgttatgcttgtaattttttataagatgcgcaagcagcaccaccgacagaatcatcacgccccaacccggactgtggaaatcattaatgtagacgacgagatcaccggagataccccaatggaatcccacctgccaatgccagccatcgaacatgaacacctgaaccactacaacagctacaagtcccccttcaaccatacaaccacagtcaacacaatcaattctattcactcctccgttcatgaacctctgctgataagaatgaatagcaaagacaatgttcaggagacccagatttag

SEQ ID NO: 228300 - DNA, 126 bp, synthetic construct
  misc_feature 1..126: note = Description of Artificial Sequence: Synthetic coding sequence
  source 1..126: mol_type = other DNA
atgctgaataaaatgaccttgcatccccagcagattatgattgggcctcgttttaaccgagccctgtttgatcccctactcgtggtcctcctagctttacaacttttggtcgtagcaggcttatag

SEQ ID NO: 228301 - DNA, 4614 bp, synthetic construct
  misc_feature 1..4614: note = Description of Artificial Sequence: Synthetic coding sequence
  source 1..4614: mol_type = other DNA
atgaccacaaaacggaagatcatcgggaggcttgtgccatgcaggtgtttccggggtgaagaggagatcataagtgtactcgattacagccattgctccctgcagcaggtgcccaaagaagtgtttaacttcgagagaaccctggaggagctgtacctggacgcaaatcaaatagaagaattgcctaagcagctattcaactgccaggcactgagaaagctgtcaatccctgataatgacttaagcaatctacctaccaccatagcctctttagtgaatctgaaagaactggacatatctaaaaatggcgtgcaagagtttccggagaatattaaatgctgcaaatgtctgactatcatagaagcatcagttaacccaatttccaagctgcccgacggatttacccagcttttaaacctaacccaactgtacttgaacgacgcttttctcgaattccttcccgcaaacttcggccgactcgtcaagcttcggatccttgagctgcgcgaaaaccacttaaaaacattacccaagagcatgcacaaactcgctcagctggagagattggacctggggaataacgagtttggggagctgcctgaggtcttagatcagattcaaaatcttcgagaattatggatggacaataacgcactacaagtacttcctggtagcatcggaaagcttaaaatgttggtttatctagatatgagtaagaaccgcattgaaactgtagacatggatatctcgggatgtgaagctctagaggacctactgctctcgagcaacatgctgcagcagctgcccgactcaatcggactcctgaagaagctgaccacactgaaagtggatgacaaccagttgactatgcttcccaacaccattggaaatctcagtctgctggaggagttcgactgctcatgcaacgagcttgaatccctcccctctaccataggctacctgcactccctaagaacgctcgcagttgacgaaaatttcctgcctgaactgcctagggaaattggtagctgcaagaatgtgaccgtcatgagccttaggagcaacaaactggaattcctgcctgaagagatcgggcaaatgcaaaagctcagagtgttaaatttaagtgacaaccgcttgaaaaacctgccattcagctttaccaagcttaaagaacttgcagccctttggctttccgataaccaaagcaaagcgttaattccgctgcagactgaggctcacccagagaccaagcagcgagtactgaccaactacatgtttccccaacagccacgcggtgatgaggactttcagtctgatagtgactccttcaatcccactttgtgggaggaacagcggcaacagcggatgaccgtcgcatttgagtttgaagataaaaaggaagatgacgaaaatgccggtaaggtcaaggatctttcttgccaggccccatgggagcggggtcagagaggaataaccctccagccagccagactgagcggcgattgttgtacgccatgggccaggtgtgatcaacaaatacaggacatgcctgtgccacagaatgacccccagctggcatggggctgcatctctggccttcagcaggagagatctatgtgtacacccttgcctgtggccgcacaaagtaccaccctgcctagcctgtccgggcgacaggtggagattaatctgaagcggtacccgactccctatcctgaggatctgaagaacatggtgaaaagcgtgcagaacttagtcggtaagccgagccacggtgttcgtgtcgaaaactcaaatccaaccgcgaataccgaacagaccgtgaaagaaaaatacgagcacaagtggccagtggccccaaaagagatcaccgtcgaggacagctttgttcaccctgccaatgagatgaggatcggcgagctgcatcctagcctggctgagactcccctctatccccctaagttggttctgcttggaaaggacaagaaggagtcaaccgacgaaagcgaagtagataagacacattgtttgaacaattccgtcagctctgggacctattcagattatagcccttcacaagcctctagcgggagctctaacactcgggttaaggtggggtcacttcagactaccgcaaaagatgctgtgcacaatagcctgtggggcaaccgtattgcgcctagcttcccccaacctcttgactctaaaccgctcctttctcagagagaagccgtgccacccggtaacatcccacagagaccggaccgactaccaatgtctgacacgttcactgacaactggaccgacggctcgcattacgacaataccgggtttgtggccgaggagaccaccgccgagaatgctaactctaatccactgctgtcttcaaagtcccggtccacgtctagtcatggcagacgacccttaatccgtcaggacaggattgtcggcgtcccgctggaactggagcagtccacccaccggcatacacctgagaccgaggtgcctcccagcaacccttggcagaactggactaggacaccttcccctttcgaggacaggacagcttttccatcaaaactggagacaacgccaacaactagccccttacctgagaggaaggagcatatcaaagaaagcaccgaaattcccagtcctttctcacccggagtaccatgggaatatcacgatagtaatcctaataggtctctgtccaatgttttttcacagattcattgtcgccctgagagctccaaaggtgtgatctccattagcaagagtaccgagagactaagtcctctcatgaaggatataaagagcaacaagttcaagaaaagccagtctattgatgaaatagatattggtacttacaaggtgtataacatcccactggagaattatgcatccggatccgaccatcttggaagtcacgagagacccgataagatgctcgggcctgaacatggaatgtcaagtatgagtagaagtcagtctgtgcctatgctcgatgacgaaatgctcacctacggctcatccaagggacctcagcagcagaaagcctccatgacaaaaaaggtgtaccaatttgaccagtcgttcaatccacagggcagcgtcgaagtgaaggctgagaagcgcattcccccaccttttcagcacaaccccgaatacgtgcagcaggcaagcaagaacattgcaaaagaccttatcagtccgagagcttaccgtggctaccctcctatggagcagatgttctccttttctcagccctcagttaacgaggatgcggtggtgaatgctcagtttgcatctcagggggcacgggcaggctttctgagacgtgccgattcactggtgtcagccacggaaatggctatgttcaggagggtgaacgagccacacgaattgcctcctaccgaccggtacggcaggcccccttaccgagggggtcttgataggcagagtagcgtcacagtcactgagagtcagttcctcaagcggaatggacggtatgaggatgaacatcccagctaccaggaggtgaaggcccaagccggaagctttcctgtaaagaacctgactcagcggaggccactgagcgccagaagttactccaccgagtcttatggcgctagccagacacgtcccgtgtcagcacggccaaccatggctgcgctgctcgaaaagataccttcagattacaacctgggtaattacggggacaaaccatccgataactctgacctcaagacaaggcccaccccagtcaagggcgaggaaagttgtggcaagatgccagcggactggcgccagcagctgttgagacacatcgaagcaaggcggcttgacaggaacgctgcttataaacacaataccgttaacctcgggatgctgccctatggagggatctcggcaatgcatgccggtcgcagcatgaccctgaatcttcagacgaaaagcaagttcgatcaccaggagcttccactgcagaagaccccgtcccaacaatctaacattctcgacaacggtcaggaagatgtgtcgccaagtggtcagtggaacccttatccgctgggacggagggacgttccaccagacacaattacaaaaaaagcgggatcgcacatccagactctcatgggatcacagtcgctccagcaccgcagccgcgaacagcaaccctatgaggggaacattaacaaagtgacaatacagcagttccaatcaccactgcccattcaaattcccagctcacaggctaccagaggcccacagcccggaaggtgtctgatccagaccaaggggcaacggtccatggatgggtaccccgaacagttttgcgtgagaattgagaagaatccgggattgggtttcagtattagcggcggaatctctggccaggggaatccgtttaaaccttctgataagggaatctttgtgactcgtgtccagcccgacggtccagcctctaatctgctccagcctggggacaaaatcctgcaggctaatggacactccttcgtacatatggaacatgagaaggccgtgttgctgttaaagagtttccagaatacagtcgacctagtgatacagcgtgagctcacagtgtag

SEQ ID NO: 228302 - DNA, 4488 bp, synthetic construct
  misc_feature 1..4488: note = Description of Artificial Sequence: Synthetic coding sequence
  source 1..4488: mol_type = other DNA
atgcaatgtctggaaatgaccaccaaaaggaaaatcatcgggagattagtgccatgtaggtgtttcaggggggaggaggagatcatctcagtgctggattattcacattgttcccttcagcaagtgccaaaggaagtgttcaactttgaacgcaccctagaggagttatacctggacgcaaaccaaattgaggagttgccaaaacagctcttcaattgccaggcgcttcgtaaactaagtattcccgacaatgatctgagcaatctgccgacaactatcgcttcactggtcaatctcaaggagctggacatcagcaagaacggcgtccaggaattccctgagaatataaaatgctgcaaatgtcttactattatcgaagcgagtgttaatcccatctcaaaattaccggacgggtttactcaacttctcaatcttacccagctctacctcaacgacgccttcctcgaatttctgcccgctaactttggtcgcctggtgaagctccggattctggagctgagggagaatcacctgaagactctccccaaatcaatgcacaagttagctcaactcgagcggttggatttagggaacaatgaattcggcgaacttcctgaggtgctcgatcaaattcaaaacctacgcgagctctggatggataataacgccttgcaagtactgcccggaagcatcggcaagctgaaaatgttggtgtacctggatatgtccaaaaatagaatagagaccgtcgacatggacatcagcgggtgtgaagctctagaggacctgctgctgagctctaacatgcttcaacagctcccagattccatcgggctccttaagaagctgaccacactcaaggtagatgacaatcagctgactatgcttcccaataccatcggtaatttgagcctcctggaagaattcgattgtagctgtaatgagctcgaatccctaccaagcaccattgggtacctccactcactgcggactcttgccgtcgacgagaattttctgccggaactcccacgggagattggatcctgtaagaatgtgaccgtgatgagtctaagatccaataagcttgagttcttgcctgaagagattggccagatgcaaaagttaagggtcctcaacctgtcagacaatcggctgaagaacctcccattctcgtttaccaagctgaaggaactcgccgcactgtggttgtccgacaaccagagcaaggctttgattccactgcagacggaggcccacccagaaaccaaacagcgggtgctcacgaattacatgttcccgcagcagcccaggggtgatgaggacttccagtcagacagcgacagcttcaaccccactctgtgggaggaacagcgacagcaacgcatgacagtcgcctttgagttcgaagacaaaaaggaagacgatgagaacgctggaaaggtaaaagacttgtcctgccaggcaccatgggagcgaggacagcgtggcattacactgcagccagcccgattaagcggcgattgttgtaccccctgggcaaggtgtgatcaacagatacaggatatgcccgtaccccagaacgacccccagcttgcttggggctgcattagtggtctgcaacaggagcggagtatgtgcaccccacttcccgtcgcagcccaatccacaacccttccgtccttgtctggccgtcaggtcgagataaacttaaaaaggtatccgaccccttacccggaagacttgaaaaacatggtgaaaagtgttcagaacttggtcggtaagccttcccacggggtccgtgtcgagaacagcaatcctacagcaaacacagaacagaccgtaaaggaaaagtatgagcacaagtggcccgtggccccaaaagagatcacagtagaggattcttttgtgcaccccgctaatgagatgcgaattggggagcttcacccctcattagctgagacacccctgtaccctccaaaacttgtactgcttggcaaagacaaaaaagaatctacagacgaatctgaagtggataagacccactgtctgaataactccgttagcagtggaacatatagtgattatagcccaagccaggcctctagtggatccagcaatacccgagttaaggtgggctctctgcagactaccgccaaagacgcggtccacaacagcttgtggggcaataggatcgcgcctagcttcccccaacccctcgacagtaagccgttgttatctcagcgcgaagcggtcccacccggaaacattcctcagagaccagaccgcctccccatgtcagataccttcacagacaattggaccgacggatctcattatgataacaccggcttcgttgcagaggagacaacagctgagaacgctaattctaatcccctgttatcttccaaaagccggtctacctcctcacacgggagaagaccgctcataagacaagatcgcatcgtgggggtgccacttgagctcgagcagtccacacatagacatacacccgagactgaggtcccacctagcaatccttggcagaattggacacggaccccgtctcccttcgaggatcggaccgcttttccgtctaagctggaaaccaccccaacgacgagccccctcccagagcgcaaggaacacattaaggagagcacagaaataccatctccatttagccccggtgtgccttgggagtaccatgactccaaccctaaccgaagcttgagcaatgtgttttcacaaatccactgccggcctgagagttcaaaaggagtgatcagcatcagcaaatccactgaaagactgtcccctctgatgaaggatattaagtctaataaatttaagaagtcacagtctattgatgagatcgatatagggacatacaaggtttacaacatccccctggaaaattatgcctccggttcagatcacctaggttcccacgagagacccgacaaaatgttggggcctgaacatgggatgtcatctatgtcccggagccagagtgttcccatgttggacgacgagatgctgacttatggttctagtaaagggccacagcaacagaaggcctctatgaccaagaaagtgtatcagttcgaccagtcattcaaccctcaaggatccgtggaggtgaaggctgagaagaggatccccccacctttccagcacaatcctgagtacgtacaacaggcgagcaaaaatatcgccaaggacctcatttctcctcgcgcttataggggttatccacctatggagcagatgttctccttttcccagcccagcgtcaacgaggacgccgttgtgaatgcgcagttcgctagtcagggcgcaagagcagggttcctgagacgcgcagatagtcttgtgagcgctaccgaaatggccatgtttaggcgcgtgaacgaaccccatgagcttccacccactgatagatatggtaggcctccttatagaggcggacttgatcggcagagcagtgtgactgtgaccgagagccagttcctgaagcgcaatggccgttacgaggacgagcacccttcgtaccaggaagtgaaggcccaagctggctctttccccgtgaaaaaccttacgcagcgaaggcctctgtcagccagatcgtatagcacagaaagttatggagcgtcccagactcgcccagtaagcgctagacccaccatggccgctctgttggaaaaaatcccaagcgactacaacctgggtaactatggagacaagccaagtgataactcagatctgaagacaaggcccactcctgtgaaaggggaagaatcatgtggcaagatgcccgctgactggcgccaacagctgctgcgacacatcgaagcgagacggctcgatcgcacaccttctcagcagagcaatatactggacaatgggcaggaagatgtgtcccctagcggacagtggaacccgtaccctctcggcagaagagacgtccctcctgacaccatcactaaaaaggcgggtagtcacatacagactctgatgggctctcagagcctgcagcataggagcagagaacagcagccatacgagggcaatatcaacaaggtgactatccaacagttccaaagtcccctgccgattcagattccctcttcccaggctacccggggaccgcaacccggtcggtgtctcattcaaacgaaagggcagcggagcatggacggatacccagaacagttctgcgtacgcattgaaaagaatccagggcttggattctccatctccggtggaattagcggccaggggaacccttttaaaccttcggacaagggcatcttcgtgaccagagtgcagcccgacggacctgctagcaatttgttgcaaccgggagataagatcttgcaggctaacggccactctttcgtgcacatggagcatgagaaggccgtgttgctgttaaagtctttccaaaatactgttgacctggtcattcaaagagagctaaccgtgtag

SEQ ID NO: 228303 - DNA, 540 bp, synthetic construct
  misc_feature 1..540: note = Description of Artificial Sequence: Synthetic coding sequence
  source 1..540: mol_type = other DNA
atgaccacaaagagaaaaatcatcgggagactggtcccctgcagatgtttccgcggagaggaggagattattagtgtactggactatagccattgctctttacagcaagtgccaaaagaggtgtttaattttgaacgtaccctggaggagctgtatcttgatgccaaccaaattgaagagctgcctaaacagttgttcaattgccaggcactgagaaagctctccatccctgacaatgatctctcgaatttaccgacgacaatagcaagcctggtgaatttgaaagaacttgacatttctaagaatggcgtccaggaattccctgaaaacattaaatgctgtaaatgcctgactattatagaggcgtccgttaaccctatcagcaagctcccagacgggtttacccagctactgaacctgacgcagctgtacctcaatgatgccttcctggagttcctgcctgccaacttcgggagactagtgaagctaagaatactggagcttagagagaaccatttaaagacactgcctaaaatctag

SEQ ID NO: 228304 - DNA, 3942 bp, synthetic construct
  misc_feature 1..3942: note = Description of Artificial Sequence: Synthetic coding sequence
  source 1..3942: mol_type = other DNA
aggtcaatgcataaactggcccaattggaacggctcgatcttgggaacaatgaatttggcgagctccctgaggtcctggatcagattcaaaacctgagagaactctggatggataacaacgcacttcaggttcttcctgggtctattggaaaattgaagatgttggtgtacctggacatgtctaagaatcgcattgagactgtcgatatggacataagtgggtgtgaggcactagaggatcttttgctttcctcaaatatgttacaacagttgccggattccatcggactcctcaaaaaactaacaaccttgaaggtggacgacaatcaattgacaatgctacccaataccatcggcaacctcagcctcctggaagagtttgattgctcctgcaatgagctcgagtctctgccttcgaccattggatacctgcactccctgcgaacactggcggttgatgaaaactttttgcctgagttgccacgcgagatcgggtcctgtaagaatgttacggttatgagtttgcgcagcaataagctggagttcttgcccgaggagatcggccaaatgcagaaattaagagtgctaaacctctcagataacaggctgaaaaaccttcccttcagctttaccaaacttaaagagcttgccgcactctggcttagcgataaccagtccaaggccctcatccccctccagactgaggcacatcccgaaaccaaacaacgagtgctcacgaattacatgttcccccaacaaccacggggtgatgaagactttcagagcgactccgattccttcaatcctacgctgtgggaggagcagaggcagcagagaatgactgtggcttttgagttcgaagataagaaagaggacgacgaaaatgccggaaaggtaaaagatttgtcgtgtcaggcgccttgggagcggggtcagcggggaattaccctgcagcccgctaggctgtctggagattgctgcaccccttgggcacgatgcgaccaacagattcaagacatgccagttccacagaatgaccctcagctcgcctggggctgtatctctggtctgcagcaagagcgctcaatgtgcactcccctgccggtggccgcacaatcaaccaccttaccttcactatccggacggcaggttgaaatcaatttgaagcggtatccgacaccctatcccgaggacctgaagaatatggtgaaaagtgtccagaacctcgtaggtaaacctagccacggcgtgcgggtggagaactctaaccccaccgctaatacggagcagaccgtgaaggaaaagtacgaacacaaatggcctgtggcccctaaagagataacggttgaagatagctttgtgcatcccgcaaatgagatgcgcattggcgagttacacccttccctggccgaaaccccactatatcctccaaaactcgttttactgggcaaagacaagaaggagtccactgacgagagcgaagttgataaaacacactgcctcaacaactcggtctcttccggtacttactctgactatagccctagtcaagccagctccggaagctcaaataccagggtgaaagtggggtcactgcagactacagcaaaagacgccgtgcacaacagtctttggggaaatcgcatcgccccatcgtttccacagccattagatagtaaacctctcctcagtcagagggaagcggtgcccccaggcaatataccccagcgcccagaccgtttgccaatgtcggatacgttcacggataactggacggacgggagtcattacgataacaccgggtttgtcgcagaagagaccacagccgagaatgcaaactcaaatccacttctgagctctaagtcgcgatcaacatccagccatgggcgtaggcctctgatacgccaagaccgtatagtcggggttccactggagctggagcagtctacccatcgccatacaccagagaccgaggttcccccatccaacccatggcaaaattggaccagaacaccttctccctttgaagaccgcactgcctttcccagtaagctggagaccacgccaactacttcacctctacccgagagaaaagaacacatcaaagaatccacagagatcccatcccctttcagccctggggtcccttgggaatatcacgacagcaacccaaatcgcagcctgtccaacgtcttttctcagattcactgccgtcccgagagtagtaaaggagtgatatccatctcaaagagcacagaacgattatccccactgatgaaagacatcaagagcaacaagttcaagaagtcgcaatccattgacgagatagatatcggtacctacaaggtgtataatatccccctggaaaattatgcaagcggaagcgatcatttggggagccatgagcggccagacaaaatgttgggtcccgagcacggcatgtctagtatgagccgctctcaatcagtccctatgctggacgatgaaatgctcacatatggatcatcaaaaggtcctcagcagcaaaaagcatcaatgactaaaaaggtctaccagttcgaccagtcctttaacccacagggttccgttgaggttaaggcagagaagcggattcccccaccctttcaacacaatcccgagtacgtgcagcaggcctcgaagaacatcgccaaagatttgatctctccacgcgcatataggggctatcctccaatggagcagatgttttctttttcacagccctcagtgaacgaggatgccgtcgtgaacgcccaattcgcttcacagggagccagggctggattcttgaggagggcagactcccttgtcagcgccaccgagatggctatgttcaggcgcgtcaacgaacctcacgaattgccgccaacagaccgatacggacggcctccctataggggcggacttgaccgccagagttccgtgaccgttacggaaagccagtttctgaaaaggaacggacgctacgaggacgagcacccctcttaccaagaggtcaaggcacaagctggatcttttcccgtcaagaatctcacacagcgccgacctctttccgctagatcctactctactgagtcctatggagcctctcagaccaggcccgtgtctgcaagacccacgatggcagctctgttggagaagattccttcagattataaccttggaaattatggggacaagccatccgataattccgacttgaagacccgccctacgcccgtgaagggggaggagtcctgtggtaagatgcccgcagattggagacagcagctgctaagacacatcgaggctagacggctcgatcggacgccctcccagcagtcaaacattctggacaacggacaagaagatgtcagcccatccggtcaatggaatccttaccctcttggacggagggatgtgcccccagatactatcacgaagaaagccggatctcacattcaaaccctcatgggctctcagagtttgcaacaccggagccgagagcagcagccgtacgaaggcaatatcaacaaagtaaccatacagcaatttcagtccccactgcctatccaaatcccatccagccaggcaactagaggccctcagcccggtagatgcctgattcaaactaagggacagcggagcatggatggctatcctgaacagttttgtgtaagaattgaaaagaaccccggactgggttttagcatcagcggcggaatctccggacagggaaatccatttaagcccagcgataagggtatttttgtcaccagagtccagcctgacggccctgcatcgaaccttcttcaacctggggataagatcctgcaagccaatggccactcattcgtacacatggagcacgagaaggcggtgctgctgctcaagagcttccaaaacactgtggacctggtcattcagcgggagttgacagtgtag

SEQ ID NO: 228305 - DNA, 654 bp, synthetic construct
  misc_feature 1..654: note = Description of Artificial Sequence: Synthetic coding sequence
  source 1..654: mol_type = other DNA
atgatggagaatctcattagagggagaaatcccccacagtaccagagaagtccttgcaaggaggtgcgcgcagccctccgcaaaagacctgaggaggagctccagtgtctggaaatgacaaccaaaaggaagattataggacggttggtcccatgtaggtgtttcaggggagaagaggaaataatctcggtgctcgattattcccattgcagcctccagcaagtgccaaaagaagtgttcaatttcgaacggaccttggaagaactgtatctcgatgccaatcagatcgaggagctccccaagcagctgtttaactgtcaagccttgcggaagctgagcattcccgacaacgacctgtctaatctgccgacgactatagcatccctcgtaaacttgaaagagctagatatctctaaaaatggagtccaggaatttcctgagaacattaaatgctgcaagtgtctgacaatcattgaagcatctgtcaacccaatcagcaaactccctgacgggttcacccaactgctcaatctcacccagctctaccttaacgacgcctttctggaattcctccctgcgaacttcggccgactagttaagttacgtatacttgagctccgcgaaaaccatttaaagacactgcctaatatctag

SEQ ID NO: 228306 - DNA, 2466 bp, synthetic construct
  misc_feature 1..2466: note = Description of Artificial Sequence: Synthetic coding sequence
  source 1..2466: mol_type = other DNA
atgaccaagatgttgggaaaactgagaattgctccttcttttccgcagcccctggactcgaaaccattgctgagccagcgggaggccgtaccccctggtaatattccccaaaggcccgataggctgcctatgagcgatacctttaccgataactggacagatggatcacactacgacaacacaggtttcgtcgccgaggagactaccgccgagaacgcaaactctaatccgcttctgagcagcaagagtagatccacctcttcccatggccgtcgccctcttatccgtcaagacagaattgtgggggttcctctggagctagagcagtccacccatagacatacaccagagacagaggtgccaccaagtaacccgtggcagaactggactcggacaccttcaccctttgaggaccgcacagcatttcctagcaaactcgagacaacccccacgacttcgccgttgcccgagcgcaaagaacacattaaggagtctaccgagatccccagtcctttctcaccaggcgtcccctgggagtaccatgatagcaatcctaatcggtcgctcagcaatgtgtttagccagatacattgtagaccagagagcagcaaaggagtgataagtatatcaaaaagtaccgaacgcctaagcccactgatgaaagacattaagtccaacaaattcaagaagtctcagtccattgacgaaatcgatattggcacatacaaagtgtataacatccctctggaaaactatgctagtgggagcgatcacttgggctcacacgagaggccagacaagatgctgggaccagaacacggcatgagcagtatgtccaggtcccagtccgttcccatgctggatgatgaaatgctgacctatgggtcgagtaaaggacctcagcaacagaaagcaagcatgacaaagaaagtgtatcaatttgatcagtccttcaatccccagggatccgtggaagtgaaagccgaaaaaagaatccccccaccattccagcacaaccccgagtacgtacagcaggccagtaagaatatagctaaggacctgatttcccccagagcttatagaggatacccccctatggagcagatgtttagtttcagtcagcccagtgtgaatgaagacgccgttgtgaatgctcagtttgcatctcagggcgcacgagctgggttcctccgcagggccgactcactcgtgtcggcaaccgaaatggctatgttcaggagggtgaacgagccccatgaactgcctccaactgatcggtatggccgacccccttacagagggggactggatagacagtcgtccgtaactgtgacagagtctcagtttctcaagagaaacggacgctatgaggatgaacaccccagctatcaggaggtgaaggcacaggccggatcttttcccgtcaagaacctgactcaaaggcgtcccctgagcgcgaggtcctattcaaccgaatcatacggcgcaagccagacccggccagtttccgccaggcctactatggcggcacttctcgaaaaaattccatctgattacaatctaggaaactacggcgacaaaccgtccgacaactcagatctgaagactaggccaacaccagttaagggggaagaatcctgcggcaagatgccggcagattggcggcagcagctcctgaggcacattgaagccaggagattggatcggaacgccgcatacaagcacaacaccgtgaacctcggcatgctcccgtatggaggaatctcggcaatgcacgccggacgatcaatgaccctgaatctgcagacgaaatccaagtttgaccaccaggagctgccactgcaaaaaaccccctcacagcagtccaacatcctcgacaacggtcaggaagacgtcagtcctagtgggcagtggaatccttacccgttgggaaggagagacgtgccacctgacactattaccaaaaaggctggaagccacatccagaccctgatggggtcccaatcacttcagcaccggtctcgggaacagcagccctacgaaggcaatatcaacaaggttacaatccaacagtttcaaagccccctcccaatccagataccttcaagccaggccactcgcggtccgcaaccgggtcgatgtctcattcagacaaaggggcaacggagtatggacggctacccggaacagttctgcgtccggatcgaaaagaatcccggtctggggttctcaataagcggtggaatctccggacaaggcaatccctttaaaccaagtgacaaaggcatctttgtgaccagagtccagcccgacgggccagcgagtaatctccttcaacctggagataaaatcctacaggcgaatgggcattcttttgtgcatatggagcatgaaaaagcggtgttactgctcaagtccttccaaaacaccgttgatctcgtaatacagcgcgaactgaccgtctag

SEQ ID NO: 228307 - DNA, 2433 bp, synthetic construct
  misc_feature 1..2433: note = Description of Artificial Sequence: Synthetic coding sequence
  source 1..2433: mol_type = other DNA
atgattccagttacagaattacgctatttcgctgatacacagcccgcttaccggattctcaaaccctggtgggatgttttcactgattacatatccattgtgatgttgatgatcgcagtgtttggcggaacactacaggtgacccaggacaagatgatctgtctgccctgtaagtgggtgacgaaggattcttgcaacgatagttttagagggtgggccgctcctggaccggagcccacttaccctaattctaccattctgcccacccccgacacgggacccacaggcatcaagtacgatctggatagacatcaatataattacgtggatgctgtgtgctatgagaataggttgcattggtttgccaagtatttcccgtatctggtcctgctgcacacactcatcttccttgcttgcagcaacttttggtttaagttcccgaggacatcctcgaagctagaacacttcgtcagtatccttctcaaatgctttgacagcccatggaccacacgcgctctgtcagaaactgtggtagaggagagtgacccgaaacccgcattctccaaaatgaatgggagcatggacaagaaatccagtacggtgagcgaggacgttgaagctactgttccgatgctgcaaaggacgaaaagtcggattgaacaggggattgtggaccgctcggagaccggcgtgctggataaaaaagaaggcgaacaggccaaagccctgttcgagaaggtgaaaaagttcagaacccacgttgaggaaggagatatcgtgtaccgattatacatgagacaaaccatcatcaaggtgattaaatttattcttatcatctgttacactgtatactacgtgcacaacattaagtttgacgtggattgcacggtcgacatcgaatctctaacaggctatcgtacatatcggtgcgctcatccactggccaccctttttaagatccttgcaagtttttacatctctctggtgattttctatgggctgatttgcatgtacaccttgtggtggatgctcaggcggtccctgaaaaagtacagttttgagtctatccgggaggagtcctcttattccgacattccggatgtgaagaacgatttcgcctttatgctccacctgatagatcagtacgacccactttatagtaaacgctttgccgtattcctcagtgaggttagtgaaaataagctgagacagctgaatctaaataatgaatggaccttggacaaattacgccagagactgactaaaaatgcacaggataagctggaactgcatctctttatgttgtcaggtattccggatactgtctttgatctggtggagctggaagtgctgaaactcgaacttatccctgacgtgacaatacccccttcgatcgctcagctcacaggactaaaggagttatggttgtatcatactgcggctaaaattgaggctcccgcactagcatttctcagggaaaacctgagagcattgcacattaaattcactgatatcaaagaaatccccctatggatctactcgttaaaaaccctcgaagaactgcacctgaccggcaatctcagcgctgagaataacagatacatcgtaatcgacggccttagagaacttaaacggttaaaagtgcttaggctcaagagcaatctgtcaaagctcccccaggtcgtcaccgacgtcggggtgcatctgcaaaagctgtcaatcaacaatgaaggaacaaagctgatcgttctcaattccctgaagaagatggccaaccttaccgagctggaactaattcgctgcgatctggaacgcatcccccactctatcttctccctgcataatctgcaggagatcgatcttaaggataacaatctgaaaactatcgaggagattatttcatttcagcacctgcaccgtctgacatgcctgaaattatggtataatcatatcgcatacatacccatccaaattggtaatcttacgaatttggagaggttatacttgaaccggaataagatcgagaaaatacctacccagctgttttactgccgcaaattacgttatctggatctaagccataacaaccttactttcctgccagccgacatcggtttgctgcaaaatctacagaacttggcgattaccgcgaatcgaattgagacacttcctccggaactcttccagtgtcgtaagctccgagcactccacttgggtaataatgtactgcagagtctgcctagcagagttggcgagctgacaaacctaacacagattgagctgagagggaatagactggagtgcctgcccgtggagctgggtgagtgtcccctacttaaacgctcaggactggtggtagaggaagacctgtttaacactctgccccctgaagtgaaagaacgcctgtggagagctgataaggaacaggcatag

SEQ ID NO: 228308 - DNA, 2433 bp, synthetic construct
  misc_feature 1..2433: note = Description of Artificial Sequence: Synthetic coding sequence
  source 1..2433: mol_type = other DNA
atgattccagttaccgagctcagatatttcgccgatacccagccggcatatcgcatccttaagccctggtgggatgtattcacagactatatatccatcgtaatgctcatgatcgcagtgttcggagggactctgcaggtgacgcaagataagatgatttgtctgccttgtaagtgggtgactaaagacagctgcaacgacagctttcggggatgggccgctccgggtcctgagcccacgtatccgaacagcactatcctgcctacccctgataccgggcctaccgggattaagtacgacctggatagacatcagtacaactacgtcgatgccgtgtgctacgaaaacaggcttcattggttcgcaaagtacttcccctacctggttcttctgcacacgctgatcttcctggcgtgctccaatttttggtttaagtttcctcggacgtcaagcaagctcgagcattttgtgtcaattctgctgaagtgcttcgattctccctggaccacacgcgcattgtccgagactgtagtggaggagagcgaccctaaacctgcgtttagcaagatgaacggatcaatggacaagaaatctagtactgtgtctgaagatgttgaggcaaccgtgcctatgttgcagcggactaagtctagaatagaacaaggcatcgtggatagatccgaaacaggggtgctggataaaaaagaaggagaacaggcaaaagcactgttcgaaaaagtgaagaagtttaggacacatgtcgaggagggagacatcgtgtatcgtctatatatgaggcagacgattataaaggtgatcaaatttatcttgatcatttgttacacagtgtactatgtgcataatatcaagttcgatgtggattgtaccgtggacatcgaaagccttacaggatacaggacttaccgctgcgcacatccccttgcaaccttattcaaaatcttggcatcgttctacatctcattggtgatcttctacggcctgatctgcatgtatactctctggtggatgctgagaagaagcctgaaaaaatatagcttcgaatccattagggaggagtcctcctactctgatatccccgacgtaaagaatgattttgccttcatgctgcacttgatagaccaatacgatcccctgtatagcaagcggttcgcagtctttttaagcgaggtcagcgagaacaaattacgccagttaaatttgaacaatgagtggacactggataagctgaggcagagactcaccaaaaacgcacaggacaaactagaactgcacctgtttatgctgtccggcatccccgacactgtctttgacttggtcgagttggaagtccttaagctcgaactgattccagacgtgaccatccccccttcaattgctcagctgactgggcttaaggagctttggctttaccataccgcggcaaaaattgaggctcctgctctggctttcctccgcgagaatcttcgcgcactgcatattaaatttactgatattaaggagataccactttggatctattcccttaagacgcttgaagagttgcatctcacaggcaatctgagcgcggagaataataggtatattgtgatcgacgggctgagggagctgaaacgtctgaaagtcctacggcttaagtcgaacctctctaagctgccacaggtggtgacggacgtgggcgtgcatctgcaaaaattgagcataaataatgaaggtactaagttaatcgtgctgaacagtctgaagaaaatggctaacctgaccgaactggaactcatccgatgtgacctggaacgaatcccacacagtatcttctcccttcacaatctgcaggagatagatctgaaagataacaacctcaagacgatagaggaaattatatctttccagcacctgcatcgacttacttgtctgaaattatggtacaaccatattgcctacattcctattcaaattggtaatctgaccaacttggagcgactctacttgaacaggaataaaatcgaaaaaatcccaacccagctgttttactgccgaaaactccggtacctggacctctcccataataacctgactttcctgcccgcagacattggccttctgcagaatctccagaatctcgccatcactgccaaccgaattgagaccctcccacccgagctcttccagtgtagaaagctcagagcactgcacttgggaaataacgtacttcagtcactgccctccagagtgggagaactgacgaatctgacacaaattgagcttagaggcaatagacttgagtgcctccccgtcgagcttggagagtgcccacttctgaagcgcagtggcctggtggtggaggaagatctgttcaacaccctgcccccagaagtgaaggagcgcctgtggcgtgccgataaggagcaagcctag

SEQ ID NO: 228309 - DNA, 2433 bp, synthetic construct
  misc_feature 1..2433: note = Description of Artificial Sequence: Synthetic coding sequence
  source 1..2433: mol_type = other DNA
atgattcctgttaccgagctgagatatttcgcagacacacagccagcctaccggattttgaaaccatggtgggatgtattcactgactatattagcatcgttatgctgatgattgccgtgtttggtggaactctgcaggtgacccaggataagatgatatgcctgccgtgcaagtgggttacgaaggacagttgcaatgactcttttcgtggctgggcggcaccaggcccagagccaacctatcccaatagtacaatcctccccacaccagacacaggccctacgggaattaaatacgatttggacagacatcaatataactacgtagacgccgtctgttacgaaaaccggctacattggttcgccaagtactttccttacctggtgctgttgcatacacttatcttccttgcctgcagtaatttctggttcaagttcccaagaacatcttccaagctagaacactttgtcagcattctgttgaaatgcttcgactccccctggacaactcgagccctgtccgagaccgtcgtggaggaaagtgaccctaagccagcctttagtaaaatgaacggcagcatggacaagaaaagtagtactgtgtctgaagacgtcgaagccacagtcccgatgctgcagcgtactaaatcaagaatcgagcaggggattgtggaccggtccgagacaggcgtgctagataagaaagaaggggagcaagccaaagccctcttcgagaaagtcaagaaattccggactcacgtggaggagggcgatatcgtgtaccgcttatatatgagacagactatcatcaaggtgattaaattcatcctgattatctgttatacagtttactatgttcataacattaagtttgatgtcgactgcaccgtggacatcgagtctctgaccggctaccgcacgtaccggtgcgcccaccctcttgctactctttttaaaatactcgcctctttttacatttctcttgttatcttttatggtctgatttgcatgtacactctgtggtggatgctgcgtcgaagcctaaaaaaatattcattcgaatctatcagggaagaatcttcatattctgacattcccgatgttaagaacgattttgcctttatgctgcacctgatagatcagtacgatccactgtactcaaaaagatttgccgtgttcctctccgaggtttctgaaaacaagcttagacagctgaacctgaataacgaatggaccttggataagctgcgccagcgcctgaccaagaatgcgcaggacaagctggagctgcacttgttcatgctgagtggaatacccgatacagtgtttgacttggtagagctggaagtgctcaaactggagctcatcccggatgtcactattcccccatcaattgctcaacttactggcctgaaggaactctggctgtaccatacagcagctaaaattgaggcccctgcactcgccttcttgcgggaaaacctccgggcattgcacattaaatttactgatatcaaggagatccctctgtggatatactcacttaagactctggaggaactccacctgacaggcaacctgtcagctgagaacaaccgatacattgtcattgatgggctgcgggaactgaagcggctgaaggtgctgaggctgaagagcaatttgagtaagcttccacaagtggtaacagacgtgggtgtgcacctgcaaaagctcagcatcaacaatgagggcactaagctgattgtgctgaactcactgaagaagatggccaacttgacggaactggagctcattagatgtgacctcgagcgcattccacactccatttttagtttgcacaacctgcaggagatcgacctcaaggataataatctgaagaccattgaggagatcataagtttccagcacctccacagactgacatgcttaaaactctggtataaccatattgcatacattcccattcaaatcggcaatttgacaaacctggagcgactgtatctgaatagaaataaaatagagaaaattcctacacaacttttttattgcagaaagctgaggtacttggacttaagccataacaatttaaccttcctgccggctgacatcggcttactgcaaaatctgcagaacctggccatcaccgctaatcgaattgaaacactcccaccagaattgttccagtgccggaaactcagagcgctgcacttgggaaacaatgtgctgcagtctctgccatcccgggttggagagttaacaaacttgactcagattgaacttagaggcaaccggcttgagtgtctgccagtcgaattgggcgaatgccccctcttgaaacggtctggactagtcgtcgaagaggacctctttaacaccttgccgcctgaagtcaaggaacgtttgtggcgcgctgacaaggaacaggcatag

SEQ ID NO: 228310 - DNA, 2412 bp, synthetic construct
  misc_feature 1..2412: note = Description of Artificial Sequence: Synthetic coding sequence
  source 1..2412: mol_type = other DNA
atgatcactctgacagagttgaagtgcttggccgacgcccagtctagctaccacatcttaaaaccttggtgggatgtgttctggtattatatcaccctgattatgctgctcgtggcagtactggctggcgctttgcagctcactcaatctcgtgtgctgtgctgcctgccatgcaaagtcgaattcgataaccactgcgccgttccctgggatatcctaaaggcatctatgaataccagtagcaatccaggcactccgcttcctctcccactgcgcatccagaacgaccttcatcggcaacagtatagttatatagacgcagtgtgttacgaaaagcagctccattggtttgcaaagtttttcccctatctggtgcttcttcacaccctgattttcgcggcatgcagtaatttttggctccactatccaagcacctcttctcggctggaacactttgtcgctatcctacacaagtgcttcgactcaccctggaccacacgagcattatccgaaaccgtggcggagcaatctgttcgaccattgaaactctccaaatccaaaatcttactgtcctcttcgggatgctcggccgacattgattctgggaagcagagcctgccttatccacaacctggtcttgagtcagccggaatcgaaagcccgacttctagcgtattggacaaaaaggaaggcgagcaggctaaagccattttcgagaaggttaagaggttccgcatgcacgtggaacagaaagacataatctatagagtctacctaaagcagatcattgtgaaagtgattctattcgttcttattataacttacgttccctactttcttacgcatattacactggagatcgattgcagcgtagacgttcaggcttttacgggctacaaacgctaccaatgcgtttacagtcttgctgagatcttcaaagtgctggccagtttctacgtgatcctggtgattttgtacggcctgactagttcttactcactgtggtggatgctgagaagcagtttaaaacagtacagctttgaggcgctacgcgagaaatcaaattactctgatatcccagacgtgaaaaatgactttgcatttatcctgcatctggccgatcagtatgatcctctctattcaaagaggttcagcatattcctctcagaggtgtcagaaaacaagctcaaacaaatcaatcttaacaacgagtggactgttgaaaagctcaaatcaaaactggttaaaaacgcacaggacaagattgaactacatctcttcatgcttaacggacttcctgacaacgtctttgagttgacggaaatggaagtgttatcccttgagctcattcccgaggttaaactcccatctgccgtgagccagttggtgaatctaaaggagctacgtgtgtaccactcgagtcttgtggttgaccacccggcattggctttcctggaggagaatctcaaaattttgaggttaaaatttaccgaaatgggtaaaattcctagatgggtgttccatctgaagaatcttaaagagttgtatttgtctgggtgcgtgctccctgagcaattgtccacgatgcagttggagggctttcaggacttgaagaacctccgtactctctatctgaagtctagtctgagcagaatacctcaggtcgttacagaccttctgccgtccctgcagaaactgagcctcgacaacgagggttccaagctggtggtcctgaacaatcttaagaaaatggttaaccttaagtctttggaattaatctcctgtgacttggagagaatcccccatagcatcttcagcctgaacaaccttcacgagctggacctgcgcgaaaacaacctcaagactgtggaggagataataagctttcagcatctccagaatctctcctgccttaaactgtggcacaacaacattgcctacatcccagcccagattggggcactgtcaaacctggaacagctatccctagaccataataatattgaaaacctgcctcttcagctgttcttgtgtacaaagctgcattacctcgacctcagctacaaccacctcacattcattccagaagagatccagtacctgtcaaatttgcaatacttcgccgtgactaacaataacatcgaaatgttacctgacggtttgttccaatgcaagaagctccaatgcctgcttctgggcaaaaactccctgatgaatctgtccccacacgtgggagagctctccaatctgacacacctggagctcatcggcaactacctcgagacgctcccgccagaactggaaggttgccagagcctgaaacggaactgcctgatagttgaggagaacctgctcaataccttgccacttccagtgacagagcgccttcagacatgccttgacaagtgctag

SEQ ID NO: 228311 - DNA, 2412 bp, synthetic construct
  misc_feature 1..2412: note = Description of Artificial Sequence: Synthetic coding sequence
  source 1..2412: mol_type = other DNA
atgatcactctgaccgagctgaagtgtctcgcagacgcgcaatcttcctatcacattcttaaaccttggtgggacgtgttctggtactacattacacttataatgctgcttgtggccgtgctggctggagcgttgcagctgacccaatctcgagtcctgtgctgcctcccttgcaaagttgagttcgataaccactgtgccgtcccctgggatatcttgaaggctagcatgaacacgagcagtaacccgggaaccccattgccccttcccctgcgcatccagaatgatcttcaccgacagcaatacagttacatcgacgccgtgtgctacgagaaacaactccattggttcgccaagttctttccatacctagtgcttctgcatacactgatcttcgctgcgtgtagcaatttctggctgcattaccccagtacttcctcccgtctagagcatttcgtggctatcctgcataaatgtttcgacagcccctggacaaccagggccctgtctgagactgtagcagagcagagcgtaaggccattgaagcttagcaagtccaagatcctcctgtcctcatccggctgtagtgcggacatcgacagcggcaaacagagcctgccttatccccagcccggtctcgagtctgcgggaatcgagtccccaacctcttcggtgctcgacaaaaaggagggggaacaggccaaagcaatattcgagaaggttaaaagattcaggatgcatgtcgagcagaaggacattatttatagggtgtatttgaagcagatcatagttaaggttatcctctttgtgctcattatcacctatgttccatattttctcactcacatcacactggaaatcgactgcagtgtggacgtgcaggcctttaccggctacaaaagataccagtgcgtgtactcactggcagaaatcttcaaggtcctcgcctccttctacgtcattctcgtcattttgtacggcctcactagtagttactcactgtggtggatgctacggtctagcctgaaacagtactcgttcgaggcacttagagagaaatctaattactctgacatccctgatgtcaagaatgatttcgcattcatactccatctggcagaccaatacgatcccctgtacagtaaacggttcagtatctttttgtcagaagttagcgaaaacaaattgaaacagatcaatctgaacaacgagtggaccgtggagaaactcaagagtaagctggtgaaaaatgcgcaggacaaaatagagcttcacctgtttatgctcaacggattgcctgataatgttttcgagctaactgagatggaagtcctgtccctggagctgatccccgaagttaagctgcccagtgccgtgtcgcagctggtgaatctgaaggaactgcgggtgtatcactcatccttagtggtggatcaccccgcactggctttcctggaggagaatcttaaaatcttgaggcttaaattcactgaaatgggaaagatcccacgctgggtctttcatctgaaaaacctcaaggagctttatctcagtggttgtgttttgccagagcagctgtctaccatgcagctcgaagggttccaggaccttaagaatcttcgtactctatacttaaagtcatcgctgtctagaatcccacaggtggtcacagatctgttgccttcgctgcaaaaactgagcctggataacgaggggagcaagttggtggtactcaataacctgaagaagatggtgaatctgaagtcgctggaactcattagttgtgacctggagcgcattcctcattctatattttcactgaacaacttgcacgagctggatctacgggagaacaacctcaaaactgttgaagagatcatcagttttcaacacctgcagaatctgtcgtgcttgaaattatggcacaacaatattgcttacatcccagcccaaattggggctctgagtaatcttgaacagctgtctctcgatcacaacaatatcgagaatctgcctctccagttgtttctctgcaccaagttgcactaccttgaccttagctacaaccatctcaccttcattccagaagaaattcagtacctgagcaacctacagtattttgcagtcacaaacaacaatatcgaaatgctgccggatggcctatttcagtgcaagaagctgcagtgcctccttctgggcaagaactctcttatgaacctgtctccccacgtcggtgagctatccaacctgacgcatctcgagctgatcggcaactacttggagactttaccgcctgagctagaaggctgtcagtccttgaaaaggaactgtttgattgtcgaggaaaatctgctgaatacgctgccacttcccgtcacagagcgcctgcagacatgcctggataaatgttag

SEQ ID NO: 228312 - DNA, 2412 bp, synthetic construct
  misc_feature 1..2412: note = Description of Artificial Sequence: Synthetic coding sequence
  source 1..2412: mol_type = other DNA
atgataactcttaccgagctcaaatgcctggcagatgcccaatcctcctatcacatacttaagccctggtgggacgtgttttggtattacattaccctgatcatgctgcttgtggctgtgttagccggagccctccagttaacccagtctagagtattgtgctgcttgccctgcaaagtagaatttgataaccactgtgcggttccctgggacatcctgaaagccagcatgaatacttcgtccaatcctggaactcccctccccctgccgttgagaattcagaatgacctgcatcgccaacagtattcatacatcgatgcagtctgctacgagaagcagcttcactggttcgcgaaattttttccttaccttgtcctgctgcacacactgatctttgccgcttgttccaacttctggctgcattatccatccactagctcacggctggaacattttgtcgccattctacacaagtgcttcgacagtccctggacaaccagagctcttagcgagacggtggcagaacaaagcgtccgacctctcaaattgagcaagtccaaaattctgttgtcttcaagtggatgcagcgccgatatcgatagcggcaagcaatctctcccctatccccaaccgggtctcgagtccgcagggatcgagagtccaacctcgtcagtcctcgacaaaaaggaaggcgaacaagccaaagccatttttgagaaagtcaagcggtttaggatgcacgttgagcaaaaagacatcatctatagagtttatctcaagcagatcatagtaaaagttattctttttgtgctgatcattacttatgtgccttattttctaacacatatcacactggagatcgactgctcggtagacgtgcaggccttcactggctataagagataccaatgcgtctactcgctggccgagatctttaaggtgcttgcttcattctacgtcattctagtgattctatatggactcacatcctcttattcgctctggtggatgcttagatctagtttgaaacaatacagctttgaagctttgagagagaagagcaattactcagacattccagatgttaagaatgatttcgcctttatcttacatctggcagatcaatacgaccccctgtacagcaagcgtttttctatcttcctgtcagaggtgtccgagaataagctgaagcagattaatctcaataatgaatggactgtggaaaaattgaaatccaaactggtaaaaaacgctcaagacaagatcgagctgcatctgtttatgcttaatgggctgcctgataacgtgttcgaactgacagagatggaggtgctgtcactggagctgataccagaggtcaaactgccgtccgccgtgtctcagctagtgaatctgaaggagctgagagtttatcactccagtctggtcgtcgaccatccggcactggcctttctcgaggagaatctcaagattctgcgactgaaattcactgagatgggcaaaatccccagatgggtttttcacttaaagaacctcaaggagctgtacctgtcaggatgtgtactgcccgagcagctgagtacaatgcagctcgaaggtttccaggacctcaagaatcttaggaccctttatctgaagagcagcctcagtcgcattccccaggtggtgactgatctacttccaagcctgcaaaagttgtcactggacaatgaaggaagtaagctggtagtcctgaacaatctgaaaaaaatggtgaatctgaagtctcttgagctgatctcatgcgatctggagcggataccacactccatcttctccctgaacaacctccatgaattggacctgcgggagaataacctgaaaaccgtggaggagattataagctttcagcatctgcagaacctcagctgcctgaagttatggcataataacatcgcatacatccccgctcaaatcggtgcgctttctaatttggagcagctgtcactggaccacaataatattgaaaatctccccctgcagctgttcctgtgcaccaagcttcattacctcgacttatcctacaatcaccttaccttcatacctgaggaaatccagtatctgagcaacctccagtatttcgcagtgaccaataataacatagagatgctgccagatggcctgttccagtgcaagaaactgcagtgcctgcttctcggcaaaaattctctgatgaatctttccccgcacgtcggggagctttccaatctgacccaccttgaactgattggaaattatctggaaacacttccacccgaactagagggatgccagtccctgaagcgtaattgtctgattgtggaagagaacctgctaaacacgcttcctctgcccgtcaccgagagactgcagacatgtcttgataagtgttag

SEQ ID NO: 228313 - DNA, 312 bp, synthetic construct
  misc_feature 1..312: note = Description of Artificial Sequence: Synthetic coding sequence
  source 1..312: mol_type = other DNA
atgattacgctaacggaactgaagtgcctcgccgatgcacagtcgagttaccatatacttaagccctggtgggacgtgttctggtactacattactttgattatgttactggttgctgtccttgctggagccctccagcttacccagtctcgcgtgttgtgttgtctgccctgcaaggtggagtttgacaatcactgcgcggtgccttgggacatcctgaaagcatcgatgaacacttcttccaacccagggactcctctcccactgcctctgcggattcaaaatgatctccacaggcagcagtattcctag

SEQ ID NO: 228314 - DNA, 693 bp, synthetic construct
  misc_feature 1..693: note = Description of Artificial Sequence: Synthetic coding sequence
  source 1..693: mol_type = other DNA
atgatcactttaaccgaacttaagtgcttagccgatgcacagtcatcgtatcacatccttaagccttggtgggatgtcttttggtattacataacgttgattatgttgctggtggctgtgcttgccggagccctgcaattgacccagtcacgcgtcctgtgttgcttaccatgtaaggttgaatttgacaatcattgtgcggttccatgggatatcttgaaggcaagcatgaatactagcagcaaccctggcacgccactacccttgccacttagaatccagaatgaccttcaccgtcagcaatacagttacatagacgctgtgtgctacgaaaaacagcttcactggtttgctaaatttttcccgtatttggtgcttctacatacactgatctttgctgcgtgcagcaatttctggctgcactatccttctacttccagtagactggaacactttgtggccatcctacacaagtgcttcgacagtccatggacaactagagctctttccgagacagttgcggagcagagtgtgcggccactcaaactgtcaaagtcaaagattctgttatcttctagcggatgtagcgcagatatcgactctggcaagcagtctttaccatacccacagcccggtctggagagcgctgggatcgaatctccgacttccagcgtgcttaccgaggggggatag

SEQ ID NO: 228315 - DNA, 2412 bp, synthetic construct
  misc_feature 1..2412: note = Description of Artificial Sequence: Synthetic coding sequence
  source 1..2412: mol_type = other DNA
atgatccctgtcacggaatttaggcagtttagcgagcaacagcctgcctttcgggtgctcaagccatggtgggatgtcttcaccgactatctttctgtggccatgctgatgataggcgtctttggctgtacactgcaggtgatgcaagataagataatttgtttgcccaaacgcgtccagccggcacagaaccactcctccctctcaaacgtaagccaggctgtggcctccacaaccccactgcctcccccaaaaccatcccctgccaatcccattaccgttgagatgaagggactgaagactgatctagacctccagcagtattctttcatcaatcagatgtgctacgaaagagccctgcactggtacgctaagtattttccttacctcgtcctgatccacactctggtctttatgctatgcagcaatttctggttcaaatttcccggtagctctagtaagatcgaacattttatcagcatcttagggaagtgctttgatagcccttggacaacacgggcattgtcggaggtgtcaggggaagatagcgaggagaaggataaccggaagaacaatatgaaccgctctaacacaatccaatctggtcctgaggatagtttagtaaatagccaaagcctgaaatctatcccagaaaagtttgtggtggataaatccaccgcgggtgcattggataaaaaggagggcgaacaggcaaaggccctctttgagaaagtgaagaaattcaggctgcatgttgaagagggcgacattctgtatgcaatgtacgtccgacagactgttctcaaagtgatcaaattcctcatcatcatcgcatataatagcgctttagtctcgaaagtgcagtttactgtggactgtaatgttgacatccaagacatgacagggtacaaaaacttttcttgtaaccatactatggctcatctgttttcaaagctgtccttctgctacctgtgttttgtgagtatttacggtttgacttgtctgtacacactttattggctgttctatagaagtttgcgggaatactcctttgagtatgtgaggcaggagaccgggatcgacgacatcccagacgtcaagaacgacttcgctttcatgttgcatatgatcgatcagtatgacccactgtactccaaacgttttgcagtttttctgtctgaggtctctgaaaacaagcttaagcaactaaacctcaacaatgaatggacaccagacaagctgcgccagaaactccagacaaacgctcataacaggctggagctcccgctcataatgctctccgggctgcctgataccgtatttgagattaccgagcttcagtcccttaaacttgaaatcattaagaacgtcatgatccctgccaccatcgcccaactcgataacctgcaagaattatctttgcaccaatgctcagtgaaaatccactcagcggctttaagttttctgaaagagaatttaaaggtcctgtcagtgaagtttgatgacatgagggaactgcccccttggatgtacggtcttcggaacctcgaagagctgtacctggtgggctctttgtcacatgacattagtcgtaacgttactcttgaaagcttgcgcgaccttaagagcctcaaaatcctctcgataaagagtaatgtcagcaaaatcccgcaagctgtagtggacgtgagtagtcacctgcaaaaaatgtgtatacacaatgacggaacaaaactcgtcatgctgaataatttgaaaaagatgactaacctgactgaattggagctggtgcactgcgaccttgagagaattccacacgccgtgttttccctcctgagcctccaggaattggacctcaaagagaacaacctgaaaagcattgaggagatagtgtccttccagcatctgagaaagcttacagtgctgaaactatggcacaattccattacttacatacccgagcatatcaaaaaactgacaagccttgagagattaagcttctcccacaacaaaatcgaggtcctccctagccacttgttcctctgcaataagatcaggtacttggatctctcctacaacgatatccgattcatcccaccagaaatcggcgtacttcagtccctgcagtattttagcatcacctgtaataaggtggaatcattgccagatgagctctatttttgtaagaagcttaaaaccttgaagatcggcaagaactcccttagcgtcctgagtcctaaaattgggaatctcctcttcctgagctacctggacgtgaagggaaatcactttgaaatcctgcctcctgagctgggcgactgtagagcgctcaagcgggcaggccttgtggtggaggatgcactgtttgaaactttgccatctgacgtcagggaacaaatgaagactgagtag

SEQ ID NO: 228316 - DNA, 2577 bp, synthetic construct
  misc_feature 1..2577: note = Description of Artificial Sequence: Synthetic coding sequence
  source 1..2577: mol_type = other DNA
atgttcactctcgccgaagtcgcatctctgaatgacattcaaccgacctataggattctgaaaccttggtgggatgttttcatggattatctcgctgtggtcatgctgatggtcgctatttttgccggaaccatgcagctaaccaaggaccaggttgtgtgcctccccgtgctgccatctcccgtgaacagtaaagcccataccccccctggtaatgccgaggtaacaacgaatattccaaagatggaggcagcaaccaatcaagaccaggacgggagaactacaaatgatattagctttggaacaagcgccgtgacccccgacattccacttagggccacatatcctcggactgacttcgcattgcccaatcaggaggcgaaaaaggaaaaaaaagacccaactggtcgaaagacgaacttggacttccagcagtatgtgttcatcaatcagatgtgctatcatctggccttgccctggtatagcaagtattttccttacttggccctgattcataccatcatcctgatggtgagtagcaacttctggtttaaataccctaaaacctgttcaaaggttgagcactttgtgtccattcttgggaagtgcttcgagtccccctggacaaccaaagcactttccgagaccgcctgcgaggattctgaagagaacaagcaacgtatcacaggagcccagacactgccaaaacatgtgagcacttcgagtgatgagggaagtcctagcgcaagcacgcctatgataaacaaaacgggtttcaaattctccgctgaaaagccagtgatagaagtgccaagcatgaccatactggacaagaaggatggagagcaggccaaggctctgtttgagaaggtccggaagtttcgggcacacgtggaagactcagacctgatctacaaattatacgtggtgcaaacagtgatcaagacggctaaattcatatttattctgtgctacacagctaattttgttaacgccattagctttgagcatgtgtgtaaaccgaaagtcgagcaccttatcggatacgaagttttcgaatgtactcataatatggcctacatgctgaaaaagttgctgatatcatacatatccattatatgtgtatacggttttatctgcctgtacacactattctggctgttccgcattcctctgaaggagtatagctttgagaaggtgcgagaagagagtagcttttccgacatcccagacgtcaagaatgacttcgcgtttctgctgcacatggttgaccagtatgaccaactttattctaaacggtttggggtgttcctgtccgaggtcagtgagaacaagcttagggaaatatccctaaaccatgagtggacattcgaaaagcttagacagcacattagtcgaaacgcacaagacaagcaagagctgcacctgttcatgctgtctggagtgccggacgcggtcttcgatttgacggatcttgacgttctgaaattggaactcatccctgaagcgaaaatccccgcaaaaattagtcagatgacgaacctacaggagctgcacctgtgccattgcccagcaaaggtggaacagaccgccttctctttcctgcgggaccatctgcgctgtctgcatgtaaagttcactgatgtggccgaaatccccgcatgggtgtatctgctcaaaaatcttagagagctgtacctgatcggtaacttgaatagcgaaaataataaaatgattggcctagaatctttaagggagctccgccatctcaagattctgcatgttaagagcaatctgactaaagtgccttcaaatattacggacgtggctccccatttgacaaagctggtgattcacaacgatggcaccaagctccttgtcttaaacagtctgaaaaagatgatgaatgtggcagagctggagttacaaaactgcgagctagagaggattccccatgccattttcagcctcagtaatctgcaagagcttgatctcaagtcaaacaatattcgcaccatagaggagataattagcttccagcatttgaaacgcctaacatgcctgaagctctggcataacaagattgtgaccattcctcccagcataacgcacgttaaaaaccttgagtctctgtacttctccaataacaagctcgagagcctccccgtggctgtcttctcattgcaaaagctgaggtgcttggatgtcagctataacaatatcagcatgattcctatcgagatcggtttactccagaacctgcagcacctccatattaccggtaacaaggtcgatatccttcccaaacagctcttcaagtgtatcaagcttcgaacattgaatttgggacaaaactgcattacaagtctccctgaaaaggtagggcaactctcacagctgacccagctggagctgaagggcaattgtctggacaggctcccagcgcaactgggtcagtgcaggatgcttaagaaatcagggctggtcgttgaggatcacctattcgacacgcttcccctggaggtgaaagaagctcttaaccaggatatcaatattccctttgcaaatggcatttag

SEQ ID NO: 228317 - DNA, 2577 bp, synthetic construct
  misc_feature 1..2577: note = Description of Artificial Sequence: Synthetic coding sequence
  source 1..2577: mol_type = other DNA
atgttcactcttgcagaagtcgctagtctgaacgacatccagcccacctacagaattctcaaaccttggtgggacgtctttatggattatttagcagtggtgatgctaatggtcgccatttttgctggtacgatgcaattgaccaaagaccaggtcgtctgcctgccggtattgccatcccccgttaatagtaaggctcacacacctcccggaaatgccgaagtgacaacaaacatcccaaaaatggaagcggctaccaatcaggatcaggacggacggactaccaacgatatctcttttggtacctcagctgtcaccccagatatcccactcagagccacttacccccgaacagactttgctcttcccaaccaggaggcaaagaaagagaagaaggacccaactggacggaaaacgaacttggattttcaacagtacgtgttcatcaaccagatgtgctaccacctggccctgccatggtattccaaatattttccatatctggcgctaattcatactatcattctcatggtgtcatccaatttctggtttaagtaccctaaaacctgttccaaggtggaacacttcgtcagcattttggggaagtgttttgagagtccctggaccaccaaagcactgagcgagacagcctgcgaagactccgaggaaaataaacagcggattaccggcgctcagacccttcccaagcacgtgtctacaagctccgatgaaggaagcccttcagcctccactcccatgattaataagacaggttttaaattctccgcagaaaagcctgtgatagaagtgccttcgatgacaatcttggataaaaaagatggcgaacaggccaaggccttattcgaaaaagttagaaagtttagggcccacgtcgaggactcagatttgatttataaactgtacgtggttcagacagtgatcaagaccgctaagtttatctttatcctgtgctatactgctaactttgttaacgcaattagtttcgaacatgtgtgtaagccgaaggttgaacaccttattggctacgaggtgttcgagtgtacccacaatatggcatacatgcttaaaaagctcctgataagttacatttctatcatctgcgtttatggctttatctgcttgtacactctgttttggttgtttagaatccctctgaaggagtatagtttcgaaaaagtaagggaagagagtagcttttcggacatccctgatgtaaaaaacgacttcgccttcctactacatatggtcgatcagtacgatcagctctactctaaacgcttcggggttttcctctccgaagtctcggagaataaattgcgggagatctctctaaatcacgaatggacattcgagaaactgcgacaacacatttccagaaatgcccaggataagcaagagcttcacctctttatgctatccggcgtccctgacgccgtgttcgacttgactgacctggatgtgctcaaattggagctaatcccggaagccaagatccctgccaaaatcagccagatgacaaatctgcaggaacttcatttatgccactgtcctgcgaaggtggagcagactgcctttagtttcctgcgggaccatctgcgttgtctgcacgtgaaatttaccgacgtggccgagatcccggcatgggtctacctgctcaagaatctgagggaactgtatttgatcgggaacttgaattccgaaaataataaaatgataggcctcgagtctctccgcgagcttcgccacttgaaaatccttcacgtgaagagcaacctgacaaaagtgccctctaacattacagacgtcgctcctcaccttacaaagttagtgattcataatgacggcacaaagctgctggtgctaaacagtcttaagaagatgatgaacgtagctgaactagaattacagaactgcgagctggagagaatcccccacgctatatttagtctttctaatctccaggaactggacttgaagtcaaataacattcgcacaatagaagaaataattagctttcagcatttaaaacgcctcacctgcctcaaattgtggcacaacaaaattgtgactattccaccctccattacccacgtcaaaaatcttgagagcctgtatttttctaataacaaattggagtcccttcctgtggctgttttttccctgcagaagctcaggtgtctggatgtctcttataacaacatcagtatgattccaattgagatcggattgctgcagaacctgcaacacctgcacattaccggaaataaggtagacatacttcccaagcagctcttcaagtgtatcaagttgcggacgctgaatttagggcagaactgtataaccagtctgcctgagaaagtcggccagttgagccagctcacacagctggaactgaaaggcaactgtctcgatcgtctcccagctcagctcggacagtgccgcatgctcaagaagagtggtctcgtggtggaggaccatctgtttgacactctgcccctcgaagtgaaagaagccctgaaccaggacattaacatcccattcgctaacggaatatag

SEQ ID NO: 228318 - DNA, 354 bp, synthetic construct
  misc_feature 1..354: note = Description of Artificial Sequence: Synthetic coding sequence
  source 1..354: mol_type = other DNA
atgttcaccttagccgaagtggcaagcctgaatgatattcagccaacttacaggatcctcaaaccatggtgggatgtctttatggactatctagccgtggtaatgctgatggtggcgattttcgcgggtacaatgcaactgactaaagaccaggtggtgtgcctgcccgttctgccaagccccgtaaattctaaggcacacacccccccagggaacgccgaggtaacgacaaacattcctaagatggaggcggcaaccaaccaggatcaggatggacgaacaacaaacgacatatcctttgggacatctgccgtaacacctgacatacctctgagggccacctatccaagatag

SEQ ID NO: 228319 - DNA, 825 bp, synthetic construct
  misc_feature 1..825: note = Description of Artificial Sequence: Synthetic coding sequence
  source 1..825: mol_type = other DNA
atgttcaccttggcagaagtggcaagcctcaatgacatccaacccacctatcgaatcctgaaaccttggtgggacgtatttatggattacttagcagtggtgatgctcatggtggccatctttgcagggacaatgcagctcactaaagatcaggtagtgtgcctgccagttttgcccagtcctgttaacagcaaagcacacacacctcctggtaacgcagaggtaactaccaacattcccaagatggaggctgcaacgaaccaggaccaagatgggcgaacaacgaacgacataagcttcgggacgtcggcggtgacgccagacatacccctacgagccacctacccaaggacagacttcgccctgcctaatcaggaggctaagaaggagaagaaggacccgacggggagaaagaccaacctcgacttccagcagtacgtcttcattaatcagatgtgttatcacctggcactgccttggtatagcaagtacttcccatacctcgccctcattcatactattattctaatggtctcttcaaatttctggtttaaataccccaaaacctgcagcaaagtggagcactttgtgtccattctcgggaaatgtttcgagtccccctggacgactaaagcactgtctgaaactgcatgcgaggacagcgaagaaaacaagcagcggattaccggcgctcaaaccctacctaaacacgtctccacatccagtgacgaggggagtccatccgcctccaccccaatgattaataagaccgggtttaaatttagtgcagagaagccggtcattgaggtccccagcatgacctag

SEQ ID NO: 228320 - DNA, 96 bp, synthetic construct
  misc_feature 1..96: note = Description of Artificial Sequence: Synthetic coding sequence
  source 1..96: mol_type = other DNA
atgttcactctggctgaggtcgcaagcctcaacgacattcagcctacataccgcatattgaagccatggtgggacgtgtttatggattacttatag

SEQ ID NO: 228321 - DNA, 564 bp, synthetic construct
  misc_feature 1..564: note = Description of Artificial Sequence: Synthetic coding sequence
  source 1..564: mol_type = other DNA
atgttcaccctagcggaggtcgcatccctgaatgatatccaacccacataccgcatcctgaagccttggtgggatgtcttcatggactatctagctgtcgtaatgctcatggtggccatctttgccggaactatgcaactcacaaaagatcaggtcgtgtgtctgcctgtgctgcccagccccgtgaactccaaggcgcacacccctccaggcaatgcagaggtgactactaatatcccgaaaatggaggcagccacaaatcaggatcaggacggcagaaccacaaatgatatatcatttggaacctcagccgtgacccctgatattcctctgagggcaacgtaccctcggactgacttcgccttgcctaaccaggaagctaagaaggagaagaaggaccctacaggtagaaaaaccaacctggacttccagcagtacgtgtttattaatcagatgtgctaccacctggcactgccatggtacagcaaatatttcccctatctcgccctcattcataccataatcctgatggtatcctcaaacttttggttcaagtacccttag

SEQ ID NO: 228322 - DNA, 369 bp, synthetic construct
  misc_feature 1..369: note = Description of Artificial Sequence: Synthetic coding sequence
  source 1..369: mol_type = other DNA
atgttcaccctggctgaagtggcgtccctaaacgatatacagcctacctaccggattctcaagccctggtgggacgtcttcatggactacctcgcagtggttatgttgatggtggccatctttgcgggtacaatgcagcttacgaaggaccaagtcgtctgcctgcccgttctgccatcacctgtgaacagcaaggcccacactccacccggtaatgctgaggttaccaccaatatccccaaaatggaagcggcaaccaatcaggatcaggacggccgaaccactaacgatatttctttcggtacctccgcagtgactcccgatatcccactgcgcgcaacctatccccgtacagacttcgcgctatag

SEQ ID NO: 228323 - DNA, 2391 bp, synthetic construct
  misc_feature 1..2391: note = Description of Artificial Sequence: Synthetic coding sequence
  source 1..2391: mol_type = other DNA
atgatacccgtggccgaatttaaacagttcaccgagcagcagccagccttcaaggtcctgaagccatggtgggacgtgctggcagagtatctgactgtcgcaatgttaatgatcggcgtgttcggctgtaccctgcaagtgacgcaggataagataatctgccttcctaaccatgagcttcaggaaaatttgagcgaagctccgtgtcagcagctgctcccccgtggaatcccagagcaaatcggtgcccttcaggaggtgaaaggcttgaaaaacaacctggaccttcagcagtatagcttcattaaccagctgtgttatgagaccgctctgcattggtatgcaaaatattttccctacctggtggttattcacactctcatatttatggtgtgcacaagcttctggtttaagttccccggaacttcgagtaaaatcgagcactttatctcaatcttgggtaaatgcttcgactccccgtggaccacacgcgcactgagcgaagtttctggtgagaaccaaaaagggcctgctgcaacagagcgagccgcagccaccatcgtcgcaatggcaggaacaggacctggaaaagcaggggagggggagaaggagaaggtgttggcggaacctgagaaggtggtcaccgagcctcccgtcgtgacattgctcgacaagaaggagggagagcaggctaaagcgctgtttgagaaggtcaaaaagttcagaatgcacgttgaagaaggcgatatcctgtacaccatgtatatcagacagaccgtgctgaaggtgtgcaaatttcttgcaatactggtctacaatctggtgtatgtcgaaaagatttctttcctggtggcttgccgagtagagacaagcgaggtgaccgggtacgcctctttctgctgcaaccatacaaaggcgcacttattttctaagctggccttctgctacattagctttgtttgtatctatggtttaacgtgcatctacaccctatactggctattccaccgtcctctgaaggagtactctttcaggagcgtgcgcgaggagactggcatgggggacatacccgacgtcaagaacgacttcgccttcatgctgcatctgattgaccagtatgactctctttattccaagcgctttgcagtctttttgtccgaggttagtgagagtcgactcaagcagcttaacttaaaccacgaatggacacccgagaaactgcggcagaaactacagagaaacgccgctgggagactagagcttgcactgtgtatgctgcccggtctgcccgatactgtgttcgaactgtcagaagttgagtctctcagactagaggctatttgcgatatcaccttcccccctggattatcccaactggttcacctgcaggagttgtcactgctgcacagcccggcaagactgcccttcagtcttcaagtgtttctcagagatcacttgaaggtgatgcgggtcaagtgtgaggagctacgcgaggttcctttgtgggtatttgggctaaggggtttggaggaactgcacttggaagggctatttcctcaggaattagctcgggcagcgactcttgagagcttacgagagctcaaacagttgaaagttttgtccctcagatcaaacgccggtaaggtgcccgctagtgtcacagacgtcgccggacacttgcagcgcttgtccctgcataatgacggcgctagattggtggcacttaactccttaaaaaagctggccgctctacgcgaattagaactggtcgcctgtggcctagagaggattccccatgccgtgttcagcctgggcgctctgcaggagcttgatctcaaagataaccatttaagatcaattgaagaaatattgagttttcagcattgtaggaaattggtgactctgcggctgtggcacaatcaaatcgcatatgtgccggagcatgttaggaagctacgctctctggaacagttatacctgagttataacaaattggaaaccttgccttcccagctgggcctctgctcgggtctgcgcttgctcgatgtttcgcataatggcctccattcactgccacccgaggtgggactccttcagaacctgcagcatttggcactgtcctacaatgccttagaagctttaccagaggagttgttcttctgccgaaaactgcgcaccctgctgttgggagacaatcagcttagtcaactgagccctcacgtgggggctctgagagctctcagccgcttagagctgaagggtaatcggctggaggcattgccagaagagctggggaactgtggcggattgaagaaagccggactgctggttgaggatactctttaccaggggcttcctgccgaggttcgggataaaatggaagaggaatag

SEQ ID NO: 228324 - DNA, 1569 bp, synthetic construct
  misc_feature 1..1569: note = Description of Artificial Sequence: Synthetic coding sequence
  source 1..1569: mol_type = other DNA
atggatttcctgctgttaggtctgtgcctctactggctgttgcgcagaccgtccggagtggtgctatgcctgctgggtgcgtgttttcaaatgctacccgctgccccatctggctgtccccagctgtgcagatgcgaaggtagactcttgtactgtgaagcgctgaatctcaccgaagcaccgcacaacctgagcggccttctggggctgtctctgaggtacaattctttatcagagctgcgggcaggccagtttactggcctcatgcagctcacttggttgtatttggatcacaaccacatttgttcagtacagggggatgcttttcaaaaacttcgccgagtaaaagagctgactctgtcatctaatcagatcactcagctgcccaacaccacctttagacccatgcccaatcttcggtccgtggacctgtcttacaataaactgcaggctttggcccctgacttgtttcatggactgcggaagctcaccacacttcatatgagagctaacgccatacagttcgtcccagtgcggatctttcaggactgtagatctttgaagttcctcgatattggttataatcagttaaaaagcctcgcccgaaatagctttgccggtctgtttaagctcaccgagctccatctagagcataatgatctcgtgaaagttaatttcgcccatttccccaggttaattagtctgcactcactgtgtcttcgcagaaataaagtggccatcgtggtaagctccctggactgggtgtggaaccttgaaaagatggatctttccggcaacgaaattgaatatatggagcctcatgtttttgagacggtgccccacttgcagagcctgcagttagattctaatagattaacctacattgagcctaggatcctcaactcttggaagtcactgacgtcgatcacgttagctggcaatctctgggactgtggacggaacgtctgcgctctggctagctggctgaataacttccaaggtcgctatgacggcaatctccaatgtgccagcccagaatatgcacaaggggaggacgttcttgatgctgtgtatgcattccatctctgcgaggacggagcggagcctacctcaggccatcttttaagtgccgtgactaacagaagcgatctcggcccacccgcaagcagtgctacaaccctcgccgatggtggagagggacagcacgatggaaccttcgagcctgctacagtggctctgccagggggagagcatgccgagaatgcggtccagatccacaaggtagtgaccggcacaatggccctgatatttagcttcctgatcgtggtgttggtattgtatgttagctggaaatgtttcccagcttcactgaggcagcttcggcagtgcttcgtgacacagcggagaaagcagaaacagaaacaaaccatgcaccaaatggctgccatgtccgcccaggagtattatgtcgattataagccaaatcatattgagggcgctctcgtgatcatcaacgaatacggcagctgcacatgtcaccagcagcccgcacgggagtgcgaagtttag

SEQ ID NO: 228325 - DNA, 1569 bp, synthetic construct
  misc_feature 1..1569: note = Description of Artificial Sequence: Synthetic coding sequence
  source 1..1569: mol_type = other DNA
atggacttcctgctgctcggtctttgtctgtactggcttttgaggcgaccttccggtgttgtcctatgtcttctgggggcatgttttcaaatgctccccgcagcgccatcaggctgccctcagctgtgccggtgcgaaggacgactactgtattgtgaggcgctgaacttgactgaggcaccacacaatctgagcggcctgctgggactctctctgcggtataacagcctgagcgagttacgggctggacagtttaccggtctgatgcaattgacctggctgtatctggatcataaccatatctgctctgtgcaaggcgacgctttccagaagctccggcgagtgaaggagcttaccctttcaagcaaccagataacacaactgcccaacaccacatttcgaccaatgccgaatctgagatcagtcgacctatcttacaacaagcttcaggccctggcaccagacctcttccacggattaagaaaacttactacccttcacatgcgtgctaacgccattcaatttgtgccggtaaggatttttcaggattgtaggtccctgaaattcctagacatcgggtataaccagctgaagagcctcgcacgaaattcttttgccggtttattcaaactaacagaactccatttggagcacaacgaccttgtaaaagttaactttgcccacttccctcgattgattagtctgcattccctttgccttcggagaaacaaagtggccatagtggtgtcatctctggactgggtgtggaacctggagaagatggatctgtcaggtaacgaaattgagtacatggaaccacacgtgtttgagactgtaccacatctgcaaagcctacagttggacagcaataggctcacttacatcgagccacgcatactcaattcttggaaaagtctgactagcattaccctggccggaaacctatgggactgtgggaggaatgtctgcgcgctggcaagctggctcaataacttccagggtcggtacgacggaaacctccaatgtgcttcgcccgaatatgctcaaggcgaggacgttctggatgcggtctacgcctttcatctttgcgaggatggtgccgagcctacgtcaggtcacctactctcagccgtcactaaccggtcagacctgggcccacctgcatccagtgcaactactttggcagatgggggagagggtcagcatgatggaactttcgaacccgcaacagtggccctcccaggtggggagcacgccgaaaatgcagtgcagatccacaaggtggttactggaaccatggctctcatcttctcattcctaattgtcgttctggtgttgtatgtaagctggaaatgcttcccagcaagcttgcgccagctgaggcagtgttttgtgactcagcggaggaagcagaaacagaagcagaccatgcaccagatggccgcaatgtctgcacaggaatattatgtggactataaaccaaaccacattgagggagctctcgtcatcatcaatgagtacggctcctgcacctgtcaccaacaacccgcaagagagtgtgaggtctag

SEQ ID NO: 228326 - DNA, 330 bp, synthetic construct
  misc_feature 1..330: note = Description of Artificial Sequence: Synthetic coding sequence
  source 1..330: mol_type = other DNA
atggatttcctcctcctgggactctgtctttattggctgctccggcgaccttctggagtggtactttgcctactgggggcttgtttccagatgctgccagccgctccatctggctgcccccaactctgccgatgcgaagggagattgctctactgtgaggcactgaacctgacagaagcaccccacaatctgtccggactgttagggctaagtctccggtataattcactgagcgaactacgcgcaggccagtttacaggactgatgcagttaacttggttgtatctagaccataaccatatctgttcggtccaaggcgacgccttctag

SEQ ID NO: 228327 - DNA, 672 bp, synthetic construct
  misc_feature 1..672: note = Description of Artificial Sequence: Synthetic coding sequence
  source 1..672: mol_type = other DNA
atggacttcttgctattgggcctgtgtctgtactggctgctccgcagacccagcggtgtcgtactgtgtctgttaggcgcttgttttcagatgctgcccgctgcacccagcggctgccctcagttatgtcggtgtgagggaagactgctatattgtgaggcgctgaatcttactgaggccccacacaatctgagcggactgctcggcttatcgctgcgctataatagcctgtcggagctccgcgctgggcagtttacagggttgatgcagctaacttggctgtatctggaccataatcacatttgtagcgtacagggtgacgcttttcagaaacttcgaagagtgaaggagctgacactcagctccaaccagatcacacagttacctaatactacattcagacctatgccaaatcttaggagtgttgacctgtcttataacaaattgcaagcgttagctcccgaccttttccacggacttagaaaacttactacactccatatgagagccaatgccatccagttcgtgcccgtgcgcatcttccaggattgtagatcattaaagtttttggacatcggatataaccaattgaagtccctggcacgaaacagcttcgcgggattgttcaagctcactgagttgcacctcgaacacaacgatctggttaagtag

SEQ ID NO: 228328 - DNA, 1569 bp, synthetic construct
  misc_feature 1..1569: note = Description of Artificial Sequence: Synthetic coding sequence
  source 1..1569: mol_type = other DNA
atggatttccttctcctgggtctctgtctgtactggctgcttcgacggccttccggagtagtgctgtgcctactcggagcctgttttcagatgctgcctgctgccccatcaggatgtccacagctctgtcgctgcgagggccgtctcctttactgtgaagcgctgaatcttacagaggcgcctcacaacctaagcggtttgctcggcttaagtctgcgctacaactcactgagcgagctaagggctggccagtttaccggactgatgcagctcacatggctgtacctcgaccacaaccatatctgtagtgtccaaggagacgccttccagaagcttcggcgtgtgaaggaattaaccctctctagtaaccagattacgcagctgccgaacactacctttcgcccaatgccaaatcttcgcagcgtggacctttcctataacaagctgcaggctctcgccccagacctgttccacggactgagaaaactaacaaccctccacatgagagcgaacgccattcagtttgtcccagttcgtatttttcaagattgtcggtctttgaaattccttgatatcggatataaccagctgaaatctctcgctcgcaacagcttcgcgggtttgtttaagctgacggagctgcacctcgagcataacgacctcgtcaaggttaacttcgcccactttcctcgcctgatttctcttcatagcctgtgtctgcgcagaaacaaggtagctatagtcgtttcttcactggattgggtatggaacttggagaagatggacctaagcggaaacgaaattgaatatatggaaccccacgtgttcgaaacggtaccccacttgcaatctctccagctggactctaacaggctgacgtacattgagcctcgcatactcaactcttggaaaagcctgaccagcatcactttggctgggaatctctgggactgtggacgaaacgtctgtgccttggcgtcctggcttaataactttcagggtagatatgatggaaatctgcaatgcgcatctcccgaatacgctcaaggggaagatgtcctggacgctgtatatgcatttcacttatgcgaagacggggctgagcccacgagtggccatctgctgagtgctgtcacgaatcgctctgacttggggcctccggctagcagcgccactacgctggccgatggaggagagggccagcacgacggcactttcgagcctgccacagttgctcttccgggtggcgagcatgcagaaaatgcggtccaaattcacaaggtcgtgactggcactatggccctcatcttcagctttcttatcgtagttctggttctctacgtatcctggaaatgttttcccgctagtctgcgacagctgcgacaatgctttgtcactcaacgtcggaagcagaagcagaagcagaccatgcatcagatggctgccatgtccgcccaagagtactatgttgattacaaacccaatcacattgagggagcgctcgtgataatcaatgaatacggcagctgcacatgccaccagcagcccgcaagagagtgcgaggtgtag

SEQ ID NO: 228329 - DNA, 1569 bp, synthetic construct
  misc_feature 1..1569: note = Description of Artificial Sequence: Synthetic coding sequence
  source 1..1569: mol_type = other DNA
atggacttcttgttgcttggtctctgcctttattggctgcttcgacgtcctagtggcgtggtgttgtgcctccttggtgcctgctttcagatgctgccagctgctccctctggatgcccccagctgtgtaggtgtgaaggccgtctgttgtactgcgaagctttgaacctgacagaggctccccataacctgagtggactgctgggtctgtcgctgcggtataactccttatcagagttgagagcaggtcagtttaccggcctcatgcagctgacatggctgtatttggatcataaccacatctgcagcgtgcaaggcgacgcatttcaaaagctccgaagggtaaaggaacttacgctgagcagtaatcaaatcactcaactaccaaacactacctttagacccatgcctaatcttcggagcgtggacttgagctataataaactgcaggccctcgctccagacctcttccatggactcagaaaattgacaactctccatatgagagcgaatgccatccagttcgtccccgtgaggatctttcaggactgtaggagcctcaagttcctcgatataggctacaaccagctgaagtcacttgctagaaatagtttcgccggacttttcaaactgacagaactgcaccttgaacacaacgacctggtcaaagtgaattttgcacactttcctcggcttatctccctgcactccctctgcctgagaagaaacaaagtagcgatcgttgtgtcctctctggattgggtttggaacctggagaagatggatctgagtggaaacgaaatcgagtacatggagccccacgtgttcgagaccgtcccccatctgcaatctctgcaacttgattcaaacagactgacctacatcgagccgaggatactcaacagctggaagtcgctgacctcaattacacttgccggtaacttatgggactgcggcaggaacgtgtgcgccctcgccagctggttgaacaactttcaggggcgatacgatggcaatctacagtgtgcttcgccggaatacgcgcagggcgaggatgtccttgatgcagtgtacgcctttcatctttgtgaagacggtgccgagccaacctccgggcacttgctcagcgcagtgacaaatcggtctgatctcggccctcctgcctcgtcggccacaactctggccgatggcggagagggtcagcacgacggcacatttgaacccgctactgttgctctgcccggaggcgaacacgccgagaacgctgttcagattcacaaggtggttactgggaccatggccctgattttctcgttcttaattgtggtgctggtgctttacgtctcatggaaatgcttccctgcttcactgagacagcttaggcagtgctttgtgactcagcgaagaaagcaaaaacagaagcagacaatgcatcagatggcagccatgagcgcccaggagtattacgttgattacaaaccgaatcacatcgaaggcgcactggtgataatcaatgaatacgggtcttgtacctgccaccagcaaccggctcgcgaatgtgaagtgtag

SEQ ID NO: 228330 - DNA, 552 bp, synthetic construct
  misc_feature 1..552: note = Description of Artificial Sequence: Synthetic coding sequence
  source 1..552: mol_type = other DNA
atggactttctcctcctggggctgtgtctttactggttgctacgcagaccctctggagtggtgctctgcctcctgggagcgtgctttcagatgctgcccgctgctccttcgggttgtccgcagttgtgtaggtgtgaaggacggctgctgtactgcgaggcactcaacctgaccgaggcccctcacaacctatcaggccttcttggtctctcattaagatataacagcctgagcgaactccgagccggtcagtttaccggtctgatgcagctgacgtggctgtatttagaccataaccacatatgcagcgtccaaggcgacgctttccagaaactcagacgcgtgaaagaactgaccctctcctcaaaccaaatcactcagcttcccaacactactttcagacctatgcccaatctgcgctctgtggatctgtcctataacaagcttcaggcactagcccctgacctgtttcatggacttcgcaagcttacaacattgcacatgagagcaaatgcaatccagttcgtccccgtgaggattttccaggattag

SEQ ID NO: 228331 - DNA, 1551 bp, synthetic construct
  misc_feature 1..1551: note = Description of Artificial Sequence: Synthetic coding sequence
  source 1..1551: mol_type = other DNA
atgggcttgcactttaaatggccgctcggtgcccctatgctagccgcaatctatgctatgtccatggtgctgaaaatgttgcccgcactgggaatggcttgtccccctaagtgtcggtgtgaaaagctgcttttttactgcgacagtcagggcttccacagcgtgcccaatgcgaccgataagggcagtcttgggctcagcctgagacacaaccatatcactgagcttgagagagaccagtttgcttctttctctcaactgacttggttacacctggatcacaaccagatcagtaccgtcaaggaagacgcgttccaaggcctatataaactgaaagaacttatattgtccagcaacaagattttttatttgcccaataccactttcacccaactgattaatttgcagaaccttgatctctccttcaatcagttgtcaagcctgcacccagaactcttttacggtcttcggaagctccagactttacacctgcgcagcaatagccttaggaccattccggtgagactgttctgggactgccgctccttggaattcttagatctgtctacgaacaggctgagatccctggcacggaatggattcgcgggactcattaaactccgcgaacttcacctcgagcacaaccagctgaccaagatcaattttgcccactttttacgcctgtcaagtttgcacactctcttcctgcagtggaacaagatttccaatctgacatgtggcatggaatggacttggggaacattggaaaaactcgatctgacgggaaacgagatcaaggcgatagatctcactgtgtttgaaaccatgccaaatctcaaaattttactcatggataataacaaattgaattcactcgactccaaaatcctcaattccctcaggagcctgacgactgtcggcctgtcaggtaatctatgggagtgctccgcaagaatctgtgcgctcgctagctggctggggtctttccagggacgctgggagcacagcatcctctgtcattcgcctgatcacacccagggcgaggacattctggatgcagtgcacggctttcagctttgttggaacttgtccaccaccgtgacagtaatggccaccacctatagagaccctactactgaatataccaaaagaataagttcttcttcttatcacgtcggggataaggaaattcccacaacagctggaatcgccgtcacaacagaggaacactttcccgagccggacaacgccatttttacccaacgggtgatcacggggaccatggcccttttattcagtttttttttcatcatcttcatcgtgttcatctctcggaaatgctgtcctccaacacttagaaggatacgtcaatgtagcatggtccagaaccacaggcagcttcgcagccagaccaggctgcatatgtccaatatgagtgatcagggtccttataatgagtatgaaccaactcacgagggtcctttcattataattaacgggtatggtcagtgtaaatgccagcagctcccttataaggaatgcgaagtgtag

SEQ ID NO: 228332 - DNA, 1746 bp, synthetic construct
  misc_feature 1..1746: note = Description of Artificial Sequence: Synthetic coding sequence
  source 1..1746: mol_type = other DNA
atgggttttaacgtgataagattactgagcggatccgccgtggcgctcgtcatcgcgccaacagtcttgctaacaatgctcagttcagcggaacgtggctgccccaagggatgtcgatgtgaggggaagatggtgtactgcgaatcacagaagctgcaggaaattcctagtagtatcagcgccggttgtctgggattgtcgcttcgctacaattctctacagaagctgaaatataaccagttcaagggccttaatcagctcacatggctatatttggatcataaccacatctcaaatatcgatgaaaacgctttcaatggaatccgcagacttaaggaactcattctgtcatcaaatcgcatctcctattttctaaacaatacatttaggcccgtcacaaacctgcggaatcttgatctgtcatacaaccagctgcattcccttggctccgaacagttcagggggctgaggaagctcctcagtctacacctgaggtccaatagtctccggaccatcccggtcaggatttttcaggactgccggaatctggagcttcttgacctgggatataaccggataagatctctggctagaaatgtatttgctggcatgataagactaaaggaactacacttggagcacaatcagttcagtaagttgaatctggccttattcccgagactggtgtcccttcaaaacctgtacctacagtggaacaagatctctgtcataggccagaccatgagttggacgtggagctccctccagaggttggatctgtctgggaatgagatcgaagcattctctggtccctctgttttccagtgtgtgccaaatctccaacgcttaaatttggactccaataaactgacattcatcgggcaggagatccttgactcttggatctcattaaacgatataagcctggcaggtaatatctgggagtgctcacgaaacatctgctccctggtcaactggctgaagtctttcaagggcttgcgcgagaatactattatttgcgcatccccaaaagagttgcaaggcgttaacgtaattgacgccgtcaagaactactctatttgcggtaaaagcaccacagagcgcttcgacttagcgagagcattacctaaaccaaccttcaagcccaaactgccacggccaaaacacgagtctaagccaccgttgccccctaccgtgggcgcaaccgaacccggacccgagacggacgccgatgcagaacatatctcctttcacaaaataattgctggttcagttgccctgtttctatctgtgctcgttatactacttgttatttacgtgtcctggaaaagatatccagcatccatgaaacagctacaacagcgctcactgatgagaagacaccgcaagaagaaacgtcagagcctgaaacagatgactccaagtacacaggaattttatgtggattacaaacctactaatacggagacctccgagatgctgctgaacggaacggggccttgcacatataacaagtcaggctccagggagtgtgagatccctctgtctatgaacgtttcgaccttcctggcctacgaccagcccactatcagttattgcggtgtccatcacgagttgctttcacacaaaagcttcgagactaacgcccaggaggataccatggagacgcaccttgagaccgagctcgacctgagtacgatcaccaccgccggacggatttctgaccacaaacagcagttagcatag

SEQ ID NO: 228333 - DNA, 1746 bp, synthetic construct
  misc_feature 1..1746: note = Description of Artificial Sequence: Synthetic coding sequence
  source 1..1746: mol_type = other DNA
atgggctttaacgtcatccgactcctaagtggcagcgctgtggccctagtgattgctcctactgtattgcttactatgctctcctcagctgagcgcggatgtcctaagggatgtcgatgcgagggcaagatggtatattgtgaaagtcaaaaactgcaggagattccatcaagtatctctgccggatgccttggactgtctttgaggtataactctttgcaaaaattgaagtacaaccagttcaaggggctaaatcagctaacatggctttaccttgatcacaatcatatcagcaatatcgacgagaatgcgtttaatggcattcgtaggctgaaagaactgattctgtcgtccaaccgcatcagttacttcctgaataacacctttcgcccagtgacaaacctgcggaacctggatctcagctacaaccagttgcattcactgggttccgaacaatttcgtggcctaaggaagctgttatccttgcacctgagaagcaacagtctgcgcaccatccccgtaaggatattccaggactgcaggaacttggagctcttagatctcggatataatagaatcaggtccttggcacgcaacgtatttgcaggaatgatccggctgaaagagctgcacctggagcataatcagttctccaaactaaacttagctttgtttcccagacttgtgtcactgcagaacctgtatttgcagtggaataagatctctgttattgggcagaccatgagctggacctggagttcactgcaaagactggatctcagtggcaatgaaatagaagccttctccggcccatccgtgtttcaatgcgtgccaaatttgcaaaggcttaatctggattccaacaaattgaccttcatcggccaagaaatcctggattcctggataagcttgaatgatatcagcctcgcaggtaatatttgggagtgttcccggaacatctgttcactggtaaattggctgaagagtttcaaaggcttgcgggagaatactataatatgtgcctcacccaaggagcttcagggagtgaatgtaattgatgccgtgaagaattactccatctgcggtaaatccactacagagcggtttgatcttgcgagggcccttcctaagccaactttcaagcccaagctccccagacccaagcacgaaagcaaacccccattgccccctaccgtcggagcaacagaacccggacctgaaacagatgctgatgcagaacacatctcatttcataaaatcatagcgggatctgtggcccttttcctttcagtgcttgttatcctcctggttatctatgtttcttggaagagatatccggcttctatgaaacagcttcaacagcgctcactgatgagacggcacagaaaaaaaaagagacaaagccttaaacagatgacaccaagcacccaggaattttacgtggactacaaaccgacaaacactgaaacatcagagatgctccttaatggcactggaccctgcacctacaataaaagcgggtctcgagagtgtgagatcccgttatcgatgaacgtcagcacctttctggcatacgaccaaccgactatctcttattgtggagtgcaccatgaactgctcagtcataagtcctttgaaaccaatgcacaagaggatactatggaaacgcacctggagacagagctcgatctaagcaccatcactactgccggtcggatatctgatcacaaacagcagctagcgtag

SEQ ID NO: 228334 - DNA, 1557 bp, synthetic construct
  misc_feature 1..1557: note = Description of Artificial Sequence: Synthetic coding sequence
  source 1..1557: mol_type = other DNA
atgggctttcacttaatcacccagctgaaagggatgagtgtggtgctggtactgcttcctactcttcttctggtcatgttgacaggcgctcagcgcgcatgccccaaaaattgccggtgcgatggcaagatcgtctattgtgagtcccatgccttcgctgatataccagagaacatttccgggggaagtcaggggttgtcactgaggtttaactcaatccagaagttaaagagtaaccagtttgccggtctgaatcagctgatctggctatacctggaccacaattatattagctccgtcgacgaagatgcctttcagggcatccggcgactcaaggaactgattttatcaagtaataagatcacctatctgcacaacaaaacgtttcatccagttcccaacctgagaaacctagacctgtcttataacaagttgcaaactcttcagagcgagcaattcaagggacttaggaagctgatcattctccacctccgtagcaattcccttaaaacagtgcccatccgcgtgtttcaagattgcagaaatctggattttctggacctgggttataatcggctcagatcattgtctaggaacgctttcgcagggctgctcaagctgaaggaactgcatctcgaacataaccagttttctaaaataaattttgctcattttccacgattgtttaatctgcgaagcatctatctccagtggaaccgcatacgatccatcagccaaggattaacatggacttggtcctccttgcacaatttagatctgtcaggtaacgacattcagggaatcgaaccaggcacctttaaatgcttgccaaacctgcagaagttaaaccttgacagtaacaagctgactaacatctcccaggagacagtcaatgcttggatctctctgatatcgattactctctccggaaatatgtgggaatgcagccgttccatctgtcccctgttttattggctcaaaaacttcaaagggaataaagagagcacaatgatttgcgcagggccaaagcatattcagggagaaaaagtgagtgacgcggtcgaaacctataatatatgcagtgaagtgcaagttgtgaatacggaacggagtcatctggtaccacaaactccccagaaacctcttatcatccccagaccgactattttcaaaccagacgtcacacaaagtacctttgaaacccctagcccatccccaggatttcagataccgggagcagagcaggagtacgaacatgtgagttttcataaaatcatcgcaggctctgtggccctcttcctctctgtagccatgatattgcttgtgatctacgtgagttggaagcggtacccggcttccatgaaacagctacagcagcactctctcatgaaacgtagaaggaagaaggcgagagagtcagaacgccagatgaattccccacttcaggagtactacgtggactacaagcctactaactctgaaaccatggatattagtgtgaacggatcaggcccatgtacatacacaatcagcggaagcagagagtgtgaggtttag

SEQ ID NO: 228335 - DNA, 1773 bp, synthetic construct
  misc_feature 1..1773: note = Description of Artificial Sequence: Synthetic coding sequence
  source 1..1773: mol_type = other DNA
atgggcttccatctgatcacccagcttaaagggatgtccgtggtgttggtgctactgccaacgctcctcctggtcatgctgactggcgctcaacgggcttgtcccaagaactgccgatgtgacggaaagattgtttactgcgagtcccatgcctttgcagacattcctgagaacatctcaggcggaagccaggggctctccctaaggttcaatagtatccagaagctaaagtctaatcaatttgccggactcaaccagttaatttggctgtacttggatcacaattacatcagcagcgtggacgaggatgccttccagggcatccggaggctcaaagagcttattctttccagcaacaagattacctacctccataacaaaacgtttcaccccgtgcctaatctcaggaacttggaccttagttataacaagctgcagactctccagtcagagcagtttaaggggctgcgaaagttaatcatccttcaccttcgcagcaactcgctgaagaccgtgcccattcgcgtgttccaggactgcaggaacctggactttttggacttgggttacaacaggctgcgatcgttaagcagaaatgctttcgcaggtctgctcaagctaaaagaattacacctggaacataaccagttctccaagatcaacttcgcccattttccgaggcttttcaatctgaggtcgatctatctgcagtggaaccgaattcgatcaatcagccagggactgacatggacctggtcgagtctgcacaatctggacctgtccggcaacgacatccagggcatagaacccggaaccttcaagtgtttaccgaatctccaaaagctgaatctggactctaacaagctgactaacatctcccaggagaccgtgaacgcctggatttcactgatcagcattacactttctgggaacatgtgggagtgctctcgtagtatctgccccctgttttattggctgaagaatttcaagggcaacaaagaatctaccatgatatgcgctggccctaagcacatacaaggagagaaagtatcagacgctgtggagacttacaacatctgctctgaggttcaagttgttaacacagaaaggtctcatctagtgccgcaaactccacagaaacctctcataattcccagacctactatcttcaagccggatgtgactcaatccacctttgagactccctcaccaagtccaggtttccaaattccgggagctgaacaggaatacgaacacgtcagtttccataagataattgcaggatcagtagcattattccttagtgttgccatgatcctactggtgatatatgtgagctggaaacgttatccagcttccatgaagcagttacagcagcattcacttatgaagaggagacgaaaaaaggcaagggagtccgagagacaaatgaacagtcccctgcaagagtattatgtggactacaagcctacaaatagcgaaacaatggatatttctgtaaacggttctggtccctgtacatatactatctcaggcagccgcgagtgcgagatgccccatcatatgaagccactgccctattatagttacgaccaaccagtcatcggctactgccaagcacatcagccactgcatgtgaccaagggctatgagaccgtgtcaccagagcaggacgaaagccctgggttggagctaggacgagaccatagtttcattgcaactatcgctcggtcagcggcaccagccatctacctggaacgtatcgccaattag

SEQ ID NO: 228336 - DNA, 1773 bp, synthetic construct
  misc_feature 1..1773: note = Description of Artificial Sequence: Synthetic coding sequence
  source 1..1773: mol_type = other DNA
atgggctttcaccttatcacccagctcaaaggaatgtcagtggttctggtcctcctccccactctgcttctggtcatgttgacaggtgcccaaagggcatgccccaaaaattgcagatgtgacggtaagatcgtgtactgtgaatctcacgccttcgctgacattcccgagaacatcagcggcggaagtcagggattaagtttgcggtttaactctattcaaaaactcaagtcaaaccagttcgccggtctgaatcagctgatatggctttacctggatcacaactacatttcgtctgtcgatgaggacgcatttcaaggaatccggcgtctgaaagaactcattctttcatcgaataagattacctacttgcataacaaaactttccatcctgtgccaaacttaagaaacttggatctcagctataacaagcttcagaccctccagtccgaacagttcaaaggcctccgtaaactgatcattcttcatctgcggtctaattccctgaaaacggtgccaatcagggtgtttcaagattgtcgcaatctggactttctcgatctgggttacaataggctccgcagtctttcacgaaatgctttcgctggactactaaagttgaaggagctccatctcgaacacaaccagttctctaaaatcaacttcgcccattttcctaggttgtttaacctccgcagtatctacctgcagtggaacagaattaggtccatcagtcagggcctgacatggacttggagctctctccacaatctggatttgtctggaaacgacatacagggcatcgagccagggacatttaagtgcctccctaatctccagaagctcaacctggactccaataagttaacaaacatttctcaggagaccgtgaacgcatggattagtctcatcagcatcaccctgtcagggaatatgtgggagtgtagtcggagcatttgtcccttgttctactggttgaagaactttaagggtaacaaagaatccacaatgatttgtgccggaccaaagcatatccagggggagaaggtgtccgacgcggttgaaacttataacatttgctcagaagttcaggtggtgaataccgagaggtctcatctggtgccacagactccccagaagcctctgataattcccaggcccaccatcttcaaacccgacgtaacacagtcaacatttgagactccctccccttctccaggattccagattccaggggcagaacaagaatatgagcatgtgagttttcacaagatcatcgctggaagcgtggccctgttcctgtctgtggcgatgatcctactagtcatttacgtctcatggaagagataccccgcatccatgaagcagctacagcaacattccctgatgaaacgcagaagaaagaaggcacgcgaaagcgagcgtcagatgaactcgccactgcaggaatactatgttgactacaaacccacaaatagtgaaacgatggacatctctgttaacgggtctgggccttgtacctacactatttctggatcgcgagagtgtgaaatgccacaccacatgaagcccctgccttattactcgtatgatcagccagtgattgggtactgccaggcccaccagcccctgcacgtcacaaaggggtacgagacagtgagcccagaacaggacgagagccccggattggaactcgggcgtgaccatagcttcatcgcaaccattgccaggagtgcagctcccgctatctatttggaacgaatcgctaactag

SEQ ID NO: 228337 - DNA, 1776 bp, synthetic construct
  misc_feature 1..1776: note = Description of Artificial Sequence: Synthetic coding sequence
  source 1..1776: mol_type = other DNA
atgcctgggtttcacctgataactcagttgaagggtatgtccgtcgtcctcgtcttactgccaacattactgctggtgatgctgactggagcccagcgggcatgccccaagaactgtcgatgcgatggcaagatcgtttactgcgaatcacacgcctttgcagatattccggaaaatataagcggaggatcacagggtttgtcgctgcgatttaattccatacagaaactgaaaagcaaccaatttgctggactgaatcagctcatctggctatatttagaccacaattatattagcagcgtggacgaggacgccttccagggcattcggcgtctcaaagagctgatactcagtagcaacaagatcacctacctgcataacaagacttttcatccggtgcctaatctaagaaacctggacctgagctacaataagttacagacactgcagtccgagcagtttaaaggccttaggaaactcattatcctgcatctccggtctaactccttaaaaaccgttccaataagagtgtttcaggactgcaggaatctggatttcctggatttgggctataataggctccgctcactgtcacgcaacgctttcgcagggctgctgaaactcaaggagttacacttggagcacaaccagttttcaaagatcaacttcgcacactttcctcgcctatttaatttacggagcatttatttgcagtggaatagaatcagatccataagtcagggcttgacatggacctggagtagcctgcacaacctggatttaagcgggaatgacatccagggaatcgaaccgggaacattcaaatgtctgcctaaccttcagaagctcaacctcgactccaataagctcacgaatatcagccaggagacggtgaacgcatggatctccttgatcagcataacactgtccgggaatatgtgggagtgtagtagatccatctgcccgctgttttattggctgaagaattttaagggcaataaagaaagtactatgatctgcgcaggtcctaaacatatccagggggaaaaggtgtccgatgccgtggaaacttacaatatttgcagtgaggtgcaggtggtgaatacggaaaggtcccacctcgtgccacaaacaccacagaagcctttgatcatcccccgaccaacaatctttaaaccggacgtgacacagagcaccttcgaaacccccagccctagcccaggctttcagattcctggagctgaacaggaatatgaacacgtgtcattccataaaatcatcgcaggttctgtggccctgttcctctctgtggcgatgattcttctggtcatctacgtctcttggaagagatatcccgcatcgatgaagcagctgcagcagcactccttgatgaagagacgccgaaaaaaagcccgtgagagcgagcgacagatgaacagcccactgcaggagtattatgtagactataagcctacaaacagtgagacaatggatatctcagtgaacgggtctggcccatgcacttatactatctccggcagccgggagtgcgagatgccgcatcacatgaaacccctcccctattatagctatgatcaacctgtcattggctactgccaggctcaccagccgctgcatgttaccaagggctatgagacggttagccccgaacaagatgaatctccaggactggaactggggagagatcacagcttcattgccaccatcgctcgcagcgcagctcccgcaatatacttggagcggatagcaaactag

SEQ ID NO: 228338 - DNA, 579 bp, synthetic construct
  misc_feature 1..579: note = Description of Artificial Sequence: Synthetic coding sequence
  source 1..579: mol_type = other DNA
atgaacaaaagagattacatgaacacctcagtgcaagaaccaccattagactacagcttccgcagtattcacgttattcaggatctggtaaacgaggagccacggacaggcctgaggcccctgaagcgcagcaaaagtggaaagtctctaactcagagtctttggctaaacaataatgtcctgaacgatctgagagattttaatcaggttgccagtcagctgctggagcacccagagaatttggcttggattgacctgtcttttaacgacctgacctcgatcgatcccgtgctcacaaccttcttcaacttgtctgtgttgtacctgcatgggaacagcattcagagactaggagaggtcaataaactggccgtgcttcctaggcttaggagcttgacccttcacgggaacccaatggaggaggaaaaaggatatcggcagtatgtgctttgcacgttgtcgaggatcactacattcgattttagcggagtgacaaaagctgaccgaacaacagccgaggtgtggaagaggatgaatatcaagccaaagaaggcatggacgaaacagaataccttatag

SEQ ID NO: 228339 - DNA, 876 bp, synthetic construct
  misc_feature 1..876: note = Description of Artificial Sequence: Synthetic coding sequence
  source 1..876: mol_type = other DNA
atggggactccatggcggaaaaggaagggcatcgctggtcccggattgccggacttaagctgtgcactggtgctgcagcctagggcccaagtaggcaccatgtcccctgcgatcgccttggctttcttgccacttgtcgtaacgcttctggtacgctatagacattacttccgcctgctagttcgcacagtgttactgagaagccttagagactgcctttctggactacggatcgaagagagggctttctcttatgttttaacgcacgcacttcctggagatccaggacatattctaactacactggatcactggtccagtcggtgtgagtatctgagccacatgggccctgtgaaggggcagatcctaatgcgattagtagaggagaaggcgcctgcctgcgtcctcgaattagggacctattgcggatactcaaccctactgattgcacgcgctctgccccctgggggtcgtctactgactgtggagcgtgacccacgtacggctgcagtggccgaaaagctcatccggctcgcaggcttcgacgaacacatggtcgaacttattgtgggcagctcagaagacgtgattccttgcctgagaacacagtatcagttaagtagggccgatctggtgttactcgctcaccgtcctcggtgttacttgagagacctccaattgttggaagcccatgcgttactgccagccggagctaccgtgcttgctgatcatgtattatttccaggggctcccagatttctgcaatatgccaagtcctgcggcaggtaccgctgccgactccatcatacgggcctgccagacttcccagcaatcaaagacggtatcgcccagctgacttatgcaggccctggttag

SEQ ID NO: 228340 - DNA, 441 bp, synthetic construct
  misc_feature 1..441: note = Description of Artificial Sequence: Synthetic coding sequence
  source 1..441: mol_type = other DNA
atgaacaagagggactatatgaatacatcggtgcaggaacccccattagactattcatttcgcagcatccacgtcatccaagatctcgtgaacgaggaaccacggactggcctgcgcccactgaagcgctccaagtctggaaaatccttgacccagagcctgtggctcaacaataacgttctgaacgatctgagagactttaatcaagttgcatcccaactgcttgagcatccagagaacctggcatggatcgatctaagcttcaacgatctgacgtctattgacccagtgctgaccaccttctttaatctgagcgtgctgtatctgcacggcaattcaatacaaaggctcggtgaagtaaataagttggcagtgctgcctagattgaggagtctgacccttcatggcaacccaatggaggaggagaagggatatcggtag

SEQ ID NO: 228341 - DNA, 756 bp, synthetic construct
  misc_feature 1..756: note = Description of Artificial Sequence: Synthetic coding sequence
  source 1..756: mol_type = other DNA
atgggcaccccctggagaaagcggaaggggattgccggaccaggcctaccagacctgagctgtgcacttgtactccaaccatccctgcgggactgccttagcggtcttcggattgaagagcgtgccttctcttatgtgctgacacacgccctgccaggcgaccctggtcatattcttaccacccttgaccattggagctcgcgatgtgagtatctgtcccacatgggcccagtcaagggccaaatacttatgcggttggtggaggagaaagctccagcatgtgtgcttgaactcggaacgtactgcggctactcgaccctgcttatcgccagggccctgcccccaggaggccgtcttctgacagtggaaagagatcccagaacagcggcagtcgctgagaaactgattagactcgctgggtttgacgagcatatggtggagttgattgtggggtccagcgaagacgtaattccgtgtcttcgcacgcagtaccaactgtctcgcgctgatctagtcttgctggcccatagacccagatgctatctgcgtgacctccagctgctggaggcacacgccttgctgccagccggagctactgtgctagcagatcatgttttattcccaggtgctcctcggtttcttcagtatgcaaagtcctgcggtcgctaccggtgcaggctgcaccatacaggactgcccgacttcccggctataaaggatgggattgcccagctgacctatgctggtcccggatag

SEQ ID NO: 228342 - DNA, 876 bp, synthetic construct
  misc_feature 1..876: note = Description of Artificial Sequence: Synthetic coding sequence
  source 1..876: mol_type = other DNA
atgggcacaccgtggcggaagagaaagggcatcgccggtcccggattgcctgatctgagctgtgccctggtgctccagcctagagctcaagtgggtaccatgtcgcctgctatcgctttggccttcctgcctctagtggtcacccttcttgtccgctataggcattatttccgccttttggtgcgcaccgtcctcttaaggtccctgagggattgcttgtctggattgcgtatcgaggaacgcgcattctcctatgtcctcacgcacgcgctgcccggtgaccctggacatattctcacgaccctcgatcactggagctctaggtgtgagtatctctcgcacatgggccctgtaaaggggcaaatcttaatgcggctcgttgaggaaaaggctccagcttgtgtgctggaactgggaacttactgtggctacagtacactcctgatcgccagggctcttcctcctggaggacggcttttgacagtggaacgcgacccacgaactgcagcagttgcagagaaattgatacgccttgcgggttttgatgagcatatggtcgaactgatcgtggggtcatctgaggatgtaataccatgcctccgtacacagtatcagctgtcccgcgctgacctcgtgctgctggcccaccgtccaagatgttacctgagagacctgcagctcctggaagcccatgctctcttacctgcaggagctacagtgttggcggatcatgtcctttttccaggcgcaccgaggttcctgcagtacgcgaagagctgtggacgctacagatgccgcctgcatcacacgggcctgcccgattttcctgctatcaaagatggcatagctcagcttacatatgccggacccggatag

SEQ ID NO: 228343 - DNA, 477 bp, synthetic construct
  misc_feature 1..477: note = Description of Artificial Sequence: Synthetic coding sequence
  source 1..477: mol_type = other DNA
atgaataaacgcgactacatgaacacgtccgtgcaggagcccccactggattattcttttcggagtattcatgtaattcaagatctggtaaacgaagaaccccgaactggactccgacccctgaaacggagcaaatccggcaaatcactcacccagtccctgtggctaaataacaacgtgctgaatgatctgcgggactttaaccaggtggcatcacaactgttggaacatcccgaaaatttggcgtggatagacctgagttttaatgacctgacttcgattgaccctgtgttgacaacattctttaacctgagtgtgctgtatctgcatggcaactccattcagcgcctgggcgaggtgaataagctcgcagtgcttccacgcttgagatctctgacactccatggcaatcccatggaggaagagaagggctaccgcgtcccaggctccgtggagatgccccaccgacccccatag

SEQ ID NO: 228344 - DNA, 279 bp, synthetic construct
  misc_feature 1..279: note = Description of Artificial Sequence: Synthetic coding sequence
  source 1..279: mol_type = other DNA
atgaataagcgcgattacatgaatactagcgtgcaggaaccgcctctggactatagttttcgatccatccacgttatccaggatctagtgaatgaggaacctagaactgggttacggccactcaagagaagcaaaagcggaaagagtctcacgcaatcgttatggctcaacaataatgtgctgaatgatttaagggactttaatcaggtagcgagccaactactggagcatccggaaaacctcgcgtggatcgacctgtcctttaacgatttaacttag

SEQ ID NO: 228345 - DNA, 579 bp, synthetic construct
  misc_feature 1..579: note = Description of Artificial Sequence: Synthetic coding sequence
  source 1..579: mol_type = other DNA
atgaacaagcgtgattacatgaacacatcagttcaggaaccccctctagattattccttccggtccattcacgtcatccaagatctggttaatgaagaacccagaaccggcctgaggccactcaagcggagtaagtcaggcaaatctctgactcagagcttgtggctcaataacaatgtgctgaacgacctgcgggacttcaatcaggtagcctcacagcttctggaacatcccgaaaatctcgcttggatagatctgtccttcaatgatttgaccagtatcgaccctgtcttgactactttcttcaacctgtcggtgctgtacttacacgggaattctatccaaaggcttggggaggtgaacaaactggctgtgctgccacgcctgcgctcactgaccctgcatgggaatccgatggaggaggagaaaggttaccggcagtatgttttatgcaccttgagcagaatcacgactttcgacttctcaggggttacaaaggctgataggaccactgccgaagtatggaagagaatgaatattaagcccaaaaaagcctggacaaagcagaatacactctag

SEQ ID NO: 228346 - DNA, 477 bp, synthetic construct
  misc_feature 1..477: note = Description of Artificial Sequence: Synthetic coding sequence
  source 1..477: mol_type = other DNA
atgaacaaacgcgattatatgaacacttcagtgcaagagccccctctggattattccttccgttcaatccacgttatccaggaccttgttaacgaagagcctcgcacaggactgcgcccattaaaaaggtctaagtccggaaaatcgttgactcagagtttgtggctgaacaacaacgtcctcaatgacctcagggattttaatcaggttgcctcccagctgctagagcacccggaaaatctggcttggatagatctcagcttcaacgatttaacctctattgaccctgtgctcactacgtttttcaatctgtcagtgctgtatctccacgggaatagtatccagagactgggcgaagttaataagctcgccgtcctgcccaggcttcggtccctcactctacatggcaatccaatggaggaggagaaaggctacagggtacccggttccgtggagatgccccatagacctccatag

SEQ ID NO: 228347 - DNA, 315 bp, synthetic construct
  misc_feature 1..315: note = Description of Artificial Sequence: Synthetic coding sequence
  source 1..315: mol_type = other DNA
atgaataaaagggactacatgaatacgagcgtccaggaaccacccctcgattattcctttagatccattcatgtgatacaggatctagttaatgaggagcctagaaccggcctgcgccctttaaagagatccaaaagcggcaaaagtcttacccagtccctctggctgaacaataatgttctcaatgatctacgtgactttaaccaggtagcgtcacagttactcgagcacccagaaaatttagcctggattgacctatctttcaacgatttgacctctattgacccagtgctgactactttctttaatctttag

SEQ ID NO: 228348 - DNA, 525 bp, synthetic construct
  misc_feature 1..525: note = Description of Artificial Sequence: Synthetic coding sequence
  source 1..525: mol_type = other DNA
atggttgagttccagcctagtgtcacagaccttgtgaacgaggagcctagaaccggcttgcgaccattaaagcggtccaagagtgggaagtctctgactcaaagcctatggctcaacaacaacgtactcaacgacctgagagacttcaatcaggttgcctcgcagttgttggagcaccctgagaatctggcttggattgatttgtccttcaacgacctgacttctatcgatcccgttctcactactttctttaatctgtccgtgctgtatctgcatggcaatagtatacagcgactgggggaggtgaacaagctcgccgtcctcccaagattacgctccctgaccctacatgggaacccgatggaagaggagaagggctatcgccagtatgttctttgtacgctgtctaggataacaacatttgatttcagcggggtgacgaaggcagaccgcactacagccgaggtatggaagcgcatgaacatcaagcccaagaaggcatggaccaaacaaaatactctgtag

SEQ ID NO: 228349 - DNA, 3231 bp, synthetic construct
  misc_feature 1..3231: note = Description of Artificial Sequence: Synthetic coding sequence
  source 1..3231: mol_type = other DNA
atggcagagtttacttcctacaaggaaacagcaagctccaggcacttgagattcaagttgcaaagtctatctcgtcgactggatgagcttgaagaggctacaaagaacctgcagaaagccgaggatgagctacttgaccttcaggataaagtaattcaggccgaaggatccaattcctccatgctggccgagatcgaggtgctccggcaacgggtcctgcgaattgagggcaaggacgaggaaatcaaaagagctgaggatctgtgccgtctcatgaaggagaagctcgaggaggaagagaatctgactcgggagctcaagagcgagattgagaggctacagaagagaatggccgaactggaaaaactggaagaggcgttcagccgatctaagaatgactgcactcaactttgcttgtcgctgaatgaagagcgcaatcttactaaaaagatttcttctgagctggaaatgctgagggtgaaagtgaaagaattagaatcaagcgaggataggttggacaagacggaacagagcctggctagtgagctggaaaagttgaagtctttgacgttgagctttgtgagtgagcgtaagtacctgaacgagaaggagaaggagaacgagaagctcatcaaagagctaacccagaagctggagcaaaacaaaaagatgaatcgcgactacactcgcaatgcctcgaatttagaaaggaacgacttacgcattgaagatgggatcagctccaccctgccttcgaaggagtcccggaggaaagggggattagactacctcaaacaggtggaaaatgagaccaggaataagtcagagaatgagaaaaaccggaatcaggaggataacaaggtgaaggacctgaaccaggagatcgagaaactgaaaacccaaattaaacatttcgagagtctggaggaagagttgaaaaagatgaagtccaaaaataacgacttgcaagataactatctgagtgagcagaataagaataaacttctcgcgtcacagcttgaggaaattaagctccaaattaagaagcagaaagagctggagaacggggaagttgagggggaggacgcattcctgtcctcaaaggggagacatgagaggactaaattccggggacacggcagcgaggcatccgtttccaagcacacagcccgtgagcttagtcctcagcacaaacgggaaagattgaggaacagagaattcgcccttaacaatgagaattattcactgagtaaccggcaggtgagtagtccctcttttaccaatagacgcgcagccaaggcatcccatatgggcgtgtctacagattccggaacacaggaaaccaagaagactgaagatcgcttcgtacccggttccagccagtccgaggggaaaaagagccgagaacagccttccgtgctgtccagatacccacccgcagctcaggagcactccaaggcatggaagggaacgtctaaacccggtaccgagtcaggtctgaaaggcaaggtcgagaagacaactcggacatttagcgatacaactcacgggtcagttcccagtgaccccctcgggagggcagataaagctagcgatacatcaagtgaaacagtattcgggaagcgtgggcacgtgctgggcaatggctcccaggtcacacaagcagcgaattctggatgctcaaaggccatcggcgctctggccagcagcaggcgtagcagttccgaaggactgagcaaagggaaaaaagccgcaaatgggctcgaggctgataattcgtgtcctaactccaaagccccagtgctttcaaaatacccgtactcctgccggtcgcaggaaaacattctgcaggggttctcaacatcacataaggagggtgtaaatcagcctgcagctgtcgtgatggaggattccagtccccacgaagctctcaggtgtagggtgataaagtcgagtgggagagaaaagcccgattctgacgacgatctggacatagccagtttggtgactgctaaactggtgaatacaacaatcacaccggaaccagaacctaagccccagcctaactcacgggaaaaggctaaaacccgtggcgctccgaggacttcactcttcgagaacgataaagacgccggaatggagaacgaaagcgtaaaaagtgtgagagcttccactaacacaatggaacttccagacacaaatggggctggagtgaaatcccagagacccttctcccccagggaagccctgcggagccgggcaattattaaacctgtgattgttgataaagatgtgaagaaaatcatgggcggttccggcaccgagactacacttgagaaacagaagcctgtgtcaaaacctggacctaacaaggtaaccagctccatcaccatttacccctcggacagctcttcgcccagagccgcacctggcgaggccctgcgggagcgtcatacaagcacatctaatatccaagtggggctggccgaactcacttctgtgtcgaaccatgtctcttccccttttgagctttctatccataagcatgacatcacgttgcagctggcggaagctgaacgcatggcagatggtccactgaaggaccgaccggaaacagtcgtctcccggtccagcataatcatcaagccctccgacccagtggagcgaaatagccatgcaccccctgcagagactattagatggaagtctcatagcgctcccagcgaggtcggattcagcgacgcccgacacgtgactgtgcgtaatgcttggaaatcacggagggaccttaaaagtttggaggatcctccgacgagaatcggtaagaatgtagagagtacaaactctaacgcctacacccagcggagttccactgactttagtgagctcgagcagccgaggtcttgtctttttgagcaggggactagacgagtgggcccaagtagtggggacgctcccgagcccagtagtaggcggacccaatcttcactcactgtctctgaggtgctgaccagaaggaatcgagtgggagatactattacagttgctgcctggaatcattccgcatccatggaagaggagggagaggactgtactcttagtgtctacagacagctccataactctctcgacccgtcagaactgccgggtaaacaggggctgccagaaagtgggagagtgcgcgcagaggagaggctgagacccaccaggccttgcgccgaagagaattag

SEQ ID NO: 228350 - DNA, 3081 bp, synthetic construct
  misc_feature 1..3081: note = Description of Artificial Sequence: Synthetic coding sequence
  source 1..3081: mol_type = other DNA
atggcagagttcacgtcatacaaagaaacagcctccagtcggcacctgcggtttaaactccagagcctaagccgaagactggatgaactggaggaagccaccaagaacttgcaaaaggcggaagacgagcttctagatcttcaggacaaggtcatccaagccgagggctcgaattcctcaatgttggccgagatcgaggtgctgcgccagagagtgctccgaatcgagggcaaagatgaggagattaagcgtgcagaggacctatgccggttgatgaaagaaaagctggaagaggaagagaatttgacccgcgaactgaaaagcgaaatcgagcggttgcagaaacgtatggccgaacttgagaagctggaagaagctttctcccggagcaaaaacgattgtacccaattatgcctgagcctgaatgaggagagaaacctgactaagaaaatcagttctgagctggaaatgctgagagtgaaggtgaaggaactcgaatctagtgaggatcgcctcgataagactgagcaaagcctggcaagcgagttggaaaagttgaagtcgctgaccctgagtttcgtgtccgaaaggaaatatctcaacgagaaggagaaggaaaacgagaagcttatcaaggaactgacccagaaactggagcagaacaagaaaatgaatcgcgactatacaagaaacgcgagcaacctcgaacgtaatgacctcagaattgaggatggtatcagcagtacacttccatcaaaagagtcccgaaggaaaggcggtctggactacctgaaacaagttgaaaatgagaccagaaataaatcagagaatgagaaaaacagaaatcaggaagataacaaagtgaaagacctcaaccaggagatagagaaactaaaaacacaaataaagcactttgaatctcttgaagaggagcttaaaaagatgaaatccaaaaataacgacctgcaggacaactacctaagcgagcaaaacaagaataagctcctggcctcccagctggaggagataaagcttcagatcaagaagcaaaaagagctggagaatggcgaagtcgaaggggaagatgcattcctgagctccaagggcaggcatgaacgaactaagttcagaggccatggatcagaggcctccgtcagtaaacatacagccagagaactctctccacagcataagagggaacgcttaaggaatagagagttcgcattgaacaacgagaactactctctgagtaataggcaggtatcttccccctcgttcaccaacagacgcgctgcaaaagcaagccatatgggcgtgtctacagacagcggcacacaggaaacaaaaaagacagaggatcgcttcgtaccgggaagttctcaaagcgaaggaaagaagtctcgcgagcagcccagcgtactgtctcgatatcctccggcagcacaggagcattccaaggcctggaagggaacaagtaaaccaggtaccgagagcggccttaagggcaaagtggaaaagaccacccggacattctctgatactactcatgggtcagttcctagcgaccccctcgggcgagccgacaaggccagtgatacatcttccgaaacagtgtttggcaaaagggggcatgtgctaggaaacggcagccaagtgacacaagccgctaacagcggatgctcaaaggcaatcggggctctggcctcgtctaggcgcagtagcagcgaggggctctctaaaggcaagaaagccgctaacggtcttgaggcagataattcatgtccgaattctaaggctcccgtcctcagtaagtacccatactcatgccggagccaagagaacattctgcagggcttcagcacttcgcataaagagggagtgaaccaaccagccgcagtggtgatggaggactcgtccccacatgaggctctgaggtgtcgtgtcattaaatcgtctggcagagagaagccagattccgatgacgaccttgacatcgcctccctggttacagccaaactcgtcaacacaaccattacacccgaaccggagcccaaacctcagcccaactcccgcgaaaaagcaaagactcggggtgcgcctaggacatccctgttcgagaatgataaggatgccggaatggaaaatgaatctgtgaagagcgtgagagccagtacaaatactatggaactccccgatacgaatggggcaggggtgaaatcacagcgcccatttagccccagagaggctttaaggagccgagccattattaaacctgtcattgtggataaagacgtgaagaaaattatggggggatccggcaccgagacaaccctggagaagcagaagcctgtgagcaagccaggacccaataaagttacatcgagtatcactatctacccctcagacagctctagtcctagggccgcacctggagaggcactgagagagaggcatactagtaccagtaatattcaggtcggtctggcagagctcactagtgtaagcaaccacgtcagctctccatttgagctctctattcataagcacgatattacactgcagctcgccgaggccgagcgaatggccgacgggcctctgaaagaccgccctgagaccgtggtttccaggtcctccatcattataaagccatccgaccctgtggagcggaactcacatgccccacccgctgagacaatcagatggaagtcccacagcgctccttccgaggtgggtttcagcgacgcccgacatgtgactgtacgaaacgcatggaagagccgcagggacctcaaaagtctagaggacccgcctacccggattggcaagaatgtggagtccactaattcaaatgcatatacccagcgaagcagtactgacttttctgaactggaacagcctcgcagctgtctatttgagcagggcactcgtcgggtcgggccaagcagcggcgatgctccggagccttcctcaagacgtacacagtccagtctgacggtaagtgaggtgctgactagacggaatcgggtcggcgataccattacagtagccgcatggaatcacagcgcgagcatgagctcttag

SEQ ID NO: 228351 - DNA, 3231 bp, synthetic construct
  misc_feature 1..3231: note = Description of Artificial Sequence: Synthetic coding sequence
  source 1..3231: mol_type = other DNA
atggctgagttcaccagttacaaagagaccgcctcttccagacatctgcgattcaaacttcagagtctttcaagacgactggatgaactggaagaggcaacgaagaacctccagaaagcggaggatgagctgctggacctgcaggataaggtaatacaggctgagggatccaacagtagcatgctagccgaaattgaggtgctaagacaaagagtgctgagaatcgaaggaaaggacgaagaaattaagagagctgaggatctctgccgactgatgaaggaaaagctggaggaggaggaaaacctaacgagagaattgaaaagcgagattgaacgactgcagaagcgcatggctgaactcgaaaaactggaggaggccttctccaggagtaaaaatgactgtacccagttgtgtctttcactgaacgaggaacggaacctcacaaagaaaatcagctcagaactcgagatgctacgagtgaaggttaaagaactggagtcgtccgaagatagactcgataagaccgagcagtcattggctagcgaattagagaaactgaagtcacttacactctccttcgtcagtgaaagaaaatacctcaacgaaaaggagaaggagaatgagaagctgatcaaggagctcacccagaagcttgaacagaacaaaaagatgaaccgagattacacccgaaacgccagtaatctggaaaggaacgatctcaggattgaagacggcattagctcaacgttgccaagcaaagagtcccgtcggaagggcggattagattatctcaagcaagtcgagaatgagacacgtaataagtccgaaaatgagaagaaccggaaccaggaggataacaaggtcaaagatctgaaccaggagatcgaaaaactgaagacccagatcaagcactttgaatctctggaggaggaattaaagaagatgaagtcaaagaataatgacttacaggacaattacctttctgaacagaataaaaataagctactcgcatcacagctagaggagataaaactccagatcaaaaaacagaaggagttggagaatggagaggtcgaaggggaggacgcctttctgtcaagtaagggcaggcatgaacggacaaagttccgcggacacggcagcgaggctagcgtgagcaagcacacagctagagaactgagtccgcaacataagcgagaaaggttgcgaaatagggagtttgccttaaataacgaaaattattcactgtcaaatcggcaggtgtcctccccaagtttcaccaaccggcgagcggcaaaggcatcccacatgggcgtgtctacagactccgggactcaagagaccaagaaaaccgaggaccggttcgtgccaggcagcagccagtcagagggcaaaaagtccagggagcagcctagcgtgttgtctcggtatccccctgccgcacaggagcattccaaggcatggaagggtacgtcaaaaccaggaaccgaaagcggcctgaaagggaaagtggaaaagactacacgcactttttctgatactacacacggctccgttccatccgaccctctgggaagagctgacaaagcgtccgatacgagttcggaaacagttttcggcaagcgtggacacgttctgggtaatggctcccaggtgacacaggcggcaaatagcggatgcagcaaggccattggagcactcgcctcctctcggaggagctcctctgagggccttagtaagggcaagaaggccgctaatggcctcgaggccgataattcatgccctaatagtaaagcacccgtattatccaagtatccttactcttgtaggagccaagaaaacattctgcagggctttagtacctcacataaggaaggagtgaaccaaccagccgctgtcgtcatggaggattccagcccgcatgaggctctgaggtgtagagtaattaagtctagcggcagggaaaaacccgatagcgatgatgatttggatattgcttccttagtcacagctaagctggtgaataccacaatcacaccagagcctgagcccaaaccacaaccaaactctcgggagaaagccaagacccggggtgctcctagaacaagtttgtttgaaaatgacaaagacgctggaatggagaacgagtccgttaaatctgtccgggcaagcaccaatacaatggaattgccagacaccaacggcgctggggtcaagtcccaacggcctttcagccctagggaagcgctccgcagcagagccattatcaaacctgttatcgtggacaaagatgtgaagaagatcatggggggatccggaaccgaaaccacactggaaaagcaaaagcccgtttcaaagccgggacccaacaaggtcacctctagcatcaccatctatcctagtgactcatcctctcccagagctgcacccggtgaagctctgagggaacggcatacatcgacatctaacatccaggtcggactagcagaactgaccagcgtatccaatcacgtctcctctcccttcgaattgtctattcacaagcacgatatcaccctccagctcgcagaagccgaaaggatggcagatggccctctgaaggacagacccgagaccgtggtcagccgaagttctatcatcattaagccatctgatccagttgaacgcaattcacatgctcctccagctgaaactattaggtggaagtcccacagtgccccaagcgaggtgggtttttccgatgctaggcacgtcacagtccggaatgcctggaagtccaggagagatctcaaaagcttagaggacccccctacaaggatcggtaaaaatgtcgagtctactaactccaacgcctacacccaacggagtagcacggacttttccgaattagagcaacccaggagctgcctgttcgagcaaggaactaggcgggtgggccctagctccggagacgcgcctgaaccctcctctcggaggacccagagttcactgaccgtgtctgaggtcctgacccggcgtaatagagtgggagataccatcactgtagccgcatggaaccactctgcttctatggaagaggaaggagaggactgcactctgagcgtgtaccgtcagcttcacaattccctcgatccttcagaactaccgggaaaacaaggacttccggaaagcggacgcgtgagggccgaggagaggctgaggcccacgaggccatgcgccgaggagaactag

SEQ ID NO: 228352 - DNA, 3231 bp, synthetic construct
  misc_feature 1..3231: note = Description of Artificial Sequence: Synthetic coding sequence
  source 1..3231: mol_type = other DNA
atggctgaatttacgtcatacaaagaaaccgcatcttctaggcacctgcgattcaaactgcagtcactgagccgtagacttgacgagttggaagaggccacgaaaaacctgcaaaaggccgaagacgagctgctggacctgcaggataaggttatccaggcagagggttccaacagctctatgctcgcagagatcgaggtccttcgccagcgagtcttacgcatagaaggcaaggacgaggagataaaaagggcggaggatctgtgtcgtctcatgaaggaaaaactagaggaagaggagaacctgacccgggagctcaaaagcgaaatagaaagactgcaaaagcgtatggccgagttagagaagctcgaggaagccttttcaagaagcaagaatgactgcacacaactctgtctcagcctcaacgaggagcggaacctgacaaagaagattagttccgagctagagatgctccgagtgaaggtcaaagaattggaatcatcagaggataggctggataagaccgaacaaagtcttgcttcagaactggagaaacttaagagcctgactctatcatttgtcagtgagcggaaatatctgaacgaaaaagagaaagaaaatgaaaaactaatcaaggagctaacgcagaagctggagcaaaataagaagatgaatagagactatactcgcaacgctagcaatctcgagcggaacgatctccgaatcgaggacggcatttccagcacactgccctccaaggaatcccgcaggaaagggggattagactacttaaagcaggtggagaatgagactcgcaataagtccgagaacgaaaagaatcggaatcaggaagacaacaaggtgaaggaccttaatcaagaaatcgaaaagctaaagacccagataaagcatttcgagtctttggaagaggagctgaaaaaaatgaagtctaaaaataacgacctgcaagacaattatctgagcgaacagaataaaaacaaattacttgccagccagctggaggagataaagctccaaatcaagaaacagaaggaactcgaaaatggcgaagtagaaggtgaagacgccttcctcagctccaagggcagacacgaacgaaccaagtttcgaggccacggctctgaggcttctgtctccaaacacacagccagagagttgagcccacagcacaaaagggagcgcctccgcaatcgcgagtttgcactgaataacgagaattacagcctctctaaccgccaagtgagcagccctagttttactaaccggcgtgctgccaaggctagccacatgggagtgagcacagacagtggaacccaggaaactaaaaagacagaggacagatttgttcccggttcctcccagtcagagggcaagaaaagcagggagcagccatccgttctctcccgctatcctcctgccgctcaggagcattctaaggcttggaagggaacaagcaagcccggaaccgaaagcggactgaaaggaaaggtcgaaaagaccaccaggactttctcagatacgacccacgggagcgtgccaagcgatccactgggtcgagccgacaaggcctccgacacctctagtgagacagtgttcggcaagcggggacacgtgctagggaacggatctcaagttactcaggccgcaaactccggatgcagcaaagccatcggcgcactcgcttcttcaaggcgctcgagcagcgaaggtctgagcaaagggaaaaaagctgctaacggtttagaggcagacaactcatgtccgaattcaaaggctccagtgctgagcaagtatccttatagctgtcggagtcaggaaaacatcctgcaaggattttccacatcccataaagagggagtgaatcaaccggcagcagtggtgatggaggactcaagcccccacgaggctctccgctgcagagtgatcaaaagcagcgggagagagaagcctgactccgatgacgatctggatatcgcctccttggtgactgctaagttggttaacaccaccattacccccgaacccgaacccaaacctcagccaaattcccgagagaaagccaagactcgtggcgctccacggaccagcctcttcgaaaacgataaggacgccggaatggaaaatgagagtgtcaaaagtgtcagggcctcaaccaacaccatggagctgccagataccaacggagccggagttaagagccaacgccctttctcccccagagaggcgttgcgctcacgggcaatcataaagcccgttatcgtggacaaagatgttaagaagatcatgggtggttctggaactgaaactactctggagaagcagaagccagtgtctaagccgggaccgaacaaagtgacgtcctccatcaccatctacccttccgactcgagcagcccacgagctgcccctggggaggccctcagggagagacatactagcacctcaaatatccaggtcggtctcgcagaacttacctcggtgtcaaaccatgtctcttcccctttcgaattgtctatccataagcacgatatcaccctgcaacttgctgaggccgagagaatggccgacggcccactaaaggacaggccggagacggtcgtgagtagaagctccatcataatcaaaccgtccgaccctgtcgagaggaactcccacgccccaccagctgagaccatccggtggaagtcacacagcgcccctagtgaggtgggcttctctgacgccaggcacgtgacagtcaggaatgcatggaagtccaggagagatctcaagtctttggaagacccccctacaaggatcgggaagaacgtagagtctaccaactcaaacgcgtatactcagcgcagttctacagatttcagtgagttggagcaaccacggtcctgtttgtttgagcaaggaacacgtcgggtgggaccatcctccggggatgccccagaaccgagcagtaggcgaactcagtctagcctgactgtgagcgaggtcctgacacgtcgcaaccgtgtcggggacacgattaccgtggccgcttggaatcacagcgcgagtatggaagaagaaggcgaggactgcacgcttagcgtctataggcagctccataactcgctggacccatctgagctacccggaaaacagggactccctgaatccggtcgcgtcagagccgaggagcgacttagacccacacgcccttgcgcggaggagaactag

SEQ ID NO: 228353 - DNA, 822 bp, synthetic construct
  misc_feature 1..822: note = Description of Artificial Sequence: Synthetic coding sequence
  source 1..822: mol_type = other DNA
atggccgaatttacttcttacaaggaaacggctagctcacggcaccttcggttcaagctgcagtctctgtcaagacgtctggatgagttagaggaagctacaaaaaacttgcagaaagccgaggatgaactcttggacctacaggacaaggtgatacaagccgagggcagtaactcgtcaatgctcgcagagatcgaggtgctacgccagcgcgtgctgagaattgagggaaaggatgaagaaattaaacgggctgaggacctttgccgcctgatgaaggagaaattagaagaggaggagaacttgactagagagctgaaatctgaaattgaacggctacagaagcgaatggccgagctagagaaactggaagaagcgttcagtcgatcaaaaaatgattgtacgcagctgtgcttgtcactgaatgaagaaaggaatctgaccaaaaaaatcagctctgaattagagatgctgcgcgtgaaagttaaggaattggagtcctccgaagaccggcttgacaagaccgagcagagcctagcttccgaactggaaaagctcaaaagcctgactctgtcctttgtctcagaaaggaagtacctcaatgagaaggaaaaagagaatgaaaaactcattaaagagttaacacaaaagttggagcagaacaagaagatgaacagagattacacccgcaatgcctccaatcttgaacgcaacgatcttagaatagaggatggtatctcgtcaacactgccctcaaaggaaagccgacgcaaaggaggtctggactatctgaaacaggtggaaaatgaaactagaaactag

SEQ ID NO: 228354 - DNA, 108 bp, synthetic construct
  misc_feature 1..108: note = Description of Artificial Sequence: Synthetic coding sequence
  source 1..108: mol_type = other DNA
atggccgagttcacatcttataaggaaaccgccagctctcggcatcttcggttcaagcttcagagcctttcgcgccgtctggatgagcttgaagaggccaccaagtag

SEQ ID NO: 228355 - DNA, 1041 bp, synthetic construct
  misc_feature 1..1041: note = Description of Artificial Sequence: Synthetic coding sequence
  source 1..1041: mol_type = other DNA
atgaagttttccccagcacattatctgctgccactcctgccggctctcgtcctgtcaactcgccaggattatgaggaactcgaaaaacaactgaaagaagtttttaaagaacggagtacgatcctccggcaacttaccaagacctctcgggagcttgacgggatcaaagtcaacctccagtcactgaaaaacgatgagcagtctgctaaaactgatgtgcaaaaactgctggagctgggccagaagcagagggaggagatgaagtcactgcaggaggccctgcagaaccaattaaaagagaccagcgaaaaggcagaaaagcatcaggctaccataaacttcctcaaaacggaggtagaaaggaagtcaaagatgatcagagacctacagaatgaaaacaaaagcctgaagaacaagttgttgtccggaaacaaattgtgcggaatccacgccgaggagtcgaagaaaatacaggcccagcttaaagagctccggtatggcaaaaaagacctgctgttcaaggcccagcagctgacggacttggaacagaagttagctgtcgctaagaacgagttagagaaggcagccctcgaccgtgaatcccagatgaaggccatgaaggagacagttcagctttgtctgacaagcgtttttcgcgatcagcctccacccccactgtcactgattacctccaatccaacacgaatgctgctccctcctagaaatattgcgagcaagctgcctgacgctgctgcgaagtccaaaccccagcagagtgccagcgggaataatgagagttcccaagtggaatctacaaaggagggcaatccctcaaccacagcctgtgactctcaggatgagggtaggccttgttcgatgaagcacaaagaatcacctccttcgaatgccaccgctgaaactgaacccatcccacaaaagcttcaaatgccaccgtgttccgagtgcgaagtcaagaaggcccctgagaagcccctgacatcatttgaagggatggccgcacgtgaggagaaaattctgtag

SEQ ID NO: 228356 - DNA, 783 bp, synthetic construct
  misc_feature 1..783: note = Description of Artificial Sequence: Synthetic coding sequence
  source 1..783: mol_type = other DNA
atgaaatcactccaggaggctcttcagaaccagctcaaagaaacaagtgaaaaagcggagaaacaccaagccactatcaacttccttaaaactgaagtagagcggaaatccaagatgattcgggacctccagaacgagaacaaatcactgaagaataaactcctctccggtaataaactatgcggcatacatgccgaagagagcaaaaaaatccaggcccagttgaaggagctgcgctacgggaaaaaagacctgctgtttaaggcccagcagttgaccgatctcgagcagaagctggcagtggccaaaaacgagctggaaaaggcagcactcgacagagagtcccagatgaaggcgatgaaagagaccgttcagctctgcctaacaagcgtcttccgagatcagccaccaccccctctgtctctcataactagcaatcccacgagaatgcttctcccaccaagaaacatagcctctaagttaccagatgccgcagcaaaaagtaagccccagcagtctgcttctggcaacaatgaaagttcccaggtggagtccactaaagaaggaaatccatctaccaccgcctgcgactcacaggatgagggtcgcccttgctctatgaaacataaagaaagcccgccatctaacgccaccgccgagacggagcccattccgcagaagcttcagatgcccccttgtagcgagtgtgaggtaaagaaggccccagaaaagccactgacaagtttcgagggcatggcagcgagggaggagaagatcctgtag

SEQ ID NO: 228357 - DNA, 900 bp, synthetic construct
  misc_feature 1..900: note = Description of Artificial Sequence: Synthetic coding sequence
  source 1..900: mol_type = other DNA
atggcagagctgggcctgaacgagcatcaccagaatgaggttatcaactacatgcggttcgccaggtcaaagagaggactgcggctgaagaccgttgactcctgctttcaggatctgaaagaatcccgcttagtggaggacacctttacaatcgacgaggtgagtgaggtattaaatggcttacaggctgtggttcattccgaggtggagagcgagctaattaacacagcgtacaccaacgtcctgcttctgcgtcagttgttcgcccaagctgagaaatggtatctaaaactccaaaccgatatctccgagctcgaaaatagggagcttctggagcaagtggctgaattcgaaaaagctgagatcacgtccagtaataagaagccaattctcgacgttacaaagcccaagttggctcccctgaatgaaggcggtaccgctgagctgctgaacaaggagattctacggctacaagaagagaacgagaagctcaaaagtcgattgaagactattgaaattcaggccactaacgccttagatgaaaaatccaagctggagaaagctctccaggatcttcaacttgaccagggaaaccagaaggattttattaaggcacaggatctgagcaatctggaaaacacagtcgccgcattgaagtcggagttccagaagactttgaatgacaaaaccgagaaccagaaatctctcgaagaaaacctggcgaccgctaaacacgatctgctgagggtgcaagaacagctgcacatggccgaaaaggagctggagaaaaaatttcagcagaccgctgcctaccgcaacatgaaagagatattgacaaaaaaaaatgatcagatcaaggatctgagaaaacgccttgcccagtatgagcctgaagactag

SEQ ID NO: 228358 - DNA, 849 bp, synthetic construct
  misc_feature 1..849: note = Description of Artificial Sequence: Synthetic coding sequence
  source 1..849: mol_type = other DNA
atgcggttcgcacgttcaaaaaggggattaaggctgaaaacggtcgactcatgctttcaggatctaaaagagagcagactcgtggaagatacttttacaattgatgaagtctccgaggtgctcaatggcctgcaagccgtggttcactcggaggtcgagagcgaactaattaataccgcctacacaaatgttctcctcctgaggcaactattcgcccaggccgagaagtggtatctcaagctacagacagatatttcagaactggaaaaccgagagctgctagaacaggtcgccgaattcgaaaaagcagaaatcacatctagtaataagaagccaattttggacgtgacaaaacccaagcttgccccactgaatgagggcggaactgcagagctcttgaacaaggaaattctgaggcttcaagaagaaaacgaaaagctgaaatctcggttgaagacaattgaaattcaggccacaaacgcactggacgagaaatctaaactggaaaaagcgctccaggacctacagctggaccagggtaatcagaaggattttattaaagcacaggatctatcaaatctggagaacacggtggctgctctgaaatccgagttccagaagactctgaacgataagactgaaaaccagaaatccctggaggaaaacctggctaccgccaagcacgacctgctccgtgtgcaggagcagctgcacatggcagagaaggaactggaaaagaaatttcagcagacagcggcataccgtaatatgaaggaaattcttacaaaaaaaaacgaccaaatcaaagacctgcgcaagcgcctggcccaatacgaaccggaggactag

SEQ ID NO: 228359 - DNA, 771 bp, synthetic construct
  misc_feature 1..771: note = Description of Artificial Sequence: Synthetic coding sequence
  source 1..771: mol_type = other DNA
atgcggaatcaagaccctggaaaaatgggcagacagaggaaatccatcaaactgtatcctacccaccctttggtgacttttccgaggagctgggcaaaatttcaggaaaaagctcttctggtggaagacaccttcaccatcgatgaggtaagtgaggttctcaacgggctgcaggccgtggtgcacagcgaggttgagtcagagctaattaatacggcgtacaccaacgtgctcctgttaaggcagctgtttgcccaggcggaaaagtggtacctcaaactgcaaaccgatatctcagagctggagaacagggagctactggagcaggtggcagaattcgagaaggctgagatcacctcctcaaacaagaagcctattctcgatgtcactaaaccaaaattggcacctctaaacgaaggagggaccgctgagttgttaaataaagagatactgcgacttcaggaagagaacgagaaactcaaaagtcgcctgaagaccattgagatccaggctacaaatgccctggatgagaaatccaagctggagaaggctctgcaagacctgcagctggaccaaggcaaccagaaagactttataaaagcccaggatctgtccaacctggaaaatactgtggctgcccttaagtcagagtttcagaagacactcaacgacaaaacagaaaatcagaagtcactggaggagaatctcgccactgccaagcatgacctgcttcgcgtgcaagaacagctgcacatggctgagaaaatatag

SEQ ID NO: 228360 - DNA, 441 bp, synthetic construct
  misc_feature 1..441: note = Description of Artificial Sequence: Synthetic coding sequence
  source 1..441: mol_type = other DNA
atggttgacgagctcgtgctgctcctgcacgcgttgttgatgagacacagggcgctgagcattgaaaacagccaattaatggagcaactgagactactggtttgtgaacgcgcatccctccttaggcaggtaaggcccccaagctgccctgtcccttttcccgaaacattcaatggggagtcctcgcgcctccctgaatttatcgttcaaacagcctcttatatgctggtgaatgaaaacagattctgtaacgacgcgatgaaggttgcttttctgatctccctactgactggcgaagccgaggagtgggtggtgccgtatatcgagatggattccccaatcctgggagattacagagctttccttgacgagatgaagcagtgtttcggctgggatgatgatgaagacgatgacgatgaagaagaagaagacgactattag

SEQ ID NO: 228361 - DNA, 2220 bp, synthetic construct
  misc_feature 1..2220: note = Description of Artificial Sequence: Synthetic coding sequence
  source 1..2220: mol_type = other DNA
atggcctctatactgctgaggtcgtgcagagggcgtgccccagccaggttaccccctcctccaagatataccgtccctagaggtagccccggtgacccagctcatctaagttgtgcttctactctgggattgcgtaattgcttgaacgtgccctttggttgttgcacccccattcatccagtgtatactagttctcggggagaccatcttgggtgttgggcccttcgcccagagtgtcttagaatagtgagtagagccccatggacctctacaagtgttggttttgtagcggtgggaccgcagtgcttgcctgtgcgcggttggcactcttcaaggcctgtgcgcgacgactccgttgtcgagaagtccctaaaaagcttaaaggacaaaaataaaaagctggaagaggggggaccagtctacagcccgccagctgaagtcgtcgtgaagaagtccctcggtcagcgcgtgttagacgaacttaaacattattatcatggatttcgcctgttgtggattgacacgaagattgccgctcgcatgctgtggagaatcctgaatggacattccctcacacggagagagcggagacagttcctacgcatctgcgcagacctctttcgcttggtcccatttctcgtatttgtggtggttcccttcatggagttcctcctccctgtggctgtgaagctgttccccaacatgttgcccagtactttcgaaacccaaagcttgaaagaggaacggcttaaaaaggagctgcgtgtcaagcttgagctggctaaatttctccaggatactattgaggaaatggctctaaagaacaaagctgccaaggggtctgcaacaaaagacttctctgttttctttcaaaaaatcagggagacaggagagaggccgagtaatgaggagatcatgcggttcagcaaactgtttgaggatgagctgaccctggataacttgactcgccctcagctggtcgcactgtgcaagcttctggaactgcaatcaatcgggacaaataacttcttgcgcttccagttaaccatgagactcaggagcataaaggccgacgataaattgatagccgaggaaggcgtggattctctgaacgtgaaagagctccaggcagcttgtcgcgctcgaggcatgagagcgctaggagttacggaggaccggctgagagggcagctcaagcagtggctcgacttacacttgcaccaggagattcctactagcctcctcattttatcgcgcgcaatgtacctccccgacaccctgagcccggcagaccagctcaagtcaacgttgcaaaccctgcccgaaatagtggcaaaagaggcccaggtgaaagtggcggaggtggaaggcgagcaggtagataacaaggccaaactggaagccacgctgcaggaagaggctgctatccagcaagaacaccgggaaaaggaactgcaaaaacggagcgaagttgcaaaagacttcgagcctgagcgggtggtggcggctcctcagagacccggtaccgagccgcaaccagagatgcctgacaccgtgctccagagcgaaacgctcaaggacaccgcgcctgtccttgagggtttgaaggaggaggaaattaccaaagaggaaatcgacatcctgagcgacgcctgctccaagttacaggagcagaagaagtccctcaccaaagagaaagaagagttggagctactgaaagaggacgtgcaggactatagtgaagacctgcaggaaatcaagaaggagctctccaagacaggggaggagaagtacgttgaggagtctaaagcttctaagaggttaaccaagagagtgcagcagatgattggccagattgatgggttaatcagccagctcgagatggaccaacaggccggaaaactagctccagccaatggtatgcctacaggtgagaacgtgatctccgtagctgagctgattaacgcgatgaaacaggttaaacatatcccggagtctaaacttacctccctagcggctgccctcgacgagaacaaagacgggaaagtgaatattgatgacctagtcaaggtcattgaactcgtcgataaagaggacgtgcatattagcacatcgcaggtcgcagagatagtcgccaccttagaaaaggaagaaaaggtggaagaaaaagaaaaagctaaagaaaaggctgagaaagaagtcgccgaggtcaaaagctag

SEQ ID NO: 228362 - DNA, 759 bp, synthetic construct
  misc_feature 1..759: note = Description of Artificial Sequence: Synthetic coding sequence
  source 1..759: mol_type = other DNA
atgcggcatacttggccttttcggaacgtaccctttgggtgttgcactcccatacatccagtctatacgtcatctcgaggcgaccacctggggtgctgggcattgaggcctgagtgccttagaattgtcagcagggctccctggacaagcactagtgttggctttgtggcggtcgggcctcaatgccttcccgttcgtgggtggcactccagccgccctgtacgggatgacagcgtcgtcgagaagtcgctcaaaagcctgaaggataagaataaaaaactcgaggagggtggaccagtgtattccccccctgccgaggtcgttgtcaagaaatcgctgggccaaagggtcctggatgagcttaagcattattatcatggtttccgcctactctggattgacactaagattgccgctcgcatgttgtggaggatcttgaacggacattccttgacgagacgcgagcgtaggcagttcctcagaatttgtgcggatctgtttcggctagtgccatttctggtattcgtggtcgtgccctttatggagttccttcttcccgtcgctgtgaagttgtttccaaatatgctcccttctacctttgaaacccaatctcttaaggaggagcgcctcaaaaaggagctgcgggtcaaactcgaactcgccaaattcttgcaggatactatagaggagatggcgctgaagaataaagctgcaaagggcagcgccactaaagattttagcgttttctttcaaaaatag

SEQ ID NO: 228363 - DNA, 4185 bp, synthetic construct
  misc_feature 1..4185: note = Description of Artificial Sequence: Synthetic coding sequence
  source 1..4185: mol_type = other DNA
atggccgcattacttaggagcgctagatggcttctcagagccggagctgccccaagattgcctctgtccctgagacttttacctgggggtcccggacggctgcatgcggcaagttacctacccgctgctcgcgcaggccctgtagctggcggactgttgagccctgcacgactgtatgcaattgctgccaaggagaaggatatccaggaagaatccactttcagctccaggaagattagtaatcaattcgactgggcactgatgcggctggacctgtccgtgcgacgcacgggcagaatcccgaagaagttactgcaaaaagtgtttaacgacacatgcaggtcaggcggactcgggggtagtcatgctttgctgcttctccggagctgcggaagtttacttcccgagttgaagctcgaggagcggacagaattcgcgcatcgaatttgggataccctgcagaagctgggcgctgtgtacgatgtatcccactataacgccctgctcaaagtatacctgcaaaacgagtacaagttttccccgacagattttctcgcaaaaatggaggaagcgaacatccagccaaacagggtaacataccagcggctcatcgccagttactgcaacgttggagacatcgagggtgccagcaagatccttggctttatgaagacaaaggatttgccggtgacagaggctgtgttttcagctttggtgacgggtcacgctagggcgggagacatggagaatgctgagaatattctgacagtcatgcgagatgcaggtatcgagcccggaccagatacttatctcgcactgcttaacgcctacgccgagaagggagatatcgatcatgttaagcagaccctggagaaggttgaaaagtctgagctccacttgatggaccgggacctgctccagataatcttctccttctccaaggcagggtatccacaatacgtctctgaaatcctcgagaaagtgacttgtgaacggcgttacatccccgatgccatgaacctgatactactcctggtcactgaaaaactggaagacgtggccttgcagatacttctagcgtgccccgtgtctaaggaggacgggccatccgtgttcggttcctttttccttcaacattgcgtgactatgaacactccagttgaaaagctcacagattactgtaaaaaattgaaggaggtgcagatgcatagcttcccactgcagtttaccctccactgtgccttgctggccaataaaaccgatctggccaaggccctgatgaaggccgttaaggaggagggtttcccgattaggccccactatttctggccattgctggtgggccgtcgaaaggagaagaatgtgcaggggattattgagattctcaaggggatgcaggaacttggagtccaccccgaccaggaaacctacactgattacgtgatcccctgctttgatagcgtcaactcggctcgggctatcctacaggaaaacgggtgccttagcgattctgacatgttcagccaagccggattgcgcagcgaggcagctaatggtaacctcgatttcgttttaagtttcctaaaaagtaatacacttccgatctccttgcagtccatcagaagcagtctgcttctgggctttcgacgtagcatgaatattaacctgtggtctgaaatcaccgaactgctgtataaggacggccgatattgccaggaaccaagaggaccaaccgaggccgtgggctactttctttacaatctgatcgactccatgtcagattccgaagtccaagctaaggaggaacacttacgccagtactttcaccagctcgaaaaaatgaacgtaaaaatcccggaaaatatttaccggggtattaggaacttactggagagttatcacgtgccagaactgattaaagacgcccacctccttgtcgaatccaaaaacctagactttcagaaaacagtgcagctaacctccagcgagctggagtcgacccttgaaacactgaaagcagaaaaccagccaatcagggatgtgctcaaacagctcattctggtgctctgcagcgaggaaaacatgcaaaaagctctggagttaaaagccaaatacgaaagcgatatggtcacaggcggatacgccgcactaataaatttgtgttgtagacacgacaaagtcgaagacgcgctgaacttaaaagaagagtttgatcgactggactcctcagccgtcctggacaccgggaaatacgtcggactcgtgagggtgcttgctaagcatgggaaacttcaagatgccataaacatccttaaagagatgaaggagaaggatgtattaataaaggataccacggcacttagcttctttcacatgctgaatggcgctgccctgcgtggcgagatcgagactgtgaagcagctccatgaggcgatcgtgaccctagggctcgctgagccctctacaaatatcagctttcctctggtcaccgtacacctggagaagggagatctctccacggcactcgaagttgccattgactgctatgagaaatacaaggtactgcccaggattcatgacgtcctttgcaagctggtggagaagggagagacggacctcattcagaaggctatggatttcgtgagccaagagcagggggagatggtgatgctgtatgacctattctttgctttcctgcaaacggggaattataaagaggccaagaagatcattgagacacccggtatcagggccaggagtgctcgcttgcaatggttttgcgatagatgcgtggctaacaatcaggtggagactctggagaagctcgtagagttgacacaaaagctgttcgagtgtgaccgggatcaaatgtactacaacctcctaaagctctacaaaattaatggcgactggcagcgtgccgacgctgtgtggaataaaatccaggaggagaacgtaattccgagagaaaaaaccctccgcctgttggcggagatcctgcgagagggaaatcaggaggttccgttcgacgtccctgagctatggtacgaggacgaaaagcactccctgaacagcagttctgcctctactaccgagccagatttccaaaaggacattctcatcgcgtgtagattgaaccagaagaagggagcctatgatatatttctgaatgctaaggaacagaatattgtttttaacgccgagacctattctaatcttatcaaactgctgatgtctgaagattactttactcaggctatggaagtcaaagcttttgcagagacacacatcaaaggctttacgcttaatgatgccgctaactcgagactgataatcacccaggtgcgcagagattatctgaaggaagctgttaccactctcaagaccgtgttggaccaacagcagaccccatcccgactggcagttaccagagtgatccaggccctcgccatgaaaggggacgtggagaacatcgaggtggtgcagaagatgctgaacggattggaggattcgattgggttatccaagatggtgttcatcaacaatatcgctctggcacaaattaaaaacaacaatattgacgccgctatcgagaacattgaaaacatgctaacatccgaaaataaagttatcgagccgcagtattttgggttggcctacctgtttagaaaggtcatcgaggagcaattggagccagctgtcgagaaaatctcaattatggccgagaggcttgctaaccagtttgctatatataaacccgtgacagatttcttcttgcaacttgtggatgccggtaaggtcgacgatgcccgagctctactccaacgatgcggggctatagccgaacagactcccattttgctgctgtttttgctgcgtaactctaggaagcaaggcaaagctagcacggtgaagagcgtcctcgaactaattccagagctgaatgaaaaagaggaggcctacaactcgttaatgaaatcatacgtgtctgagaaggacgtcacgtcagccaaagccctgtatgaacatctgacagccaaaaacactaagctggatgacctatttctcaagagatacgcctcactgctcaaatatgccggagagcccgttccctttatagagcccccagagtctttcgagttttatgcacaacaactgaggaagctgcgggaaaactcatcctag

SEQ ID NO: 228364 - DNA, 3264 bp, synthetic construct
  misc_feature 1..3264: note = Description of Artificial Sequence: Synthetic coding sequence
  source 1..3264: mol_type = other DNA
atgccacctccaatatgtcccccactggctccaggaccttggcccggagggcttggaggaagtcacgcactgctgctccttcgctcgtgcgggtcactcctcccagaacttaagctcgaggagcgtaccgaatttgcccacagaatttgggacaccttgcagaaactcggagccgtctacgacgtgagtcactataacgcactcctaaaggtttacctccaaaacgagtataagttctcacctaccgacttcctggccaagatggaggaggccaacatacagcccaacagggtcacctaccagcgacttatagcatcatattgtaacgtgggtgacattgaaggtgcatctaaaattctaggttttatgaaaactaaggaccttccagttaccgaggccgtctttagtgccctggtgaccggacacgccagagcaggtgacatggaaaatgcggagaatatcctgaccgtaatgcgcgatgccggtatagagcccggacccgacacatacttagccctgttaaatgcatacgccgagaagggagacatagaccacgtcaagcagacactggaaaaagttgaaaagtctgagcttcatttaatggatcgcgacttgctgcaaatcatcttctctttctctaaggccggttacccccagtacgtgtctgaaatcctcgagaaggtaacttgtgagcgtcgttatattccagacgcaatgaacctcattcttctgctggtcacagagaagttggaagatgttgccctacagattcttctcgcgtgcccagtgtctaaagaggacgggccatcggttttcggctcttttttcttacagcactgtgtcaccatgaatacacccgttgaaaaattaacggattactgcaagaagctgaaggaggtccaaatgcactctttcccattacagttcacactgcactgcgcactgctagccaataaaactgatctggccaaggcgctcatgaaggctgtcaaagaggaggggttccctattcggcctcattatttctggccgctgctggtcgggaggcgcaaggaaaagaatgtgcagggcatcattgagatcctgaaagggatgcaggagctcggggtacatcctgaccaagagacttatacagattacgttatcccttgcttcgactcagtgaactcggctcgcgcaatcctccaggaaaacggttgccttagcgattcagacatgttctcacaggcagggctccggtcagaagccgcaaacgggaatttggatttcgtgctgtcattccttaaaagcaatactttgccaatttccctgcaaagcatcaggtcgagtctcttgttagggttccgccgtagcatgaacattaacctgtggagtgaaataactgaattgctctacaaagacggaaggtactgccaggagcccagaggcccaacggaagcagtcggctacttcctatataacctcatcgattcaatgtctgacagtgaggtccaggccaaagaagaacatctgcgccaatattttcatcagctggaaaagatgaatgtaaaaatcccggaaaacatttacagaggaatccggaatctgctggaaagctatcatgtgccggaactcatcaaggacgcgcaccttctggtcgaaagcaagaacctcgactttcagaagactgtgcaactaacttcctcggaactggagtctactttagagacactgaaagccgagaaccagcctatacgagatgtgctgaagcagctcatactagtcttgtgctcggaagagaacatgcagaaggcgctagaacttaaagcaaaatacgaatccgacatggtgactgggggttatgcagccctgatcaacctttgctgcaggcacgacaaggttgaggatgcattaaacctcaaggaggagttcgaccgactggattccagcgcggttctcgataccggaaagtacgttggactggttagggtattggccaagcatgggaaactgcaagacgctatcaacattcttaaggagatgaaggagaaggatgtgctcattaaagataccacagctctatctttctttcatatgcttaacggggcagcattgaggggtgaaattgagaccgtgaaacaactgcatgaggcaatagtaactctgggacttgctgagccctctacgaatatcagttttcccctggtaactgtccacctcgagaaaggtgatctcagcaccgcactggaggtggctatcgactgctacgagaaatataaagttctcccacggatacacgatgtcctctgtaagctggtagaaaagggcgagaccgatctgatccaaaaagcgatggacttcgtgagccaggagcagggggaaatggtgatgctgtatgacctgtttttcgctttccttcagactggtaattacaaggaggccaagaagatcattgagaccccaggcatccgtgccaggtccgcccgtctgcagtggttttgtgaccgctgtgttgccaacaatcaagtggagaccctggaaaagcttgttgaactgacccagaagctttttgagtgcgatagggatcagatgtactacaatcttctgaaactgtataaaatcaacggagattggcaacgggctgacgccgtctggaacaagatccaagaagagaatgtaattcctagggagaaaacccttagactgctggctgaaattctcagagaggggaatcaggaggtgcctttcgatgtgccagagctgtggtatgaggatgagaagcacagtttgaattctagctccgcttcaacaacagaaccagactttcagaaggacatattgattgcctgcaggttgaaccaaaaaaaaggcgcttatgatatcttcctgaacgcgaaggagcagaatatagtgttcaacgcagaaacctattccaatctcataaaactactcatgagcgaggattacttcacacaggctatggaggtgaaggccttcgccgagacgcatattaagggctttacccttaacgatgccgctaactctcggctgattataactcaggttcggagagattatctgaaagaggccgtgacaactctgaaaacagtgctggaccagcagcagaccccgtcccgcttagcagtgacacgggtaatccaggcactcgctatgaaaggagatgtggaaaacatcgaggtggtgcagaagatgctcaacggtctggaggattcaataggcctcagtaagatggtgtttattaacaatatcgccctcgcccagtag

SEQ ID NO: 228365 - DNA, 2856 bp, synthetic construct
  misc_feature 1..2856: note = Description of Artificial Sequence: Synthetic coding sequence
  source 1..2856: mol_type = other DNA
atgcctggtccactggggctgctttgctttctggctctggggctcctgggttcagccggtccgagtggcgctgcgccaccgttgtgcgcagccccatgctcctgtgacggtgatcgcagagtggactgtagcggaaaaggcctgaccgcagtgccagaaggcttgtctgctttcacacaggccctggatatcagtatgaataacatcacacaattgcctgaagacgctttcaagaatttcccattcctcgaggaattacagctcgctgggaacgacctgtccttcattcatcccaaagctctcagtggactcaaagagttaaaggtcctgaccctgcaaaacaatcagctaaaaaccgtgccatcagaagcaattcgagggctcagtgccttgcagagcttaaggctcgacgcgaaccacattacgtcagtgccggaagattcttttgaaggactagtccagctaagacacttgtggctggatgacaactcccttacggaggtgcccgttcaccccttgtccaatttgcccaccctacaggcgctcaccttggccctaaacaagatatcatccatcccggatttcgcattcactaacctgtcatctttggtggtgttgcatcttcataataataagatccgatctctgtcccaacactgtttcgatggactagataacctggaaacattggatctgaactacaataacctgggggaatttccccaggcgattaaagccctgccctcactcaaggagctcgggttccacagtaattctatcagtgtgatccccgacggggcatttgatggaaatcccctgttaaggacaattcatctctatgataatccactgtcattcgtgggaaattctgcctttcacaacctgagtgacttgcacagcctcgttatcagaggtgccagtatggtacagcagtttcctaacctgactggtaccgtgcatttagaaagcctcaccttgaccggcaccaagatcagcagtatcccaaacaacttatgccaggagcaaaagatgttaagaacattggatctttcatataataacatacgggacctgccaagtttcaacgggtgtcacgctttagaggagattagcttgcaacgaaaccagatctaccagatcaaagaagggactttccagggtctgatttccttgcgcatcttagatctgtcaaggaatttaatccatgaaatccatagccgagcatttgccacactaggcccaatcaccaatttagacgtgagcttcaatgaactaacgagtttccccaccgaagggctcaatggactgaaccaactgaaactggtcggtaactttaagttgaaggaagccctggccgcaaaggactttgtgaacctgcgctcgctgtctgttccctacgcctaccaatgctgtgcattctggggctgcgatagttacgcgaacttgaacacggaggacaactctctgcaggaccacagcgttgctcaagagaaggggacagcagatgcagccaacgtaacatccaccctcgagaacgaagagcacagtcagattataatacactgcacaccctcaaccggtgcattcaagccttgcgagtacttgctggggtcctggatgatccgtctcacggtctggtttatctttctggtcgctctgttcttcaacctgctggtgatactcaccacctttgcttcgtgcacttcgcttccctctagcaagctgttcataggactcatcagcgtctccaatctgtttatgggtatctacacgggtattctcaccttcctcgatgcagttagctggggcagattcgctgaatttgggatatggtgggagacagggtcaggctgtaaggtggctgggttcctagctgtgttctcctccgaatccgcaatctttctgttgatgctggcaacagtagaacgctccctgtccgctaaagatatcatgaaaaacggcaagtcaaaccatctcaaacagttccgggttgcagctttgctagccttcctgggggcaactgtggccggttgtttccctctgtttcacaggggcgaatactccgcctccccgctttgtctcccatttcctacaggcgagactccctcactgggtttcactgtgaccttagtcctcctcaacagccttgcttttctgctgatggcagtgatttataccaagctatactgcaatcttgagaaggaagacttatctgaaaacagccagtcctctatgattaaacacgtggcgtggctcattttcacaaactgtatctttttttgtcccgttgcgtttttcagcttcgccccactcattaccgccatcagtataagcccagagataatgaagtcagtgaccttgatcttctttcctctgcccgcatgtttaaaccccgtgctctacgtgttcttcaaccctaagtttaaagaagattggaagctacttaagcgtagagtcactaagaaaagcgggtccgtgtccgtaagcatctcatctcaaggcggatgcctggaacaggacttctattacgactgcggaatgtattcgcatttacagggcaatctcacggtctgcgactgttgcgagtctttcctgctcacaaagcccgtgagttgtaagcatctcatcaagagccactcatgtccagctctggccgtggcctcgtgtcaaagacccgaagggtactggtctgattgtgggacccagtcagcacattcggattatgcagatgaagaagatagttttgtgtccgacagtagtgaccaagtgcaggcatgtgggagggcatgcttctatcagagccgcggtttccctctcgtccgctatgcttacaatctcccacgagtgaaagactag

SEQ ID NO: 228366 - DNA, 2724 bp, synthetic construct
  misc_feature 1..2724: note = Description of Artificial Sequence: Synthetic coding sequence
  source 1..2724: mol_type = other DNA
atggacacatctagattgggggtgctgctctctctgcctgttctgttgcagctggcgacaggcggaagctctcccagatcaggggtcctgctgagaggttgccccacacactgccattgcgaaccagatgggaggatgcttctccgagtcgattgttctgacttaggcctcagtgaattacccagtaatctgtcagttttcaccagctacctcgacctttctatgaataacatttctcagctgctccccaatccactgcccagcctcagatttcttgaagagctcagactggccggaaacgcactgacttatatccctaagggggcatttacaggactgtacagtctgaaggttttaatgctccaaaacaatcaattaagacacgtcccgaccgaagcgctacagaacctaaggagcctccagtctttgagactggatgctaaccacatctcttacgtgcctccgtcttgtttctccggcctccattccctgaggcatctctggctggacgacaacgcacttaccgaaattcccgtccaggcttttcgcagcctgtcggcactgcaggctatgaccctggccctcaataaaattcatcacattcctgattacgcatttggtaatctgtcttcgttggtagtgctgcacctacacaataaccggatacattctcttgggaagaaatgttttgacggactgcattctctcgagacactggatttgaattacaataacctcgatgaattccctactgccataaggaccctgtctaacctgaaggaactgggtttccactccaataacattcgtagtattcctgagaaggctttcgtcgggaaccctagcctgatcactatacacttttacgacaatccaattcagttcgtagggagatccgcattccaacatctgccagagttgagaacactgacgctcaacggcgcttcacagattactgaatttccagacttaacaggcacagccaacctggaatctctcacccttaccggagcacaaatttctagcctgccacagacagtgtgcaaccagctacccaacctccaagttcttgacctctcgtacaacctgctcgaggacctgccttcgttttctgtttgtcagaaacttcagaagatcgaccttagacacaacgaaatctatgagattaaagtcgacacttttcagcagctgctctcactgcggagcctcaacctggcctggaataaaattgctatcatacatccaaacgcatttagcactctgccatcactgattaaactcgatttgagttccaatcttctatcctctttccctattacgggcctgcacggcctgacacacttgaagcttacaggaaatcatgctctgcaatccctcatctccagcgaaaacttccccgagcttaaagttatagaaatgccctacgcatatcagtgctgtgctttcggcgtctgcgaaaacgcgtataagatcagtaatcaatggaataaaggggacaattcttcaatggacgatctccataagaaggatgctgggatgtttcaggcgcaggatgagcgagacctggaggatttcctactggacttcgaagaggaccttaaagccctgcacagcgtgcagtgttcaccttcgcctggaccctttaagccatgcgaacatctcctggatggctggctgattcgcatcggggtgtggaccatcgccgtgctggccctgacatgtaacgcccttgttaccagcacagtgttccggtccccgctctatattagtccgataaaactgctgatcggagttatcgccgctgtcaatatgttgaccggtgtcagcagcgctgttctggccggtgtcgatgcttttacctttggttcattcgcgcgacacggcgcatggtgggagaatggagtcgggtgtcacgtgattggatttttgagcatcttcgcctccgagtcctccgtcttcctcctgaccctggccgctctcgagagaggcttctccgtgaaatacagtgccaaattcgagactaaggctccattttctagtcttaaggtgataatactgctgtgtgccctgctagccttgactatggcagcagtgcctctgctcggcggaagtaaatatggtgcctccccactgtgcctccctttacccttcggcgaaccgtccaccatgggttatatggtggcactgattctgttgaactcactctgtttcctaatgatgacgattgcatacacgaagctgtattgtaacttggataaaggtgatctggagaacatctgggattgcagtatggtgaagcacattgcattgctgctgttcactaactgcatcctgaattgccccgttgcattccttagctttagcagcctcattaatctgacgttcattagcccagaagtgataaagttcattctgctggtcgtagtgccacttcccgcttgtttgaatcccttgctttacatcctatttaatccccatttcaaagaagacctcgtgtccctccgtaaacaaacttacgtctggaccaggtcaaaacacccttcactgatgtccataaatagtgatgatgtcgaaaagcagtcttgcgattcaacacaagccctggtgacgtttactagcagctccatcacctatgatctgccgccaagttcagtcccttcaccggcttacccagtgacggagtcttgccatctgtctagtgttgctttcgtgccctgcttatag

SEQ ID NO: 228367 - DNA, 2334 bp, synthetic construct
  misc_feature 1..2334: note = Description of Artificial Sequence: Synthetic coding sequence
  source 1..2334: mol_type = other DNA
atggatacgtccagacttggggtcctgctgtccttaccggtgttactccagcttgcaaccggcggttctagccctagatctggcgtgttgctcagaggatgccctacccattgccactgcgaaccagacggaagaatgctgttgcgtgtagactgttccgatctcggtctctctgaactcccttcaaatttatccgttttcactagttatctggatctcagcatgaacaatatctcacagctgctacctaaccctctcccatctttgcgcttcctggaggaactgcgactggctgggaatgccctgacctacatccccaaaggcgcttttacggggctgtattctctgaaggttctgatgcttcagaacaaccaactgcgacacgtgccaaccgaggcccttcagaaccttcgcagtcttcaatccctgcgtctggacgccaaccacatctcctatgtcccaccttcatgcttttctggactgcattccctccgtcatctctggttggatgataacgccctgactgaaatccctgtccaggctttcaggagcctgtccgccctgcaggctatgaccctggccctcaacaaaatccatcatattccagactatgctttcggaaatctttcatccctggtggtcctgcacctgcataacaatagaatccactcgctggggaaaaagtgcttcgatgggctgcacagcttggaaacactagatctgaactataataacctggacgaatttccaacggcaatccgaacattatcaaatctcaaagagttaggatttcattctaacaacattcgcagtattcctgaaaaggcgtttgtgggaaacccatccttgattaccatccacttctatgataatccaatccagttcgtgggacgaagcgctttccagcacctccctgagcttcgtaccctgactctgaatggggctagtcaaattaccgagttccctgatctcaccggcaccgccaatcttgaaagccttactctgactggcgcacagatctcgtccctgcctcagaccgtctgtaaccaactgcccaacttacaagtcctggacctctcatacaacttgctggaggacctgccttcgttcagcgtttgccagaaactccagaaaattgatcttcgtcacaacgaaatttacgaaatcaaagtggatacatttcaacagctgctctctttgcgctcgctcaacctagcgtggaacaaaattgcgattatacaccctaacgccttttccacccttccatcgcttatcaagctggatctcagctccaacctcctgtccagcttccccatcaccggattgcacggactcactcatttgaaactgacaggcaaccatgccctgcagtcattgatttcaagcgagaattttcccgagctcaaagtgatcgagatgccttatgcttatcaatgttgcgcttttggcgtgtgcgaaaacgcctacaagatcagtaaccaatggaataagggagacaactctagcatggacgatctccataagaaagatgccggaatgttccaagcccaagacgaaagggacctggaggactttctgttagactttgaagaggacctcaaggcacttcatagcgtgcagtgttccccaagtccagggccattcaagccttgtgaacacttattggatggctggcttatccgtataggtgtatggacgatcgctgtcctggccctcacttgtaacgctctcgtgacctcaaccgtttttcgcagccccctatatatttctcctatcaaactgctgattggcgttatcgccgcagttaatatgctgaccggggtgtcttcagcagtgctcgccggagttgatgcctttactttcggatcattcgctagacatggggcttggtgggagaatggggtgggttgtcacgtgattggcttcctctcaattttcgcctcagagtcttctgtgttcctgctgacactggctgctttagagcgtggcttttccgtaaagtacagcgccaagttcgagacgaaggcaccattttcgtctctaaaggttatcattctgctctgtgccctgttagccttaactatggcagcagtgccactactcggtggctcaaagtatggagcctcccccctctgtcttcccctactgccacatgacgatcactgtctccaccaggccctgcttcagtttggacaggggcgaccaggcgaatatcttgggctgttatacggaaagacacattgcccggtcgccctgcatcaacttcatcccaaattgccctgcggttttctggtgttattgctgtttaataagccttatatctaccaatcatag

SEQ ID NO: 228368 - DNA, 2508 bp, synthetic construct
  misc_feature 1..2508: note = Description of Artificial Sequence: Synthetic coding sequence
  source 1..2508: mol_type = other DNA
atggacacctcaagactgggagtgttgttgtctctgcctgtgctgctgcagcttgcaacaggaggctctagccccagatctggcgttttactgaggggctgccccactcactgtcactgtgagcctgatggtcgcatgctgctccgcgtggactgcagcgatttgggtctgagcgagttgccatctaacttgagtgttttcacatcctacctggatctctccatgaacaatattagtcagctgctcccaaatccactcccctcccttcgttttctggaggagctcaggcttgcgggaaatgcgcttacatatattcccaagggagctttcaccggcttatactctctgaaggtgctcatgcttcagaataatcagctgaggcatgtgcctactgaggctttacaaaacctccgcagcttacaatccctgcacctgcacaacaataggatccactctctgggcaaaaagtgtttcgacgggctgcactcactggagacccttgacctaaactacaataacctggatgaatttcctacagccattaggaccctgagtaatttgaaggagctcgggtttcatagtaacaacattagatccatccccgagaaggccttcgtgggaaaccctagtctcataactatccacttttacgataatcccatccagttcgtcggtcgatccgcattccagcacctcccagagctgagaaccctgactctgaacggtgcaagccagattactgagtttcccgatctcacaggtaccgctaacctggagtctttgaccctcaccggtgcccaaatatcttctctgccacaaacagtctgtaaccagctcccaaacctgcaagtccttgatttgtcctataacctgctcgaagacctgccttccttttcggtttgccaaaagctgcagaagatagacctgcgtcacaatgagatttatgaaattaaggtcgacacattccaacaattattgtccttaaggagcctgaaccttgcctggaacaaaatagctattatccacccgaatgctttctctacactgccctcactaattaaacttgacctgtcgtcgaatttgctctctagcttccctataacaggccttcatgggctgacgcacctgaaactgacaggcaaccatgccctacaaagcctcatcagctctgagaattttcctgaactcaaagtgatcgaaatgccatatgcttaccagtgctgtgccttcggcgtgtgcgaaaatgcgtataaaatcagcaaccagtggaacaaaggcgacaactcaagtatggatgacttgcacaaaaaagacgctggcatgttccaggcccaggatgagcgtgacctcgaagacttcttgttggattttgaggaagatttaaaagccctccactcagttcagtgtagccctagcccaggtccgttcaaaccttgcgaacatctgctcgacggatggctgattagaatcggggtgtggactattgcagtactggctttgacatgcaatgccctggtaacctccaccgtattccggtcacctttgtatatctcacctataaagctgctcataggcgtcatcgcggctgttaacatgctgaccggcgtgtcatcagcggttttggccggagttgacgccttcactttcggatccttcgccaggcatggcgcatggtgggagaacggtgtcgggtgtcacgtgatcggttttctgagcattttcgcttctgagtcatcagtatttttgttaacattggccgctctggagcggggattcagcgtcaaatacagcgccaagttcgaaactaaggctccgttcagttcacttaaggtgattatcctgctatgcgcattgcttgcgctcacgatggctgctgtgccccttctggggggatcaaaatacggagccagccctctgtgcctccccctacctttcggtgaaccctcgacaatgggttacatggtggctcttatattactgaattcgttgtgctttctcatgatgacgattgcatacaccaaactgtattgcaatctggacaagggagacctggagaatatttgggattgtagcatggtcaaacatattgctttgcttctctttactaattgtattttgaattgtcctgttgctttcctctccttcagctccctcattaatctcacttttatatcccccgaggtgattaagtttattttattggtcgtcgtgccactgccagcctgtctgaatcctctgctttatattctgttcaatccccactttaaagaggatttggtttcactcaggaaacaaacttatgtttggacaagatctaaacatccatctctgatgtccataaattctgacgacgtggagaagcagtcatgcgactcaactcaggccttagttaccttcacctccagcagtattacctatgacctgccaccatccagcgtcccaagtcctgcttatcctgtcacagaatcctgccacttgagctctgtggcattcgtgccttgtctctag

SEQ ID NO: 228369 - DNA, 2652 bp, synthetic construct
  misc_feature 1..2652: note = Description of Artificial Sequence: Synthetic coding sequence
  source 1..2652: mol_type = other DNA
atggatacatccaggctcggagtgctgctgagcttgcccgttttgctgcagcttgcaacaggcggtagtagcccaagaagtggagtgctgctccggggatgtccgacacactgtcattgcgagcctgatgggaggatgctccttcgagtggattgttctgacctgggattaagcgaactgccaagtaatctgagcgtttttacttcatacctcgatctgtccatgaacaacatctcccagctgctcccaaatcccctgccgtccctgcggttcctcgaagaactgcgcctggcagggaacgctctgacttatattcccaagggggcatttactggtctttacagtttgaaggtgctgatgttacaaaataatcagttgcggcatgttcctacagaggctttgcagaatctgcggtcactgcaaagcctacggttagacgccaatcatatctcttatgtacctccttcttgcttctcaggtctccattctctgagacacttatggcttgatgataatgcactgaccgaaatacccgtgcaggcatttcggtctcttagtgccctccaggctatgacactcgctcttaataagatccatcacatccccgactacgctttcggaaacttgtcctctctcgttgtgcttcacttacacaataaccgcatccattccttgggaaagaaatgcttcgatggcctccactctttagaaacactagatctgaactataataacctggatgaatttccaaccgccatccgcacgctgtccaatctcaaagagttgcatttttacgataaccccatccagttcgtgggcagatccgccttccagcatctacccgaacttcgaacgctcactctaaatggggcttcacagatcaccgaattccccgatttgaccggcactgcaaacctcgagtctcttacccttactggagctcagatctcaagcctgccccaaaccgtctgcaatcagctccccaaccttcaggtactggacctaagctacaatctattagaagacctcccttccttcagcgtgtgtcagaaactgcagaagatagacttacgccataatgaaatctatgaaataaaagttgacactttccagcaattgctatcactgcgatccctcaatctggcctggaacaagattgcgataatccaccccaacgcgttctctacactgccttcactgattaagcttgacctttctagcaatttgttatcctcattcccgatcaccggcctgcacggcttaacccacctgaagttaaccggaaaccacgctttgcagagcctgatatctagcgagaattttccggaattgaaggtgattgaaatgccctatgcataccaatgctgcgcttttggcgtgtgtgagaacgcctacaagattagtaatcagtggaataaaggagacaattcatcgatggacgaccttcacaagaaagacgctggcatgttccaggctcaggacgaaagagatctcgaggatttcctgctcgacttcgaagaggatctaaaggccctacacagcgtccagtgctcacccagcccaggcccattcaagccatgtgagcatctcctcgacggctggttgattcgcatcggcgtttggactatcgcagtactcgcccttacatgcaacgcgctggtgacctcaaccgtatttcggagccccctttatatcagcccaatcaagctcctaataggcgtgatcgctgcagtgaatatgttgacaggcgtctccagcgccgtgttagccggtgtggacgccttcaccttcggatcctttgcaaggcatggagcctggtgggagaacggtgtaggctgccatgtcatcggtttcctgagtatcttcgcctcagaatcaagtgtatttttgcttaccctagccgcactggaacgagggtttagcgtgaaatactcagccaaattcgagaccaaagccccattttcatctctgaaggtgatcatcttgctttgcgcattactggccttgacgatggctgccgtgcctctgctcggcggatctaagtacggtgccagtcctctgtgcctgcctctaccttttggtgaaccttctacaatgggttacatggtggccctgatcctgctaaacagcctgtgcttcctaatgatgaccatcgcctatacgaagctctattgtaacctcgataaaggcgacctcgagaacatttgggattgttccatggtgaagcatatcgccttgcttttgtttactaactgcatcctgaactgtccagtcgccttcctctctttcagcagcctgattaacctgaccttcattagccctgaggttattaaatttatcctcctggtggtggtacctctcccggcatgcctgaatccgttactgtatatcctgtttaaccctcatttcaaggaggacctggtgagcctgcggaagcagacctatgtatggacccggagcaaacaccccagcctaatgtccatcaacagtgacgatgtggagaagcagtcatgtgattctacacaggctctcgtcaccttcacatcttcttcgattacctacgatcttccaccttcctcagtaccgagcccggcatacccagtgaccgaaagctgccacttatcctctgttgcattcgtgccctgcctctag

SEQ ID NO: 228370 - DNA, 2748 bp, synthetic construct
  misc_feature 1..2748: note = Description of Artificial Sequence: Synthetic coding sequence
  source 1..2748: mol_type = other DNA
atgggacggccaaggctcactctggtgtgccaggtttccattattattagtgccagggatttatctatgaacaacctgaccgaactccagccagggttgttccatcacctacgctttttggaggaactcaggttgagtggcaatcatctctcccacatcccaggccaggcctttagtggtctgtactcattaaagatcttaatgctccaaaacaaccagcttgggggtatccctgctgaagcactatgggaacttccctccctgcagtctctgcgtctcgacgcgaacctgattagtcttgttccggaacgcagctttgagggcttaagcagccttcggcatctttggctcgatgacaatgccctgaccgaaatccctgttagagcattgaacaatctcccggcactacaggccatgacgctggcactgaacaggataagccacatcccagactacgcattccagaatctaaccagcctggtcgtcctgcacctgcacaataatagaatccagcatctggggactcattcttttgagggcctccacaaccttgagacactggacttaaactataacaagctgcaggaatttcccgtagccattcgtacacttggcagattacaggagctcggctttcataacaacaacattaaagccattcccgagaaggcgttcatgggtaatcctctactacagacgatccacttttatgacaatccaattcagtttgttggacgatccgccttccagtatttgccgaagctgcatactctttcgttgaacggcgctatggatatccaggaatttcccgacctgaaggggactacgtctttggaaatcttgactctgacacgcgcaggcatccgcctgttgccctcgggtatgtgccagcagctgccccgtctgcgcgtgctggaactgtcgcacaaccagattgaagagcttccatccttacacagatgccagaagctagaagaaatcgggctacagcacaacagaatttgggagatcggggctgacactttctctcaactgtccagtctgcaagccctggatctgagctggaacgctatcaggagcatccatcccgaagctttcagcactctgcacagtctggtcaagctggacctcaccgataaccaacttaccacgctgccccttgcgggactgggcggtttgatgcatctgaaattaaagggtaacctagccctgtcccaggcgttcagtaaagactctttcccaaagctgaggatcctagaagtgccttacgcctaccaatgttgtccttacggaatgtgtgcctccttctttaaggccagtggtcagtgggaggcagaagacctgcatctagacgacgaggaaagctccaaacggcctctgggcctccttgcccgtcaagccgaaaatcactatgatcaggacttagacgaactgcaactggaaatggaggacagtaaaccccacccgtcagtgcagtgttccccaacgccaggccctttcaagccctgcgaatacctgttcgaaagctggggaatccggctggcagtatgggcaatcgttctcctgtccgtgctgtgtaacgggctcgtactactcaccgtcttcgcaggcggtcccgttccactgcctccagttaaattcgtcgtcggtgcaatcgcaggggcaaacacactgacagggatctcctgtggcctccttgcgtctgtagacgccctaacattcggtcagttctccgagtacggtgccagatgggaaacaggcttggggtgtcgcgcaacaggtttcctagcagtattggggtctgaggcaagcgtgttgctgcttacactcgccgctgtgcaatgctccgtatccgtgtcgtgtgtacgagcatatggtaaatcacctagcctcggctccgtcagagccggtgtgcttgggtgtctagctctggcaggcctagctgccgcactaccactggcgagcgtaggcgagtatggagctagccccctgtgcctgccgtacgcgccaccagagggacagccagctgcccttggctttactgtcgcactggtgatgatgaattcattctgtttccttgtggtcgccggagcgtacatcaagctttattgtgacctccccaggggagacttcgaggctgtttgggattgcgcaatggttaggcacgttgcttggttgatatttgcagacggacttttgtattgtccggtcgcatttctttcattcgctagcatgctgggcctattcccagtgaccccagaggctgtgaagtctgtcttgctggtggtgctacccctgccggcttgtctcaacccattattgtacttgctgtttaacccgcattttcgagacgatctgaggcgcctacgccctcgggcaggggattccgggccacttgcatatgccgctgcaggagaacttgaaaaatcttcatgcgactcaactcaagctcttgtggccttctcagatgtagacctgatcctcgaggcatctgaagcgggtaggcccccaggcctagagacctacggcttcccatccgtgacgttgattagttgccagcagccaggtgctccgagattagagggctcccattgcgtggaacccgagggcaaccatttcggcaatcctcaacctagcatggacggtgagcttctgctgcgggctgaaggcagcacgcctgcaggcggaggtctgagtggcggaggcggattccagccatccggactcgccttcgctagccatgtgtag

SEQ ID NO: 228371 - DNA, 699 bp, synthetic construct
  misc_feature 1..699: note = Description of Artificial Sequence: Synthetic coding sequence
  source 1..699: mol_type = other DNA
atgaataatctgacagagctacagccagggctgttccaccacctcaggttcctcgaagaacttcggctgagtgggaatcatctaagtcacatacctggtcaggctttttccgggttgtacagtctgaagattctgatgttgcagaacaaccaattaggcggaattcccgctgaggcactgtgggagctaccctcattgcaatctctgaggttggacgccaaccttatctctttggttcccgaacgcagttttgagggactgtcaagcctgaggcatctttggctggacgacaatgctctgactgaaatccctgtgcgggctctgaacaacctccccgcactgcaggcaatgaccctcgccctaaatcgaattagccacatccctgactatgccttccagaacctcaccagtctggtggtgctcgacctgaattataacaaactgcaagagttcccagtggccatccgcaccctcggcagactgcaggagctctccctgaacggtgctatggacattcaggaatttccagatcttaagggcaccacttcactcgagatcctcaccctgactcgggctggaatccgtctcctccccagcggtatgtgccagcagctgcctagactccgcgtcttggaactgtcccataatcagattgaagagctgccatcactgcaccggtgccagaagctggaggagtag

SEQ ID NO: 228372 - DNA, 2904 bp, synthetic construct
  misc_feature 1..2904: note = Description of Artificial Sequence: Synthetic coding sequence
  source 1..2904: mol_type = other DNA
atgccttcccctccagggctgagagcgttatggctctgcgccgcactttgcgcttcgcgcagagccggaggtgcaccgcagccaggacccggaccgaccgcctgtcccgctccatgccactgtcaggaagatggcattatgctgagtgctgattgcagtgaactgggcttaagcgcagttccaggagatctcgacccactgactgcatacctcgatctctcaatgaataaccttactgagcttcaacccggactcttccaccacctgcggttcctggaagaactcaggctgtctggtaaccatctgtcccatatacctgggcaggctttctcaggtctctactccctaaagatactgatgcttcagaacaaccaacttggaggcatcccagcagaagctctgtgggaactgccttcactgcagtccctccggctggatgctaatctgatcagcctggtaccggagaggtcctttgaaggcctctcttccttgagacatctgtggttagatgacaatgctcttaccgagattcccgtccgcgctcttaataacctgccagctctgcaggccatgacactggcgctgaaccgcatttcccatattccagattatgccttccaaaatctgaccagcctggtggtcttgcacctgcacaacaatcggattcagcatctcggaacacactctttcgagggcctgcacaacctggagacactcgatttgaattacaataagctgcaggagttccccgtggcaatccggactctgggcaggcttcaggagttgggcttccacaacaacaatatcaaagccatccccgaaaaggcatttatgggtaatcctctgctacagacaatacacttctacgataacccaatccagtttgtggggcgttcagcatttcaatatctcccaaaacttcacaccctctccttgaatggcgcaatggacattcaggagttccccgacctgaaggggacgacatctctcgagatcctgaccctgactcgggctggcattagactgctgccgagtggcatgtgtcaacagttgccacgcctcagggtgctggaattaagtcacaaccagatagaagagctgccaagcctgcatcgctgtcaaaaattggaagaaatcgggttgcagcacaatcgcatctgggaaattggggcagatactttttcgcagctgagctcactgcaagccctcgacctctcatggaatgcgatccgttcaatccatcctgaggccttctctaccctgcactcattggtcaagctcgatcttaccgataatcaactaactacattgccactggcaggtcttgggggactgatgcatctaaagctgaagggcaacctggccctgagccaagcattttccaaagatagttttcctaaacttaggatcctagaggtgccttacgcctatcaatgctgtccttacggtatgtgcgccagctttttcaaggcttccggtcagtgggaagccgaggacctccacttggatgacgaggaaagtagcaaaaggcctctgggcctactggccaggcaggctgaaaatcattatgatcaggatttggacgaactgcagcttgagatggaggactccaagccccacccctccgtgcagtgctctccaaccccagggccttttaaaccatgtgagtacctgttcgagagctgggggattagattggcagtatgggccatcgtcctgctgagtgtgctttgcaatggcctcgtattattaacggtgttcgcaggcggacctgtacccctacccccagttaagttcgtagttggggctattgcaggcgctaatactctcaccggcatttcatgcggcctcctggcgtccgtggatgcacttacatttgggcagttctccgagtatggagcaagatgggaaaccgggctcggctgtcgcgctacgggcttcttggcagtgctggggagcgaggcaagcgtgctgcttttaaccttggccgctgtccagtgttccgtgtccgtgtcctgcgttagagcttacggaaaaagcccgagtttggggtccgttagggcaggcgtgttaggttgtctggcactggcaggcctagctgctgcattgccactggcctccgtaggtgaatacggggcttcccccctgtgccttccctatgcacctccagaggggcagcccgcagctctgggcttcaccgtcgccctggtgatgatgaacagtttttgctttctggtcgttgcaggagcctacattaagctctactgtgatctccctaggggagattttgaggcagtgtgggactgcgcgatggtgaggcacgtcgcctggctgatcttcgcagacggtctgctctattgtcctgtggccttcctcagttttgccagtatgctggggctcttccctgtgacgcccgaggcagtcaagtccgtgctgctggttgtgctgcctctgcccgcatgcctgaatcccctcctgtacctgctatttaacccgcactttcgggacgatctccgacgcctccgtccgagggccggagactccggaccgcttgcctatgccgctgctggtgagctggaaaagagctcttgtgactccacccaggcactggtggcgttctcagacgtggacctaatcctggaggcttccgaggctggacgaccgccaggattagagacatacggattccctagcgtcacgctaatcagttgtcagcaacctggcgctccaaggctcgagggttcccattgcgtggagcctgaaggcaatcactttggcaacccccagccttctatggacggggaactcctcttaagggctgagggcagcactccggcaggcggaggtctcagtgggggtgggggattccagccctccggattagcctttgcgtctcatgtgtag

SEQ ID NO: 228373 - DNA, 228 bp, synthetic construct
  misc_feature 1..228: note = Description of Artificial Sequence: Synthetic coding sequence
  source 1..228: mol_type = other DNA
atgttgtctgctgactgcagcgaacttggccttagcgcggtccctggtgacctcgatcctttgacggcctatcttgcagtgcccggaatggtggccgaaggtaaagcggatagaaccgggggaggagggtcaagccgacccgaaaaaacccggcgtagcctcgaagaagccatcgaccgaaccattggcggtgcgcaggagctgtgggcccctgaagtctcgagctag

SEQ ID NO: 228374 - DNA, 2487 bp, synthetic construct
  misc_feature 1..2487: note = Description of Artificial Sequence: Synthetic coding sequence
  source 1..2487: mol_type = other DNA
atgaggctggaaggggagggaagaagcgcccgagccggtcagaacttgtcaagggctggctcagccagaaggggggcaccacgggacctgtcaatgaacaacctgacagagctccagccgggactgtttcaccatttacgctttcttgaagaacttagacttagcggtaaccatctcagccatattccaggtcaagcatttagtggcctgtactctctgaagatcctgatgcttcagaataatcaactgggaggaatccccgctgaggctctgtgggaactgcctagtctgcagagtctggacctgaattacaacaaactgcaagaattccccgtggcaatccgaaccctcggccgtctacaggaactgggctttcacaataacaatattaaagccatccccgaaaaagcctttatgggtaaccctctgctgcagacaattcatttctacgataatccaattcaattcgttgggagatccgcctttcagtatcttccaaaacttcatactttatcattaaatggcgctatggatatccaagagttccccgacctgaagggcacaacctccctggaaattctgacccttaccagggccggaatccgccttctgcccagcggcatgtgccagcaactgcccaggttgcgagtgctcgaactgtctcataatcagattgaggagcttccatcactccacaggtgccagaagctggaagagattgggctacagcacaacagaatctgggaaattggcgctgacaccttctcccagctgtctagcctgcaggccctggacttatcctggaatgctattaggtcgattcaccccgaagcttttagcacattgcattcgctcgtaaaactagacttaaccgacaatcagctgacgactttacctttggctggcctcggcggtctgatgcacctgaagttgaaagggaatctggccctgagtcaggcattctccaaggacagttttccaaagctcagaattttagaggtgccctatgcctatcagtgctgcccatacggaatgtgcgccagttttttcaaggcctccgggcagtgggaagccgaggacctgcacttagacgatgaggagtcatccaagaggccgctgggcctcttggctaggcaagctgaaaaccattacgaccaggatttggatgagctccaacttgagatggaagactctaagcctcacccatccgtgcaatgcagtccgacccccggtcccttcaaaccttgtgaatatcttttcgagtcctggggcatccggcttgccgtgtgggcaatcgtactcctcagcgttttgtgcaatggactggttttgctgacagtgtttgctggcggaccagtgcctctgcctccagtcaaatttgttgtcggcgcaatcgccggtgccaatactctaactggtattagctgtgggctcttggctagtgttgacgccctcacatttgggcagtttagtgagtacggggcacgttgggagactggccttgggtgcagagccaccggtttcttggccgtcttgggtagcgaagcctccgtactgttgcttaccttagctgcagtccagtgcagcgtctccgtttcatgcgtcagagcgtacggtaagtcgccgagcctgggatctgttcgggctggtgtactgggatgtctggcattggctggcctggcagccgctctgcccctggcatctgtcggggagtacggggcatcaccgctatgcctcccatacgcacccccagaggggcagccagcagctttgggattcacagtggccctggttatgatgaatagcttctgcttcttggttgtagcaggcgcttacattaagctttattgtgacctaccacgaggggatttcgaggctgtctgggattgtgcaatggtgcgacatgtggcatggcttatcttcgccgatggcctactctactgtccggtcgcgtttttaagcttcgccagcatgttggggctgttccctgtgactcccgaggccgtgaaatccgtgcttcttgtcgtgcttcccttgcccgcttgtctaaaccctctgctttatctcctgttcaatccccacttcagagacgatttgcgcagactcagaccacgagccggtgactccggccctctcgcgtatgccgcagctggggaacttgaaaagtcttcctgcgactctactcaggcattggtggctttttccgacgtggacctgattctggaggcatcggaggccggacggcctcccggactggagacctatgggtttccttccgtgacgttaattagttgccaacaacccggagccccacgtttagaaggatctcactgcgtcgagcctgaggggaatcactttggtaaccctcagcccagtatggacggcgagctgctgttgagggccgaaggatctaccccagctggcggtggcctgtccggtggtgggggtttccagccctcaggtctggccttcgcaagccatgtgtag

SEQ ID NO: 228375 - DNA, 6039 bp, synthetic construct
  misc_feature 1..6039: note = Description of Artificial Sequence: Synthetic coding sequence
  source 1..6039: mol_type = other DNA
atggaaacacttaacggagccggagatacagggggaaagccatctactaggggaggtgaccccgcagccaggtcccggaggaccgaaggcatacgtgccgcatacagacggggagaccggggaggcgctcgcgatctgctcgaggaggcctgcgatcagtgtgcctcacagctggagaagggccaactattgtctatacccgctgcgtacggagatttagagatggttagataccttctaagcaagcgcctggtggagttgccaacggagccaaccgacgataacccagccgtcgtcgccgcttattttgggcacaccgcagtggtgcaggaactgctagagcccttgacaccgaaacagactgaatgggagcaaactgccccatttagtggaaccttccccctgtcctgccatcttttgcccggtccatgctctcctcagcggttactgaattggatgttggcactggcctgccagcgaggacacctgggtgttgtgaagctgctcgtcctcacccatggcgcagaccccgaaagttatgccgtgaggaagaacgaatttccagtaattgttagactgcctctatatgccgctatcaaatctgggaatgaggatatcgcaatatttctgcttaggcacggggcatacttctgctcttatattctgctcgattctccggatccttccaagcacctgctgagaaaatacttcattgaagcgtctccgctgccaagcagttatcccggaaagaccgctcttcgtgttaaatggtctcatctacggctaccatgggtggacctggactggctcattgacatttcgtgccaaatcacagagctcgacttgtccgcgaactgcctcgcgactctgccaagcgtaatcccatggggcttaatcaatctgcgcaagttaaatttgtccgataaccacctgggcgagttgccaggagtccagtccagtgatgaaatcatatgtagtaggctgctggagattgacatatcatccaacaaactgtcccacttgcctccgggatttctgcacctctccaagttacaaaaactaactgcgagcaagaactgtttagagaagctcttcgaggaggagaatgccactaactggattggactgcggaagttgcaggaattagatattagtgacaacaagctgaccgagcttcccgctttattcctccacagttttaaatcactcaacagcttgaacgtgtcccgcaacaatctcaaggtgttcccagacccctgggcgtgtcccctgaagtgttgcaaagcaagtagaaatgccttagagtgtctccccgacaagatggccgttttttggaagaatcatttaaaagatgtggacttttcagagaacgccctgaaggaagtgcctctcgggttgtttcagttagacgccctgatgttcctgcgtctccagggtaatcagttagccgctctgccaccccaggaaaaatggacatgcaggcagctgaagaccttggatctgtcgaggaaccagctggggaaaaacgaagacggtctgaaaacaaagcggatcgcattttttacgacacgaggaagacagagaagcggtacagaagcagctagcgtcctggaattccctgccttcctgagcgaatctctcgaagtcctgtgcctgaatgataatcacctcgacacagtacctcctagtgtgtgtctcctaaagagtctttccgagttgtacctgggcaataacccaggattacgggagcttcctcctgagctcggacagctcggtaacctgtggcagctggacacagaggacctgactataagtaatgtgccagctgagatccaaaaagagggccctaaggcaatgctgtcttacctcagggcacaactgcgcaaggctgagaagtgcaaattaatgaaaatgatcattgtggggcctcctaggcagggtaagagcaccctactggagattcttcagacaggacgggcaccacaggtggttcacggagaggcaactattcggaccacaaagtgggaactgcagcgtcctgctggtagcagagcaaaagtcgagagcgttgagtttaacgtttgggatattgggggaccagctagcatggcaacagtgaaccagtgcttttttacagacaaagctctctacgtcgtggtctggaatctcgcccttggagaggaggccgttgctaatttgcaattctggctgctaaacatcgaagcgaaagcccctaatgcggtggtattagtcgtgggcacccacctggacctgatcgaggccaagtttcgagtggagcggattgccactctccgtgcatacgtcctggctctgtgtcgctcaccttctggcagtcgcgctacaggattccccgacataaccttcaagcacttacacgaaatatcatgcaagagtctggaagggcaagagggactcaggcagttgatctttcacgttacctgttccatgaaggatgttggtagcacaataggctgccagaggctggccggacggctgattcctcgcagttacctcagcctgcaggaagctgttctggccgagcagcagagacgatcaagagacgacgatgtgcaatatctcactgatcgacagctggagcagttagttgaacagacgcccgataatgacatcaaagactacgaggatctgcagagtgccataagcttccttatagagaccggaacactgctgcactttcccgatacttctcacggtctccgaaacctgtacttcttggatcctatatggctgagcgagtgtctacagagaatctttaacatcaagggatccagatccgtggcaaaaaacggagtaattcgggcagaagacttgcgaatgcttctcgtaggtaccgggtttacccagcaaacagaagagcagtactttcagtttttggctaaattcgaaattgcactgccagtggccaacgactcctacttattgcctcacctcctgcctagcaagcccggactggacactcacggaatgcgccaccccaccgctaacactattcagagagttttcaagatgtcattcgtccctgtcggattctggcaaaggtttatcgccaggatgcttatctctctagccgagatggacttgcagcttttcgagaataagaagaatactaaatcccgtaacagaaaggtgacaatttactcattcactggtaatcagcgaaaccggtgtagcacatttcgtgttaaaagaaatcaaaccatatattggcaggaaggactgctagttacctttgatggtgggtacctgtctgtagagagctcagatgtaaactggaaaaagaagaagtccggcggtatgaagatcgtctgtcagtctgaagtgcgcgattttagcgcgatggcttttatcacggaccacgtgaacagtctgatcgaccagtggtttcctgcactcactgccacggaaagcgacggaactcctctgatggaacagtacgtgccatgccccgtatgtgagacagcatgggcacagcacacagatcctagtgagaagtcagaggacgtgcagtacttcgacatggaagattgtgtcctgacagctatcgagagggacttcatcagttgtccccgtcacccagacctgcccgttcctcttcaggagctcgtgcctgaactttttatgactgatttccctgcaaggcttttccttgaaaatagcaagcttgagcactcggaggacgaagggtccgtgcttggtcaaggaggctcaggcacggtaatttatcgggctcgttatcagggtcaacccgtggcagtgaaaaggtttcacatcaagaaattcaagaatttcgctaacgtccccgcagatacaatgctgaggcaccttcgggcaaccgacgccatgaaaaacttttcggaatttcgccaggaagcttcaatgctgcacgctctgcaacacccttgcatcgtagccctcatcggcatttctatccaccccctgtgtttcgccctcgagctggccccactcagcagcctcaacacagtgttgtctgagaatgcgagagacagttctttcattccactgggccatatgctgacacagaagattgcctaccaaatagcctccggcttagcatatttgcataagaagaatataattttctgcgacttgaagtctgacaatattctcgtgtggtccctcgatgtgaaagagcacattaacatcaaactaagcgactatggaatctccaggcagagctttcatgaaggcgctctaggggtcgaaggcacacctggctaccaggccccagaaatcaggcccaggattgtgtatgatgaaaaagtcgacatgttttcgtacggtatggtgctgtacgaattgttgtcaggccagcggcctgcgttgggacaccaccaactgcagatcgccaagaaattaagtaaaggtatccgaccagtgttgggacaacctgaggaagtgcagtttaggcggctgcaggctctaatgatggagtgctgggacacgaaacccgaaaagcgcccattagccctgagcgttgtttctcagatgaaggaccccaccttcgcaactttcatgtatgagctgtgctgtggcaaacaaaccgcctttttctcctcccaggggcaggagtacacagttgttttttgggacgggaaggaggagtctcggaattataccgtcgtgaatacagagaagggactcatggaggtacaacggatgtgctgtcccggtatgaaagtgagttgtcagttacaggtgcaaagatctctctggacggccaccgaggaccaaaagatttatatctacacgctgaaggggatgtgccccttgaacaccccacagcaggcgctggacactccagccgtcgtgacgtgctttctcgccgtgcctgtgattaaaaagaactcatatttggttctggctggcctggctgacgggcttgttgccgtctttcccgtagttcgagggaccccgaaggacagctgctcttatctgtgtagccataccgcgaaccgcagtaaattttcgattgcagacgaggacgctcgtcagaacccctaccctgtcaaggcaatggaggtcgtgaactcgggctctgaagtctggtacagtaatggacctggcctcctggtcattgactgtgcaagcctcgaaatctgtcgaagactggagccttatatggcaccaagcatggtcacatcagttgtttgttcttcagaaggacggggagaggaagttgtgtggtgccttgatgataaagcaaattcgttggtcatgtaccactccaccacctaccagctttgtgcccgttatttctgcggagtacccagtccactacgcgatatgttccctgtccggcctttggacacagaacccccagcagccagccataccgccaatccgaaggtccccgaaggcgatagtattgccgacgtgtcgattatgtattccgaggaattaggaactcaaattctaattcaccaggaaagcctgacagactactgcagcatgagttcctactcctcttccccgccacgacaggccgctaggtcacctagcagtctgccctcatcaccagcctcttcttcctccgtcccttttagtactgactgcgaagattctgacatgttacatactcccggtgccgcatccgaccggagcgagcatgatttgactcccatggacggtgagaccttttctcagcacctgcaggccgtgaaaatcttagccgtgcgggatctcatctgggtgccaagaagagggggagacgtgatcgtaattggcctggagaaggatagcggcgctcagcgcggaagggtgatagctgtactaaaggctcgggagctgacaccccacggtgtactagtggatgcggctgttgtggccaaagatactgtcgtctgtacctttgagaacgagaacaccgagtggtgtttggctgtctggagaggatggggggctagggagttcgacattttttatcagtcatacgaggagttaggcagactggaggcctgtacacgcaagaggcggtac

SEQ ID NO: 228376 - DNA, 6047 bp, synthetic construct
  misc_feature 1..6047: note = Description of Artificial Sequence: Synthetic coding sequence
  source 1..6047: mol_type = other DNA
atggccggaatgagtcaacgaccgcctagcatgtactggtgcgtggggcctgaggagtccgcagtttgtcccgagcgtgccatggagaccctcaatggtgctggggatacagggggaaaaccctccacacggggaggtgaccctgcggcacggagcagacgaacagagggtatcagggcggcatatcgacgtggggataggggtggggctcgcgacctgctggaggaagcctgcgatcagtgcgcaagccagctggagaaagggcagctgctgagtatcccggctgcctatggggacctcgaaatggtacggtatctgctcagtaagcggctcgtagagcttcctacagagcccaccgacgataaccccgcagtggtggcagcctatttcggccacacagctgtggtccaggaactgctggagagcctacctgggccttgctcaccgcagcggctcttgaactggatgcttgcgcttgcatgccagcgtggccatctcggggtagtgaagctgctcgttctgacgcacggcgctgatcctgagtcttacgcggtgcgaaagaacgagtttccagtgatcgttcggttaccactgtatgctgctataaagagtggcaatgaggatatcgctatctttctgcttcgtcacggggcttacttctgctcatacatattgctcgattcgccagacccgtctaagcatctgctgcggaaatactttattgaagccagcccactgccctcatcctaccctggtaaaacagccttacgtgtgaagtggtcgcaccttaggctaccatgggtggatttggattggttaatcgacatctcatgccagataactgaactggacctaagtgccaattgcctggctacccttcctagtgtgatcccttggggactgatcaacttgcgcaaattgaatctgagcgacaaccacctgggcgaactacctggtgttcagagcagcgatgaaattatttgctccagactccttgaaatcgatatatcgagcaataaactgagccaccttccgccaggattcttgcatctgtctaaattgcaaaagctcacagcaagtaaaaattgcctggaaaagctttttgaggaggaaaatgccaccaattggattggcctgcgcaaacttcaagaactggacattagcgataataaattgaccgaattacctgccttgtttcttcacagtttcaaaagtttgaactctctgaacgtgtcacgcaataacctcaaggtatttcccgacccgtgggcttgtccattgaagtgttgtaaggcctcgcggaacgccctggaatgtctccctgacaagatggccgtgttctggaaaaaccatctgaaggatgtcgatttttccgagaatgccctcaaggaagtgcctctcggtctgttccagctggacgcactgatgttcctaagactgcagggcaatcagctagcagcgctgcctccacaggaaaagtggacctgtaggcagctcaagactctagatttgtctcggaaccagttgggcaagaacgaagatgggctcaaaaccaaacgaatcgccttttttaccacccgcggacggcaacgtagcggcaccgaggcagccagcgttctggagtttcctgctttcctaagcgaatcactcgaagttctctgcctgaacgataaccacctcgacacggttcccccttccgtgtgtctgctgaagtctctgagcgagctctatcttggaaacaatccgggactaagagagctcccacctgagcttggtcagttgggtaatttgtggcagctggatacagaggacctgacaatcagcaatgtgcctgcagaaatccagaaggagggtcctaaagctatgctgtcttatttgcgggctcaactccgtaaggccgagaaatgtaaacttatgaaaatgattatcgtggggccaccacgccagggaaaatccaccctcttagaaattcttcaaacaggccgtgcccctcaagttgtccatggagaggccaccatccgtactacaaagtgggagttgcagcggcctgcaggctctcgcgcaaaagtcgagagcgtagagttcaacgtatgggacattgggggacccgcttccatggccaccgttaatcagtgcttcttcaccgacaaggcgttgtatgtagtggtgtggaacctggccctcggtgaagaagccgtggctaaccttcagttttggctgttgaacatcgaagctaaggcacccaatgcagtggttctggtagtcgggactcacctggaccttatagaggccaagtttcgtgtggagaggattgccactctgagagcgtatgtccttgctctttgtcgatcgccatcaggcagccgggctaccggtttccccgacatcactttcaaacaccttcacgagattagctgtaaatccttagagggccaagagggattgcggcagctcatatttcacgtgacttgttcaatgaaggacgtgggttcaaccattggttgtcagcgcctcgccggacgtctaattccaagatcctacctttctctccaagaagccgttcttgccgagcagcaaaggcgttccagagatgacgacgtccagtacctcacagatagacagctcgaacaactggtcgagcaaactcccgataacgatattaaagactacgaggacctgcagagcgcaatcagctttctgatcgagactggcacacttctgcacttccccgacactagtcacgggcttagaaacctctactttcttgatcctatctggctgagcgagtgtttgcagcgcatttttaacataaagggctcccgcagtgtggctaagaacggcgtgatccgtgctgaagatctgcgcatgttgctggtcggaacagggtttacccagcaaactgaggaacagtacttccagtttttggctaaattcgaaatcgccttacccgtggcaaatgatagctacctgttaccccatctcttaccctccaagcctggtctcgacacgcatgggatgcgccaccccacggcaaacacgattcagcgcgtttttaaaatgtcattcgtacccgtggggttctggcagcgcttcatcgcgagaatgctgataagtctcgccgagatggatctccagctatttgagaataagaagaatacgaagagtaggaatcgcaaggtcactatctatagtttcacagggaaccagcgcaatcggtgttcaacttttagggtcaagaggaatcagacaatctactggcaggaaggcctgcttgtgacattcgatggcggttatctgagtgttgagagtagtgatgtgaattggaaaaaaaagaagtctggtgggatgaagatcgtctgccagtccgaggtcagagactttagcgctatggcctttatcactgatcacgtcaacagcctcatcgaccagtggttcccggctttgacagccactgagagcgacggaacacccctaatggagcaatacgtgccgtgcccagtctgcgagactgcttgggcccagcacactgaccccagtgagaagagtgaagacgtgcagtattttgatatggaagattgcgtcttgaccgcaattgaacgcgatttcatttcttgccctagacacccagatcttccagtgccattgcaggaactcgtgcctgagttgtttatgactgatttccccgctcggctctttctcgagaatagcaaacttgagcactccgaagacgaaggatcagtcctggggcaaggtggatcaggaacagtgatatatcgcgctcggtatcaggggcaacctgtggccgtcaaaagatttcatatcaaaaagtttaagaattttgccaacgtgccagctgacacaatgttgagacacctgagggctaccgatgccatgaaaaacttttccgagttcaggcaagaggcctcaatgctgcacgccttacagcacccctgcatagtggccttgatcggcatctccattcacccactgtgctttgccctagaacttgcaccgctctctagtctgaacaccgtgctgtccgagaacgctcgggacagcagctttatccccctcgggcatatgcttacgcaaaaaattgcatatcagatcgcgtctggacttgcatatctgcataaaaaaaatatcatcttctgcgacttgaagtcagataatatcctggtgtggagtcttgatgtcaaagagcatatcaacattaaactctccgactacggtatcagccgccagtcattccacgaaggtgctctgggagtggaaggtaccccgggataccaggcccctgagattcgcccacgcattgtatatgacgaaaaggtcgacatgttttcctatggcatggtgttgtacgaacttctttcaggacaacggcctgctctgggtcatcaccagttacagatcgctaagaaattgagtaagggcattaggcccgtgctagggcagccagaggaagtgcaatttcgcagactacaggcactcatgatggaatgttgggacacgaagccagaaaagcgcccactagccctgtctgtggtgtcccagatgaaggatcctacatttgcaacatttatgtacgaactgtgctgtggcaagcagaccgccttcttctcatcccagggccaggaatacaccgtcgtgttctgggatggtaaggaagagagtcgtaattacactgtagtcaacactgagaaaggcctcatggaagttcaaaggatgtgctgccccggaatgaaagtgagctgtcaattgcaggtgcagagatctctgtggaccgccaccgaagaccagaagatttatatctacacgctcaaaggcatgtgtcctctgaacaccccacagcaagcacttgatacaccagcagttgtgacatgtttcctggccgttcctgtgataaagaaaaattcatacctggtcctggccggtctggctgatggcctggtggcggtctttcctgtagtacgcggtacacccaaggactcatgttcctatttgtgctcccacacagcaaacagatctaaattctccatcgctgatgaggatgctaggcaaaatccttaccctgttaaggcaatggaggtggtgaacagtggcagtgaggtgtggtattccaacggacccggactcctagtgatcgattgtgcttctcttgaaatttgtcgcaggctggagccatacatggctccctccatggtcacaagtgtcgtttgcagtagcgaaggaagaggggaggaagtggtgtggtgtctcgatgataaagctaacagccttgtgatgtatcatagtactacctaccaactgtgtgcccgttatttctgcggggtacccagccctctgcgggatatgtttcctgtgcggccacttgatacagagcccccagcagcctcccacacagccaaccccaaagtgcccgaaggagacagcattgcagatgtctctattatgtactctgaggaactgggaactcaaatactgatccaccaggaatcactgacagactattgttcaatgagctcgtattcaagctcccctcccaggcaggctgctcgatctccaagttcattaccttcatcacctgcttcatcttcatccgtcccatttagcacagactgcgaggactcagacatgcttcacacccctggggcagcctctgaccggtcagaacacgacctcacccccatggacggtgagacctttagccaacatctgcaggctgtcaagattttagcagtaagagatctgatatgggttcctcgacgaggcggagatgtcattgtaattggattggagaaagacagtggggctcagagagggcgtgtcattgctgtgcttaaggcccgagagctgactccgcatggcgttcttgtcgatgcagcagtcgttgccaaggacacagtggtgtgtacctttgagaacgaaaacactgagtggtgtctggccgtgtggcggggatggggtgcccgagaattcgacatattctatcaatcctatgaagagctggggagactagaagcttgcactcgaaagaggcggta

SEQ ID NO: 228377 - DNA, 2025 bp, synthetic construct
  misc_feature 1..2025: note = Description of Artificial Sequence: Synthetic coding sequence
  source 1..2025: mol_type = other DNA
atgcttcacgctctccagcacccatgtattgtcgcactaataggaataagtattcaccccctgtgctttgcactggagttagcaccactctcaagtcttaataccgtgttgtccgagaacgctcgcgattcatcattcatccctctcggccacatgctgacacagaagatcgcataccagatagccagcggcctcgcttatcttcacaaaaagaacatcattttctgcgatctgaaaagcgacaacattctggtgtggtcactggatgtgaaggaacacattaacattaaactgtcagattacgggatttcacgacagagcttccacgagggtgctctgggggtggagggcaccccgggataccaggccccagagatcagacctagaatcgtctatgacgagaaagtggatatgtttagctacgggatggtcctatatgaactgctgagcggacagcgaccagcactgggccaccaccagctccagatagccaagaaattgtcaaagggaatccgcccagttcttgggcagcctgaggaggtgcagtttagacgacttcaagcccttatgatggaatgctgggacactaagccagagaagaggcccctggcactgagcgtagtgtcccagatgaaggatcctactttcgccacttttatgtatgagctgtgctgcggaaaacagactgcatttttctcttcccagggccaggagtataccgtggtgttttgggacggcaaagaagagtcgcgcaactatacggtggtaaataccgaaaagggcctgatggaggtccaaaggatgtgttgccccggaatgaaagtgagctgtcagctccaagtgcagaggtccctttggactgctacagaggaccagaaaatctacatctacacactgaaagggatgtgcccgctcaacactccccagcaagctctcgatacacccgcagtcgtgacttgcttcttggccgtgcctgtgattaaaaaaaacagctatcttgtgcttgcaggtttggccgatgggctcgtggccgttttccccgtggtccggggaacacccaaagacagctgttcatacctgtgtagccataccgcaaaccggagtaaatttagcatagccgatgaggatgcacggcagaacccctaccccgtgaaggccatggaagttgtcaattccggctcagaggtatggtatagcaatggcccaggcctcctggtcattgattgcgcctcacttgaaatctgtcggcgactggagccctacatggcaccaagcatggtcaccagcgttgtttgcagctcagagggacgcggagaggaggtcgtatggtgcctggatgacaaggcaaactctctggtgatgtaccactctaccacataccaactgtgtgcaagatacttttgtggtgtcccctcacccctcagggacatgtttccggtgcgcccactggacactgagccccctgcagccagccacaccgcgaatcctaaggttcccgagggagacagtattgcagacgtgtccattatgtactccgaagagctaggcacccagatcctgattcatcaggagtctctcaccgattactgctctatgtcctcctacagcagctccccgcctaggcaagctgcacgtagcccttcttcattgccaagctctccagcctcatccagtagcgtcccctttagcaccgactgcgaggatagtgacatgctgcatacacctggtgcagcttctgaccgtagcgaacacgatttgacaccaatggacggggagacattctcacaacatttgcaagctgttaagatcctggctgtgagggatttgatttgggtccctaggaggggcggagacgtcatagtcattggcctcgagaaagactcaggtgcacagcggggtagagtgattgctgttctcaaagccagggagctgaccccccatggtattatgccagtctcgtctgtaaaggtatgctgggctggatggcccgttagagacatggtctacatggttgccgttatgtag

SEQ ID NO: 228378 - DNA, 99 bp, synthetic construct
  misc_feature 1..99: note = Description of Artificial Sequence: Synthetic coding sequence
  source 1..99: mol_type = other DNA
atggcaggaatgtctcagagacccccttcaatgtactggtgcgttggccctgaggaaagtgccgtgtgtcccgagagggcgatggagaccctgaactag

SEQ ID NO: 228379 - DNA, 1506 bp, synthetic construct
  misc_feature 1..1506: note = Description of Artificial Sequence: Synthetic coding sequence
  source 1..1506: mol_type = other DNA
atgttttcctacggtatggtcttatacgagcttctcagcggacagcggccagcattaggacaccatcagctccagatagcgaagaaactcagtaaagggattagaccagtcttgggtcagcccgaggaagtccaatttcgcagacttcaagccttgatgatggagtgttgggacaccaaacctgaaaagcgtcctttggcactgagtgtcgtctctcaaatgaaagaccctacatttgcaacattcatgtacgagctctgctgtggcaagcaaacagccttctttagcagccaggggcaggagtacaccgttgtgttctgggacggcaaagaggagtctcgaaattacaccgtagtcaataccgagaagggtctgatggaggtgcagcggatgtgttgccctggaatgaaggtgtcgtgccagctgcaggtgcagcggagtctgtggaccgcaaccgaagatcagaagatttacatttatactctcaaaggtatgtgccctctcaacacgccacagcaagcgctagatacccccgcagtggtcacctgttttctagccgtgccagtgatcaagaaaaatagttatctcgtgctggctggtttagctgacggacttgtggcagtgttccccgttgtgcggggaacgcctaaagactcttgttcctatctatgctctcacactgctaaccgttctaagttttctatcgccgacgaagacgccaggcagaacccataccccgtgaaggccatggaggtggttaactctggtagtgaggtgtggtacagcaacgggccaggactgctggtgattgactgcgcctcccttgaaatttgcagacgcttagagccttacatggctccttccatggtcacatcagtggtctgttcttcagagggcagaggagaggaggttgtgtggtgcctggacgataaagccaactctctggtaatgtatcactctacgacatatcagctgtgtgctaggtatttttgcggagtgcctagccctttgcgggacatgtttcctgtgaggccactggacactgagcctcccgcagcctcccacaccgcaaatcctaaagtcccagaaggcgattcaatcgcggacgtttcgataatgtactctgaggaactggggacacaaattctgattcaccaggaatcgcttactgactactgctccatgtctagctattccagttcacctccaaggcaggctgcccgaagtccgtccagcctgccaagctctccagcatcctccagtagcgtcccatttagtacagactgcgaggattcagacatgctgcatacaccaggcgcagcttccgatcggagcgagcatgacctgacaccaatggatggcgagacattcagccagcatctacaggctgtaaaaatcctggctgtgcgcgacttaatttgggtaccgcgtagggtcgagatgctctcatcactggcctggcggaggatactggccccaagtggggcagaaagcctgccctcatag

SEQ ID NO: 228380 - DNA, 7583 bp, synthetic construct
  misc_feature 1..7583: note = Description of Artificial Sequence: Synthetic coding sequence
  source 1..7583: mol_type = other DNA
atggcaagcggaagctgccaagggtgcgaggaggacgaggaaacattaaaaaaacttatcgttcggcttaataacgtgcaagagggaaagcaaatcgagaccctggttcagatcctagaggacttgctcgttttcacatattctgaaagagccagcaagctgtttcaagggaagaacatccatgtccccctattgatagtgctggatagctacatgcgagtggcgagtgttcaacaagtcggttggtcactgttgtgtaaattgatagaagtctgccccggtacgatgcaaagtctcatgggcccacaggatgtaggaaacgattgggaagtgctgggcgtgcaccagctgatattaaaaatgcttactgtgcataacgcctccgttaacttatctgtaatcggactcaaaactctagatcttctactgacctctgggaagatcaccctgctgatcctagacgaggagagcgatatttttatgttgattttcgatgcgatgcactcttttcccgctaacgacgaggtgcagaagctcgggtgtaaggctctccacgtattgtttgagcgcgtgtccgaagagcaactgacggagttcgtggaaaacaaagactatatgattttgctgtccgctttgactaatttcaaggatgaggaggaaattgtcttgcacgttcttcactgcctgcactctctggccatcccctgtaacaatgtagaagtcctaatgagtggtaacgtacggtgttataacattgtagtcgaagccatgaaagcgtttccaatgtctgaacgaatccaggaagtgtcatgttgcctgctacaccgccttaccctgggtaatttcttcaacattctggtccttaatgaggtgcacgagttcgtggtgaaggctgtccagcagtaccctgaaaatgctgccctgcagatttccgccttgagctgcctagcactgctgaccgaaacaatcttcctcaatcaggacctggaagagaagaatgaaaatcaggagaacgacgatgaaggagaagaagataagctgttctggttggaagcatgttacaaagcacttacctggcataggaaaaacaagcacgtgcaggaggccgcttgttgggctttgaataatctccttatgtaccagaattcactccatgagaagattggcgacgaggatggacactttcctgctcatcgcgaagtaatgttgagtatgctgatgcatagcagttcaaaggaggtgttccaagccagcgccaacgccctttcaactctgttagagcaaaatgttaactttaggaagatcctcctgtccaaagggattcatctgaacgttctggagcttatgcagaaacacatccactcccccgaagtggccgagtccgggtgtaagatgctcaaccatctgtttgaaggttcaaatacatcactggacataatggctgccgtggtcccaaagatcctgaccgtgatgaaaagacacgagacatccttgcctgtacagctagaggcgctaagggcgatactccatttcatcgtgccaggtatgccagaggaatctcgtgaggacacagagtttcaccataaactgaacatggttaaaaagcaatgcttcaagaatgatattcacaagctcgtgttagccgctctcaacagattcattggtaatccaggcattcagaagtgcggcctgaaagttatcagcagcatagtgcactttccagatgctctcgagatgctctcattagaaggggctatggacagcgtgctgcacactctgcagatgtatccagacgaccaggaaatccagtgtctgggactgtccctcatcggatatctcataaccaaaaaaaacgtctttatcggaaccggccatctactggccaagatcctagtcagttctttgtacagattcaaagacgtggctgaaatccagactaaagggtttcagactatcctagccattcttaaattaagcgcatccttttccaaactgcttgtgcaccactctttcgatctggtgatttttcaccaaatgtctagcaacatcatggaacagaaagaccagcaattcttaaacctgtgctgtaagtgtttcgctaaggtggctatggatgactacctgaagaacgtcatgctggaaagggcttgtgaccagaacaactcaataatggtggagtgccttcttctgctcggggctgacgctaaccaggcaaaggagggtagttcactgatctgtcaggtgtgcgagaaggaaagctctccaaagctcgtagaactcctgttgaattcagggagcagagagcaggatgttagaaaggccctgactatctctatcggcaaaggggattcccaaattatcagcctattgttgagacgcttagccctggatgtcgccaataattctatctgtctgggtggattctgcattggaaaagtcgagcctagctggctgggcccactgtttccagataaaacgtcgaacctcaggaaacaaactaatattgcaagcaccctggcccgtatggtcattcggtaccagatgaagtctgcggtcgaggagggcactgcaagcggaagtgacggtaatttttctgaagacgtactctctaagtttgatgagtggacttttatacccgactcctccatggattccgtattcgcccaatctgatgaccttgacagcgaggggagtgaagggtccttcctcgtgaagaagaaaagcaacagtatcagcgtgggtgaattttatcgggacgctgttctccagaggtgctccccaaacctgcagcggcatagtaacagtttgggaccaatcttcgaccatgaggacctgctgaaacgaaagcgaaagatcctaagctcagatgactccctgcgcagctctaagttgcagtcacacatgcgccattcagattcaatttcctccctggcttctgaacgcgagtacattaccagtttagacctgtcagcaaatgaactgagagatattgacgccctgtcccagaaatgctgcatttcagtgcacctggaacatctcgagaagctggagttgcatcagaatgccctgaccagcttcccccaacagttatgtgaaaccttgaagtcactgacccatcttgatttgcactccaacaaattcacatctttcccatcttatcttctgaagatgtcatgtattgcaaatctagacgtctccagaaacgacatagggcctagtgtggtgctggatccaacggtcaagtgtcccaccttgaagcagttcaacctctcttacaatcagctatcatttgtgcccgaaaatctcaccgacgtggtggagaagttggagcaacttattctagagggtaacaagatctccggaatctgcagtccactgaggctgaaggagttgaagattttgaatctgagcaaaaaccacatttcatcgctaagtgaaaatttcttggaagcctgtccaaaggtagaaagtttctcagctagaatgaattttctggcagcgatgcctttcctcccaccttccatgactatcttaaagttgtctcaaaacaaattttcgtgcatccccgaagctatattaaacttgcctcacctccgatccttggatatgtcctctaacgacattcaatacctcccaggcccagcccactggaaaagtcttaatctgagggagctgctcttcagccacaaccagatttcaatattagacctgtcagaaaaagcctacctgtggtccagagttgaaaaactgcatttgtcccataataaactgaaagagatcccgccagagattgggtgtctggagaatctgacatccctcgacgttagttacaatctcgaattgaggagttttcccaatgagatgggaaagctgtctaaaatttgggatctgccgctcgatgagctgcatctcaatttcgactttaagcacatcggatgcaaagcaaaggatataatccgatttctgcagcagcgcctgaaaaaagcagttccttataaccggatgaagcttatgatagtgggcaatacaggctcaggtaagactacgcttctgcaacagttgatgaaaacaaaaaagtccgatttgggaatgcagtcagctaccgtaggtatcgacgtcaaagactggcccatccaaattcgagacaaaagaaaaagagacttggtcctgaacgtttgggactttgctggtagggaggagttttactctacccaccctcatttcatgacccagagagcgctctacctggccgtttatgacctgagtaaaggccaggccgaggtggacgctatgaaaccgtggctctttaacatcaaagcgcgagcaagttctagccctgtcatactcgtcggcacccacctggacgtgtcagatgagaagcagcgcaaagcctgcatgtccaaaataaccaaagagttgctgaacaagagaggcttccccgcaattcgggactatcattttgtaaatgcaaccgaggagtcagatgcactcgccaagctgaggaagacgattatcaacgaaagcctgaacttcaaaatccgagatcagttggtggtggggcaactcattccagactgttacgtggaactagagaaaattatcctgagcgagagaaaaaatgtacctatcgagttccctgtgatcgaccggaagaggctcctccagctggtcagagaaaaccagctgcaacttgacgagaatgagcttccacatgccgttcactttcttaacgagtctggggtgctgctgcatttccaggaccccgctctccagctctccgatctgtacttcgtggaacctaagtggctatgtaaaatcatggcccagattctgaccgtaaaggtggaaggctgtccaaagcatccaaagggcattattagcagaagagacgtagagaaatttctttctaagaaaagaaaattccccaaaaactacatgtcccaatactttaaacttctcgaaaagtttcaaatcgcccttcctattggggaggagtaccttcttgtcccttcatccttgtccgatcatcgcccagtgatcgagctgccacattgtgaaaactcagagatcattattcgcctgtacgagatgccatacttccctatgggcttctggagtcggctgattaatagactgttggagatcagtccctacatgttatcgggcagagagagagcgctgcggcctaataggatgtactggcgccagggtatttacctcaattggagtcccgaggcatactgcctggtgggcagtgaagtgttggataatcaccccgaaagcttcctgaaaattactgtcccctcttgtcgcaaagggtgtatcttactggggcaggttgtggatcatatcgactctctaatggaggaatggttcccaggattgctcgagattgacatctgtggcgagggtgagacgctgctgaaaaagtgggctctctactccttcaatgacggggaggagcatcagaagattctgctcgatgatctgatgaaaaaagccgaggaaggcgacttgctagtgaacccagatcagccaaggctgactattccgatttcccaaatagccccagacctgatcttggccgacctgcccagaaacatcatgctcaacaacgatgagctggagttcgaacaggctcccgagtttctgcttggcgatgggagttttggtagtgtttatcgggcagcttatgagggtgaagaggttgccgtcaagatctttaacaaacacacttcactacgcctccttaggcaggagctggtggtgctgtgtcatctccaccatccctccctcatttccttactggctgctggaatccgacccagaatgttagtaatggagctggcatcaaaaggctctctggacagacttctccagcaggacaaagcctccctgacgcgcactcttcaacacagaattgccctgcacgttgcggatggacttcgttatctgcactccgcgatgattatataccgggatctcaaaccacacaatgtgctcctgttcactctgtacccaaacgctgccattatagctaaaatagccgattacgggattgcccagtattgttgccggatgggtatcaagaccagtgagggcactcccggtttcagagctcccgaagtggcccgtggcaacgtgatttacaaccagcaggccgatgtttacagcttcggcctccttctgtatgatattctgacgactggcggtcgaattgtcgagggcctgaagttccctaatgaattcgatgaattagagatacaagggaaactacccgatcctgtgaaggagtacggatgtgcgccatggcccatggtggaaaagctcatcaaacaatgcctgaaggagaacccacaggagaggccgacctcagcacaagtgtttgatatactcaactccgcagaactggtctgcctgacacgacgaattcttctcccgaagaacgtcatcgtggagtgtatggtcgctacgcatcataacagtcggaatgcatctatctggctcggctgtgggcacaccgatagagggcagctctcattccttgatctgaatacggagggttatacttctgaagaggtcgcggacagccgaattttgtgcctggccctggtacatcttccggtagaaaaggagtcctggatcgtgtctggcacccaaagtggaaccctccttgtcattaatactgaggacggtaaaaagaggcacactttagagaagatgacagattcagtgacgtgtttgtactgcaatagctttagcaaacagagcaagcagaagaactttttactggtcgggacagccgacgggaaactggccatctttgaggacaagaccgtgaagctcaaaggggcagctccccttaagatccttaacataggcaatgtgtctactcccctcatgtgtctatctgaatcgaccaattctaccgagcgcaatgtgatgtggggcggatgcgggaccaagatcttttcgttctcaaatgacttcactattcagaagctaatcgaaactaggacctcccaactgttttcatacgctgcattttctgacagtaatattattacagtagttgtggatacagccctgtatatcgcaaaacagaactcgcccgtggtggaggtttgggataagaaaacagagaaactatgcggacttatcgattgtgtgcatttccttagggaagtcatggttaaagagaataaggaaagtaagcacaagatgagctatagtgggagggtcaagacactttgcctgcaaaagaacacagctctgtggattggcaccggtggtgggcatatcctgctcctagatctttcgacccggcgacttattcgagtgatttataatttctgcaatagcgtaagggtaatgatgaccgcacagctcggctccctgaagaatgttatgctggtgctcggctacaacagaaagaacaccgagggaactcagaagcaaaaggaaatccagagctgcctaaccgtgtgggacatcaacctgccccacgaagtacaaaatctggagaaacacattgaggttcgaaaagagttggccgagaagatgcggagaacctcggtggaata

SEQ ID NO: 228381 - DNA, 582 bp, synthetic construct
  misc_feature 1..582: note = Description of Artificial Sequence: Synthetic coding sequence
  source 1..582: mol_type = other DNA
atgacaagctcatgcttccgcagtaccacaagacggtctctgagcagtcagacagcacagaggctggtctgcccgcagttcattaacggaacagcgaaagactctatcctaacatctaggtcccaggtcccaataatcctccagtggaacaaaagctcaaagaaattcgtgccacacggggacattcccaatatggaggacgtactagccgttaagtcctttcgcatgcagaacacactgtacctatcactgacccggttcattggagactctagggtgatgcggtggaactccaaacagtttgtggagattcaggctctcccatctcgaggcgcaatgaccctccagccattctcttttaaagataatcactacttggcactagggtcggattataccttttcccagatttaccagtgggacaaggagaaacaactattcaaaaagttcaaggagatctatgtccaggccccacgcagctttacagcagtgagtacagataggcgcgattttttcttcgccagctcattcaaaggtaaaaccaagatcttcgagcacatcattgtggacctgagcttatag

SEQ ID NO: 228382 - DNA, 1638 bp, synthetic construct
  misc_feature 1..1638: note = Description of Artificial Sequence: Synthetic coding sequence
  source 1..1638: mol_type = other DNA
atggcgctgcgacgcggtggctgtggggcactggggttactactcctgctgttaggtgcagcgtgccttatacccaggagcgcccaggttaggcgtctggcgaggtgccctgctacctgttcttgtaccaaagagagtattatctgtgtgggttcctcatgggtgccacggattgtgcctggggatatcagtagcctgtcactggtaaacgggactttctcggagattaaggacagaatgttctctcatctgccatcactgcaactcctgctgctgaactccaactccttcaccatcattcgagatgacgcctttgccggattatttcacctcgagtacctgtttatcgaaggaaataaaatcgagacgataagcagaaacgccttcagaggcttgcgagacctcacgcatctgtccctggccaacaaccacattaaggctcttcctcgagacgtatttagcgatttagattccctcatagagttggatcttagaggtaacaaattcgagtgcgactgcaaagccaagtggttatatctgtggctgaaaatgacaaactcaacggtcagcgatgttttgtgtatagggcctcccgagtaccaagaaaaaaagctgaatgacgttacatcgttcgattatgagtgcaccacaacagacttcgtggtccatcagaccctcccgtatcaaagcgtgagcgttgacacattcaattcgaagaatgacgtgtatgtggcaatcgcacagccctcgatggaaaactgcatggtgctcgaatgggaccatatagaaatgaattttcggtcatatgacaacataacagggcagtctattgtcgggtgtaaggccatcttaatagacgatcaggtgttcgttgtggtcgcgcagctgttcggagggagtcacatctacaagtacgatgaatcttggaccaagttcgttaagttccaagatattgaggtgtctcgaatttccaagcccaatgacattgaattgttccagatcgatgacgagaccttcttcgtgatcgcagactcctcaaaagccggactgtctactgtgtacaaatggaacagtaagggtttctattcctaccagagtctgcacgagtggtttagagataccgatgctgagtttgtcgatatagacgggaaaagccatctgatcctctcgagtagatcccaggtgccaattatactgcagtggaacaagtcttctaagaagttcgtaccacacggtgatatcccaaatatggaggacgtgctggccgttaaaagcttccggatgcaaaatactctgtatctgtccctcacacggttcatcggtgactcacgggttatgagatggaacagcaagcaattcgtggaaattcaggccctaccgtcacggggtgccatgacgctacaaccgttcagttttaaggacaatcattatctcgccctcggatctgattatacatttagtcaaatttaccagtgggacaaggaaaaacagctatttaaaaagtttaaggagatctatgtacaggcccctcgtagcttcacggcagttagcaccgatcggagagacttcttcttcgcgagttccttcaaaggcaaaacaaagatctttgagcacataattgtagatctcagcctttag

SEQ ID NO: 228383 - DNA, 1647 bp, synthetic construct
  misc_feature 1..1647: note = Description of Artificial Sequence: Synthetic coding sequence
  source 1..1647: mol_type = other DNA
atggcaggtctgagggcaagagggggaccagggccaggccttctggctctgagcgccctcgggttctgtctcatgctccaggtcagcgcgaagcgccctcccaagacaccaccgtgccctccctcatgttcctgtacacgcgacacagcattctgcgtggattcgaaagccgtgcccaggaacctcccatcggaggtgatcagcctaactttggtgaatgctgccttctctgaaatccaagacggcgctttctcccacttgccactgctgcaattcctcctcttaaacagcaacaaatttacccttatcggagataacgcctttacgggcctaagccatcttcaatatttgttcatagagaataatgatatctgggccctgtcaaagttcactttcaggggactcaagtcactcacccacctttctctggccaataacaatctacagaccttgccccgagatatttttcggcctctggatattctgaacgatttggatctcagggggaacagtctgaattgcgactgcaaggtaaagtggctcgtggaatggctggcacacacaaacactactgtagctcctatctactgtgcctctcctccacggttccaagaacacaaagtgcaggacttaccgctgagagagttcgactgcatcaccacagacttcgtcctgtatcagaccttggccttccctgctgtctctgccgagccgttcctctacagcagcgatctatacttggccttggcccagcccggagtatcagcctgtaccattctgaagtgggattatgtggagagacaactgagggactatgacaggatcccagccccatctgccgtacattgcaagcccatggtggtagactctcagctttacgtggtagtcgcacaactctttggcggtagttacatctaccattgggacccaaacaccaccagattcacacgtctgcaggatatcgatccccagcgggtgcggaagccaaacgacctggaggcctttcgcatagacggcgattggtacttcgcggttgcagacagcagcaaggcgggagcaacttctctgtatcgttggcaccagaatggcttctactcccaccaggccttacacccttggcacagagacaccgaccttgagtttgtggatggagaaggaaaaccaaggctgatcgtctcctcatcctcacaggcccctgtcatataccagtggagcagaacacagaagcagttcgttgcccagggcgaagtgacacaggtgccagatgcccaagccgtgaaacatttcagagcaggacgcgatagctatttgtgcctctcgcgatatatcggtgacagcaagatcctgaggtgggagggaacaagattctctgaggtgcaagccttaccatcccgcggttctctggcgctccagccgttcctagtggggggacgacgatatctggccctcggttctgatttttcatttacccagatataccagtgggatgaagggagacaaaagttcgtccggttccaggaactagcggtccaggccccaagagccttctgttacatgcccgctggagatgctcaactgctgcttgccccttcttttaagggccagaccctcgtttaccgtcatatcgtagtcgacttgtcggcctag

SEQ ID NO: 228384 - DNA, 1614 bp, synthetic construct
  misc_feature 1..1614: note = Description of Artificial Sequence: Synthetic coding sequence
  source 1..1614: mol_type = other DNA
atggggggtgccggaatcctgctgctgctactagccggtgccggagtggtggtggcttggcggccaccgaagggaaaatgccctctgagatgcagttgtagcaaagattctgccctgtgcgagggctcccccgacttacccgtgagcttcagcccaaccctgctttcattaagcctagtgcggacgggtgtaacccagctcaaagccggttccttcctgcgcatacctagcctccacttgcttctttttactagcaacagcttttcagtcatcgaagatgacgctttcgccggactctcccatctgcagtatctcttcattgaagacaatgaaattggttcaatatccaaaaacgcccttcgaggtctacgctctctcacccacctgtctctcgcaaataaccatttggaaacactgccacgtttcctgttccgcggtctggacacacttacccacgtggatcttcgaggtaatccctttcagtgcgactgcagggttctgtggctgttacagtggatgccgacagtcaacgctagcgtggggactggcgcatgcgcaggaccagcatcgttgagccacatgcagcttcatcaccttgatccgaagacgttcaagtgtagagcaatcgaactgtcatggttccagactgtgggcgagagcgccctgtcggtggagcctttcagctaccagggcgagccgcacatcgttctcgcgcagccctttgctgggagatgtctcatccttagttgggactattcactccagcgctttcggcctgaagaagagttgccagcagcctccgtggtgtcttgcaaacccctcgtgctcggtccttccctgttcgtactggcagcccgtctgtggggagggagtcagctgtgggcccgtccttcccctggacttcggctggcacccacccagactctcgcacccagaaggctgctgaggccaaacgacgcggagttgctatggctggaggggcaaccatgtttcgttgtcgctgacgcaagtaaagcgggaagcaccacactgctgtgccgagatgggcctgggttttatcctcatcagagccttcacgcgtggcacagagacacagacgctgaggctctcgagttagacggcagaccccacttgttgctggcatcagcctcccagagacctgtactgtttcattggacagggggacggtttgagaggcgcacggacattcccgaggctgaagacgtttatgcaacgcgacacttccaagccggaggggacgtcttcctatgccttacccgctatatcggcgacagtatggtgatgcggtgggatggcagcatgtttcgactcctccagcagctgccttcaagaggagctcatgtctttcagccccttttgatcgcccgtgaccagctggccatcctagggtcagatttcgcattttctcaggttctacggctggagccagacaagggattactggagccgcttcaggaactgggtccaccggctctggtggcacctcgtgcgttcgctcacatcacaatggctggacggagatttctctttgcagcatgtttcaagggacctacacagatttatcagcatcacgaaattgacctcagtgcctag

SEQ ID NO: 228385 - DNA, 1485 bp, synthetic construct
  misc_feature 1..1485: note = Description of Artificial Sequence: Synthetic coding sequence
  source 1..1485: mol_type = other DNA
atgggcggagccggtatcctcctgctgctgctggccggagccggtgtcgtcgtggcatggaggcctccaaaaggtaaatgtccactcagatgtagctgcagtaaagatagcgcactgtgcgagggatctccagacctgccggtcagcttctccccgactcttttgtccctcagtctcgtgagaactggcgtgacacagctgaaggcgggaagttttttgcgaatcccctcgctgcatctgctcctcttcacaagcaacagctttagtgtgattgaggatgatgccttcgcaggcctctcccacttacagtatctgttcattgaagacaatgagattggatccatttctaaaaatgccctgcgcggtctgcggtcactgacacacctgtctctcgccaataaccatttggagacactgccaagatttctcttcagaggcctggacacactaacccacgtagaccttagggggaaccctttccaatgtgattgccgcgttttgtggttactgcagtggatgccgactgtaaatgcctcggtgggcaccggcgcatgtgcgggaccggctagtcttagtcatatgcaactccaccatctggaccctaaaaccttcaaatgtcgtgctatcgagctctcttggttccagacagtgggagagtctgctctcagtgtcgaaccatttagttaccagggagagccacacattgtactagctcaacctttcgccggacgatgcctcattctctcttgggattacagccttcagcgctttaggccagaggaagagttacctggcgaacctccccctaggccgtcagcgtgtccagcagcctgtctcgctgggctgacctgccttcccacgagcccccagcgcccaccttggtgtcctgcctcccactggtgctgggcgagggctagctcctgctggctgccagcttgcggcggagctcatagttgcggcccaggacctgtgccagcgtgcgcttggcctcaaagaaggccttggccaagaggaggatgttgcggccctatgacaccctcctcgtgtggttggaagggtaacccagcatcctggtggccaatgccccctcgcagggcagctcccaggtgctgcgcagcaacaggtccggcttttactcgtactcgagcctgtaccccaggcacaggtaccaggaccctccgtccatggtcttggaccgctggccctacttgctgctggccccgattgccaagcggcccttgttcctcgacagggcctgtcgccgctagcagagacgctcagacatccccgaggccacgaatgagcatgccccacgctaccagtcgccttgtgggtacatgttcgtgcgcaagccacgccaccctgggaaccccatggtcttgcgcaggaaccgccccatgtttcgtgtgctgcagtaacttcccgagggccgtacctacctcatcatcgcactgtagtagccctggcaccagctggccaagctag

SEQ ID NO: 228386 - DNA, 1617 bp, synthetic construct
  misc_feature 1..1617: note = Description of Artificial Sequence: Synthetic coding sequence
  source 1..1617: mol_type = other DNA
atggggggtgccggaatactgctcttactgcttgccggagcaggagttgttgtcgcttggaggccacccaagggcaaatgtcccctcagatgctcttgctctaaagacagcgcattgtgtgaaggttcccccgatctgcccgtgtcgttcagccccactttgctcagcttgagcctggtacgaactggggtgacccagttgaaggccggaagctttctgcgcatcccttcactccatctattactctttacatcgaattccttcagtgtaatcgaggacgatgcattcgccggattgtctcatctccagtatctcttcattgaggacaacgagatcggatcgattagcaagaatgccctgcgcggtcttcgctccctgacacatctgtctttggctaataaccacctcgaaaccttgcctcggtttctgtttcgcggattggataccctcacacacgtagatctgagagggaacccattccagtgcgactgccgcgtattgtggctactgcagtggatgcccaccgtcaatgcctcagttgggactggcgcttgcgcaggtcccgcttccctgagccacatgcagctgcaccatctggaccctaagacatttaagtgtcgggctatcgagctgtcttggttccaaacagttggggagagtgcactctcagtggagccattcagttaccagggggaaccacacatagtcctggcccagccctttgcaggccgatgcttgatcctctcctgggattactctctgcagcggtttcgtcctgaggaagagcttcctgcagcctctgtggtgtcctgtaagccgctcgtactgggtcccagcttgtttgtcctggctgcgaggttatggggagggagccagttatgggcgaggccatcacccggacttaggctcgctcccactcagacacttgctcctagacggcttctcaggcctaatgatgccgagcttctatggctggaggggcaaccatgctttgtggtagccgacgcgagcaaagcaggctccactacccttctgtgtagggacggacctggattttatccacaccagtccttacacgcatggcaccgtgacactgatgccgaggccttggagttggacggaagaccacatctgctcctggccagtgcttcacagaggccagtcctcttccactggacaggagggcgtttcgaacgtcgcaccgatattcccgaggcagaggatgtttatgccacacgccattttcaggccggaggagatgtttttttgtgcctgacgcgctatataggggatagtatggtggtgatgcgctgggatggctcaatgttcaggctgttgcagcagctcccgagccgaggagcacacgtgtttcagccactgctgattgcccgagaccagttagctatcctagggtcagattttgcttttagccaggtgctgcgcctggagcccgacaagggcctgctcgagccattgcaggagctcggcccaccagctcttgtggcgccacgggcatttgcgcacataaccatggctggacgacgcttcctcttcgcagcttgctttaaaggccctacccagatttaccagcatcacgaaatcgatctgagtgcttag

SEQ ID NO: 228387 - DNA, 2091 bp, synthetic construct
  misc_feature 1..2091: note = Description of Artificial Sequence: Synthetic coding sequence
  source 1..2091: mol_type = other DNA
atggccacacctggatccgagccacagccttttgtccctgcactgagcgtggctactctccaccctctgcaccacccccaccatcaccaccaccatcaccaacaccacggaggcacaggcgctccaggcggagcgggaggcggtggcggtggcagcgggggatttaacttgcctctgaacagaggcctggagagggcactggaagaagcggctaatagtgggggtctgaatctgtcagcgagaaagctcaaggagttccctcggactgctgctccaggacacgacctgtcagatactgtgcaggctgacctgtccaaaaacaggttggtggaggtccctatggaactatgtcattttgtgtcacttgaaatcctcaatctttatcacaattgtataagagtgattccagaggccatcgtgaacctacagatgcttacctacctaaatctctctcgaaatcaactgtccgctctgcccgcttgcttatgcgggctacccctcaaagtcctgatcgcgagcaataataagttgggctccttgcccgaggaaattggacagcttaagcagctgatggagctggatgttagctgtaacgagatcacggcactgccgcagcagattgggcagctgaaaagcctgcgagagctgaatgttagacgcaactatttaaaggtgcttccgcaggagctggtggatctaagcctggtcaaatttgatttttcatgcaataaggtactggtgattcccatctgttttcgggaaatgaagcagcttcaggtcctcctgctggagaacaatcccctgcaatcccctcccgctcagatttgcaccaagggaaaagttcacatcttcaaatatttgtcaatccaagcttgtcagattaagacggctgatagtctgtaccttcacaccatggaaagaccacaccttcaccagcacgtcgaggatggaaagaaggactccgactctggagtgggatcagacaatggcgataagagattgtccgcaacggagccctccgacgaagatacggtctccctgaacgtcccaatgagtaatattatggaagaagagcagatcattaaagaagattcctgccatcggttgagccctgtcaagggggagtttcaccaggagtttcaacccgagcccagcctcctcggagattccaccaacagcggagaggagagggatcaattcacggatagggccgatggtctccattctgaattcatgaattataaagctagggccgaagattgtgaggagctactgcggatagaggaagatgtccattggcaaacagagggtataatcagcagctccaaagatcaagacatggatattgccatgatcgaacagcttagggaagctgtggacctcctccaggaccctaacggactgagcacggacatcactgaaagaagcgtgttgaacctgtaccctatgggcagcgccgaggccttagaactccaggattctgctctgaacggccagattcagttggaaacctcccctgtgtgcgaggtgcagtcagacctgacattgcagagcaacgggtcacaatattcccctaacgaaattcgcgaaaactcacccgctgtctcaccgactaccaactctaccgcaccattcggactaaagcccagatccgttttcctaaggccacagaggaacctggagtctatcgatccccaattcacaatcagaagaaaaatggaacagatgcgtgaggagaaggaactggttgagcagctgcgcgagtctattgaaatgcgtttaaaagtgagcctgcacgaagacttaggcgctgctttgatggacggcgtggttttgtgccatttagttaatcacattaggcccagatcggtggcttcaattcatgtcccaagtccagccgtccccaagctgtctatggcaaaatgccgcaggaacgtcgaaaattttctggaagcctgtagaaagctgggggtccccgaagagaagctgtgcctgccccatcacatcctggaggagaaggggctggtgaaggtgggcatcacaatacaggcactcttggacatcacagtgactaaggcgctcttcacttag

SEQ ID NO: 228388 - DNA, 2187 bp, synthetic construct
  misc_feature 1..2187: note = Description of Artificial Sequence: Synthetic coding sequence
  source 1..2187: mol_type = other DNA
atggccactcctggctcagaaccacagcctttcgtcccagctctgtccgttgcaaccttgcacccgctgcaccacccacaccaccaccaccaccaccatcagcatcatggagggaccggggcacccggaggggctggtggaggcggtggcggatcagggggattcaatctgccattgaaccgcggactggaacgtgccctggaagaggcggcaaactctggaggcctcaatctgagcgcaaggaagcttaaggaattcccgcgaactgctgcacctggtcacgacttgtcagacaccgtgcaggcagacttgagcaaaaaccgcttggtcgaagtgcccatggagctgtgccatttcgtctcgctagagatcctgaacttgtaccacaattgtatccgggtcattcccgaagccatagttaatctacagatgttaacctacctgaacctgagtcgcaatcagcttagcgcgctgccagcctgcctgtgtgggctccctctgaaggtgctgatcgccagcaacaataagcttgggtcccttcctgaggagattgggcagctgaagcagcttatggaacttgacgtgtcctgcaatgagattactgcactgccccagcagattggacaactcaaatcgcttagggaacttaacgtgcgccgtaactatctgaaggtgctcccccaggagctcgtggatttgtctcttgtgaagttcgacttctcctgtaataaggtcctggtgattccaatttgctttagggagatgaaacagctccaagtcctgctactcgagaataaccctcttcagtcccctcccgctcagatctgtactaaggggaaggtgcacatattcaaatatctgtctatccaagcctgtcagatcaaaacagccgattctctttatctgcatacaatggagcggcctcatctgcatcagcatgtggaagacggaaaaaaggactcagattctggcgtgggcagcgataatggagataagcgcctttctgcaacagagccaagcgacgaggacactgtatctctaaacgttccaatgtccaacatcatggaggaggaacagattatcaaggaggattcttgccaccgcctctctcctgtgaagggcgaatttcatcaagagtttcaacccgagccgagtctgctgggcgattcgacgaactccggagaagaacgtgaccagtttacggatcgcgctgacggccttcactccgagttcatgaattataaggctcgggctgaggattgcgaggaactgctgcgaatcgaggaggacgtgcactggcagaccgagggcatcatcagctccagtaaggaccaggatatggacatcgccatgatagagcaactgagagaggctgtggacctcttacaggatcctaacgggctttcaacagacataacagaaaggtccgtgctaaacctttaccctatgggcagcgccgaagcacttgagctgcaggattccgccttgaacggccaaattcagctagagacctctccagtctgcgaggtgcaaagcgatcttactctgcagtccaatggcagtcagtactctcctaacgaaattcgggagaatagccccgctgtatcaccgaccaccaactccaccgccccattcgggctgaaacccaggagcgttttcctgaggcctcagagaaacctagaatcaatagacccgcagttcactatcaggcggaagatggagcagatgagagaagagaaagagctggtcgagcagctgagagagtcaatcgagatgcgtttgaaggtgtcattgcacgaggacttaggtgctgccttaatggatggggttgtactgtgtcatctcgttaaccacatcagaccacgcagtgtcgccagcatccatgtgccctcgcccgctgttcctaagctcagcatggctaaatgcaggaggaatgtagagaattttctggaagcttgtcgaaagttgggcgtgccggaggccgatctctgcagcccatgtgacatccttcagctggatttcagacatattcggaagactgtagatacactgctagctctgggcgagaaggcgcctccacccactagcgcactgcggtcccgagatctgatcgggttctgcctggttcacatcctgttcatagtgcttgtctatatcacgtatcactggaacgctctcagtgcttag

SEQ ID NO: 228389 - DNA, 2292 bp, synthetic construct
  misc_feature 1..2292: note = Description of Artificial Sequence: Synthetic coding sequence
  source 1..2292: mol_type = other DNA
atggccacacccggaagcgagcctcagccctttgtcccagcccttagtgtggccacactgcaccctctgcatcacccccatcaccatcaccaccaccatcagcaccatggcggaacaggggctcccggtggggcaggcggtggcggagggggtagcggtggctttaatttgcctttgaatcgaggcctggaacgtgccctcgaggaggccgctaattcaggaggcctgaatctgagcgcgcgaaagctgaaggaattccctcgcacagccgctccgggtcacgatttgtcagacaccgtccaagcagacctctctaaaaatcggctggtcgaggtgccaatggaactctgtcatttcgtctcactcgaaattctcaacctatatcacaattgcattcgggtcatcccagaggccattgtcaatcttcagatgctgacttatctgaatctctctcgaaaccagctctcagccctgcccgcatgcctatgcggcctgcccttaaaggtcctgatcgcctcaaataataaacttggcagtctgccagaagagatagggcagctcaagcagttgatggaactggacgtgagctgcaacgaaataactgccttaccccaacaaataggccagctgaaatctctgcgcgagctgaacgtccgcagaaattatctaaaggtgctaccgcaggagcttgtggacctctctctggtgaagtttgatttttcttgcaataaggtgcttgtcattccaatatgcttccgcgaaatgaagcagctgcaggtgttgctgctcgagaataaccctttgcaatcacccccagctcagatctgcacaaagggtaaggtgcacattttcaagtacctgtcgattcaggcttgtcaaattaagacggccgacagtctgtatctccataccatggagaggccacacctccaccagcacgttgaagatggaaaaaaagattcagattccggcgtcggttcagacaacggtgataagcgcttgtccgcaactgaaccgtccgatgaggacacagtgagcctaaacgtgcctatgtccaatattatggaggaggaacagattatcaaagaagactcttgtcatcgattgagcccagtcaagggcgaattccaccaagagttccagccggaacccagcctgctgggcgattccactaacagcggggaggagcgcgaccagtttactgaccgggctgacgggctgcactccgagtttatgaattataaagctagagctgaggactgcgaagaactgctcagaattgaggaggacgtgcactggcagaccgaaggaatcatctcaagtagcaaggaccaggatatggacatagctatgatagaacagctgagagaggcggtggacctgctgcaggaccctaacggcttatccactgacataacagagaggtccgtcctgaacctatatcctatgggctcagccgaagcgttggaactgcaggatagtgccttaaatggacaaattcagctggagacatccccagtctgtgaagtccaaagtgatttgactctgcagagtaacggaagccaatactcaccgaacgaaatccgcgagaacagcccagccgtgtctccaacaacaaattctacggcaccttttggcttaaagcccaggtctgaccccgcattaatcctgccacctatctctttcaacactctcacccaggcccagacctgggattctagctcatatagcgtgcctagtgaaggagactccgacaatgtgttcctcagaccgcagcggaacctggaatctatagacccccagttcaccattcgcagaaaaatggaacaaatgcgggaggagaaggagctggtggagcagctgcgagagtcaatcgaaatgcgactcaaagtgtcgctacatgaggacctcggggcagcattgatggacggcgtggtcttgtgtcacctggtgaatcatatcagaccacggtcagtggcaagcatccacgtgccaagccccgcagtgcccaagttaagcatggctaaatgccgtaggaacgtggaaaactttctggaagcatgccggaagttaggtgtgcctgaggccgatttgtgttctccgtgcgatatcctgcagctggatttcaggcatatccgaaagacagtcgacactctgcttgccctcggcgagaaagcacctcccccaacatcagcccttagatcacgagatcttatcgggttttgcttagtgcacattctatttatagtactcgtatatattacctatcattggaatgctctgtcggcatag

SEQ ID NO: 228390 - DNA, 3282 bp, synthetic construct
  misc_feature 1..3282: note = Description of Artificial Sequence: Synthetic coding sequence
  source 1..3282: mol_type = other DNA
atggctaggcctgtccgagggggtctaggcgctccaagacgcagcccctgcttgctgctattatggcttctgctcttgagattggagcctgtgaccgctgccgcaggccctagggctccctgtgctgctgcctgcacttgcgccggtgatagcctcgattgcgggggtaggggtctggctgctttacccggtgacctccccagctggacccggagcctgaatctcagctacaataagctgtcagagattgatcctgcaggcttcgaagatctgcctaatttgcaggaggtctacctcaataacaacgagctcacggccgttccaagcctcggcgctgcgtcttcgcacgtggttagcctctttctccaacataacaagattcggtccgtggaggggagtcagctgaaagcttacttgtccctggaggtactggacctcagcctcaataatattacagaagtgcggaacacctgcttcccccatggccctcccatcaaagagctgaatcttgcgggtaaccggattggaacgctggaacttggcgctttcgacgggctgtctagatcactgctcacactgcggttgagtaagaacaggatcacccagctcccagtccgagccttcaagctgcccagactgacacagctcgatctgaatcgtaacagaatccgtctgattgagggtcttacatttcaaggactgaactctctcgaggtgctgaaactccagcggaacaatatatctaagctgacagatggtgcattttggggcctaagcaagatgcatgtgctccatttggaatacaactccctagtcgaggtgaactcaggttccctctacggcctgacagcactccaccagctgcacctgtcaaataactccatcgctcgtatccaccgcaaaggctggagtttctgccagaagctgcacgaactcgtgctttcgttcaacaacctgacacgattggatgaagagtccctggccgagctgtctagcctctctgtgttacggctgtctcacaactcaatttcccatattgctgaaggcgcattcaaaggtctgagatctttgcgagtgctggacctcgatcataatgagatatcgggcacgatcgaggatacatccggggcattctcaggactcgatagcctgtcaaagctaacattgttcggcaacaagattaagtcagtggccaagcgggctttttcagggcttgagggtctagagcatctgaatctgggtggtaacgccattcgctctgttcagttcgatgccttcgtcaagatgaagaacctgaaggaactgcatatcagcagtgacagcttcttgtgtgactgtcagctgaagtggttacccccatggcttataggtagaatgttacaagctttcgtaaccgccacctgcgctcatcccgaatccttgaaaggccagtctatcttcagtgtccccccagaatccttcgtgtgcgatgactttctgaagcctcaaatcattacccaaccagaaactactatggctatggtcgggaaagacatacgctttacctgctcagcagcctcttcatcttcctctcctatgacgtttgcatggaaaaaggacaatgaggtccttacgaacgcggacatggagaattttgttcacgtccacgctcaggacggagaggttatggaatatactaccatcctccacctcaggcaggtcacattcggccacgaggggagataccagtgcgtcatcaccaatcacttcggctctacttattctcacaaagctcgactgaccgttaatgtcctgccaagtttcactaaaaccccgcatgacattactataaggacgacgacgatggccagacttgaatgcgctgccaccgggcacccgaatccccagattgcctggcagaaggatggcggaaccgattttcctgccgctagagaaagacgaatgcacgtgatgccagatgacgacgttttcttcattacagacgtaaaaatcgacgatgcgggagtgtacagttgtaccgctcaaaacagcgccggttcaatcagcgctaacgcaactctgactgttcttgagacgccctctttggtcgtgcccctggaggacagggtggtttctgttggggagacagttgctttgcagtgcaaggccactggtaatcccccacctaggatcacatggtttaagggtgatcgccctttaagtttaaccgagaggcaccaccttacaccagacaaccagttgctagtagtgcagaatgttgtggcagaagatgctgggcgatatacttgcgaaatgagtaataccctgggaactgaaagggcccactcccagctgtcggtcttacccgcagctgggtgccgaaaggacggaaccaccgtcggaatatttactatagcggtcgtgtcatctatagttttgactagcctcgtttgggtgtgtattatctaccagaccaggaaaaagagcgaggaatactcagtgacaaacactgacgaaaccgtcgttcccccagacgttccttcctacctgtctagccaggggactcttagcgacaggcaggaaacagttgtacgcacagaaggtggtccccaagccaatggtcatatcgagagcaatggcgtttgtccgagagatgcctcacatttccccgagcctgatacccactcagtggcctgtagacagcctaagctgtgcgccggttccgcatatcacaaggagccctggaaagctatggagaaggccgagggcaccccaggaccacataagatggagcatggcggtcgagtcgtgtgctctgactgcaacaccgaggtggactgctacagtcggggacaagctttccaccctcagcccgtgagtagagattcagctcagccttctgcaccaaatggtccagagcctggcggttcggaccaggagcactccccacaccatcagtgctccagaacggccgcaggctcatgcccagaatgccaggggtccctgtatccctccaaccacgatcggatgctcacagcggtgaagaagaagcctatggcttccttggatggaaaaggagactctagctggaccttggcgcgattatatcaccctgacagcaccgaattgcaaccagcttcgtcccttacatcgggaagcccagagcgtgcggaagcccaatacctgctcgtatccaacggacatcttccaaaggcgtgtgacgccagtccagagagtacaccactcacagggcagcttcccggaaaacagcgcgtgcctctcttgttggcacccaagagctag

SEQ ID NO: 228391 - DNA, 2991 bp, synthetic construct
  misc_feature 1..2991: note = Description of Artificial Sequence: Synthetic coding sequence
  source 1..2991: mol_type = other DNA
aacctgagctacaataaactgtcagagatagaccctgccggattcgaggatctgcccaatctgcaggaagtgtatctgaacaataacgagctaaccgccgttcccagcctcggcgcagctagttcacatgtggtaagccttttcctgcagcacaacaaaattcgctctgtggaaggaagccagcttaaagcgtacttgagcctggaagtactggacctttctttaaacaacataactgaagtacgcaatacctgttttcctcacggacctcctataaaggagttgaatcttgcgggaaatcgaatcggtactctggagcttggagccttcgacggactttcacggtcactgctcacactacggctgtcaaagaatcgtataactcagttgcccgtgcgggctttcaaactacctagactgacacagctcgatctcaatcgaaatcgaatccgccttattgaaggcctaacgttccagggcctgaattcactcgaggttctgaaactgcagcgaaacaacatcagcaaactcaccgacggcgctttttggggcctgagcaaaatgcacgtgctccacctcgagtacaacagcctggttgaggtgaatagcggctcgttatacggtctcacagctctgcatcaactacacctttcgaacaattctatagcaaggatccatcgcaaagggtggagcttctgccagaagctccatgaacttgtgctaagttttaataacctcacccgactagatgaagagtccctggcagagctgtcgtccctcagcgtgctgcggctgagtcataattccatctctcatatagccgagggcgcttttaaaggtctccgttccctgcgagtgcttgacttggaccacaacgaaatctccgggacgatcgaagatacaagtggggctttctcaggattagacagcttaagtaaacttaacctcgggggtaacgctatacgcagtgtccagttcgacgcctttgtgaagatgaagaacttaaaagaactccacataagttcagattctttcctatgcgattgtcagctgaagtggctgccaccatggcttatcgggaggatgctgcaggctttcgtgaccgcaacctgtgcacatcctgagtctctaaagggtcaatccatcttctctgtcccgcctgaatcattcgtctgtgacgactttttaaagcctcagatcattactcaacccgaaaccaccatggctatggttggcaaagacattcggtttacctgttccgcagccagcagttcctcctctccaatgacatttgcttggaagaaggataacgaggttctgacgaatgctgatatggagaactttgtccacgtccacgcgcaggatggggaggtcatggagtataccaccatcctgcatttgaggcaggtcaccttcgggcatgaaggccgataccagtgtgtaatcactaatcactttgggagtacgtacagtcacaaggcaaggctaactgtgaatgtgctcccatcattcactaagaccccccacgatattacaattcggaccacaacgatggctaggctggaatgtgctgccaccggccaccccaatccccagatcgcatggcagaaagacggcggaaccgatttccctgcggcacgggagaggaggatgcatgtaatgcccgatgatgacgtgttttttatcactgacgtcaagattgacgacgcgggtgtgtacagctgcaccgcgcaaaattccgcaggcagcattagtgccaatgcgacgttgactgtcttggagacacctagtctggtggtgccacttgaggacagggtcgtatccgtgggcgaaacagtggccctgcagtgcaaggccacaggcaacccacccccacgaatcacttggtttaaaggcgacaggcccctgagtcttacagaacgacaccatctgacccctgataatcaactgcttgtggtgcaaaatgtggtggcggaggatgcaggacgctacacatgtgaaatgtccaataccctgggaactgagcgggctcacagccagctgtctgtgcttccagcagcgggatgcagaaaggatggcaccacggttggcatatttacaatcgccgtcgtcagcagtatcgtgctgaccagcttggtctgggtgtgtattatttaccagacgaggaaaaagtctgaggaatattccgtcacaaatactgatgagactgtcgttcccccagacgtaccaagctatctctcttcccaggggacgctaagcgacaggcaggagaccgtcgtgcggactgagggaggcccacaagctaatggccacattgaatccaatggagtgtgtcctcgggacgcttcccactttccagagccagatacacatagtgtcgcgtgtaggcagcccaagctgtgtgccggatccgcctatcacaaagaaccatggaaggccatggaaaaggccgaggggacacctggacctcacaagatggagcacggaggcagagtggtgtgcagcgattgcaacactgaggtggactgttatagccggggacaggcctttcacccgcagccagtgagtagagactcagcacagcccagtgcaccaaatggaccggaacccggaggtagtgaccaggagcactccccacatcatcagtgctcaagaaccgcagccggttcctgtccagagtgtcaaggttcactttaccctagcaatcacgatcgcatgctcaccgccgtcaagaaaaaacctatggccagtctggatgggaaaggagacagttcatggacccttgcccgactataccaccccgatagcactgagctacagcccgcttccagcttgacaagcggatctccagaaagagcggaggctcaataccttctcgtatcaaacgggcatctgccgaaggcatgcgatgcaagccccgagtccactcccttgacgggccaattgcccggaaagcagcgagtgccgctcctgcttgccccaaaatcatag

SEQ ID NO: 228392 - DNA, 3213 bp, synthetic construct
  misc_feature 1..3213: note = Description of Artificial Sequence: Synthetic coding sequence
  source 1..3213: mol_type = other DNA
atggcccgacccgtcagaggaggtctcggggctcctaggagaagtccctgcctgttgctcctctggctgcttctcctacggttggagcctgtgactgcagccgcaggccctcgcgctccttgtgccgctgcctgcacttgtgcgggtgattccctggattgtggaggtcgcggtttagccgcactgccaggtgatctgccaagttggacacgtagccttaacctcagctataacaaactgagcgagattgaccctgctggctttgaagatcttcctaatctgcaggaggtctatctgaataataatgagctgaccgccgtgccatccttgggcgctgcgagctctcatgttgtaagtctcttccttcagcacaacaaaattagatctgtcgagggatcacagctgaaggcctatctcagtctggaggtgcttgacctctctctcaacaatattactgaggttcgaaatacatgctttccccacgggccacccattaaagaactgaatctggctggcaacagaatcggcactctagaattgggtgcattcgatggtctgagccgatccctgctgacccttcgtctctcaaaaaatcggataacacagctgccagtccgggcattcaagcttcctcggttaacacaactggacctgaaccgcaataggatccggctcattgaggggctcacattccagggactcaattccctggaagtgctgaagctccagaggaataacatttccaaactgactgacggcgctttctggggtctcagcaagatgcacgtgctccatctggagtacaactccttggtcgaagttaattctggatcattgtacgggctgaccgccctgcaccaactacacctctctaataattctatagccaggatccaccggaaggggtggtctttttgccaaaagctgcacgaactggttctcagctttaataatctcactaggctcgacgaagaatccttggcagaactttcctcactttcggtgctccggctttcacataacagtattagccacattgctgaaggcgcatttaagggtcttaggtccttgcgagtccttgacctcgaccacaacgagataagtggaacgatcgaggatacttcaggggctttcagcggcttagactctctgtcaaaactgctgttgctcgagccatctcaaagcgccggttgctcttctccatcacagccccacatgtcagctggtggccgtacactgtttgggaacaagattaaatctgtggcgaaacgtgcattcagtggtttggaaggcttggaacatcttaatcttggtgggaatgccattcggtctgtgcagttcgatgccttcgtgaaaatgaaaaacctgaaggagctccatatctcctccgatagctttctttgcgattgtcaattaaagtggctacctccctggctgattgggcgaatgctacaagctttcgtgacagccacctgcgctcaccccgaatctctgaagggtcagtccatatttagcgttccgccagagtcctttgtatgcgatgacttcctgaaaccacagatcatcacacagccagaaaccacaatggcgatggtcgggaaggacatccgctttacgtgtagcgcagcttcttcctcaagcagtccaatgaccttcgcatggaagaaagataatgaggtgctgactaatgctgatatggaaaatttcgtgcatgtgcatgcccaggatggagaggtgatggagtacacaacaatcctccaccttagacaggtgaccttcggccacgaagggcgatatcagtgtgtcattaccaatcacttcgggtctacttacagccacaaggccagactcaccgttaacgtgttaccttcttttacaaagactccccacgatattactattcggaccaccactatggctagactggagtgcgctgcaacggggcatcccaacccgcagattgcctggcagaaggacggcggaacagattttcccgcagcgcagacgcctagccttgtggtgccactcgaagaccgggtcgtaagcgtgggcgagactgtcgctctacagtgcaaggcaaccggcaatccgcctcctagaataacatggttcaagggcgatcgccctctgtccttaacggaacgccatcacctgacacctgataaccaattgcttgtagtgcagaacgtggtcgccgaagatgccggtaggtacacctgcgaaatgtcaaacacacttggaaccgagagagcacacagtcagttaagtgtgctgcctgccgcaggctgtcggaaggacggtacaactgtcgggatattcactattgcagtggtttcaagcatcgttctgacgagcctcgtctgggtgtgtattatttatcagacccggaagaagagcgaagagtactcagttaccaatacagacgagaccgtggttccgccagatgtgccctcctacctctcaagtcaaggcaccctgagcgatcgacaggaaactgtcgtgcgaaccgaaggaggcccacaggccaatggccatatcgagagcaatggcgtttgccccagagacgcttcacacttcccagaaccagatacccattctgtggcatgccgccagcccaaactgtgcgctggctccgcttaccataaagagccatggaaggctatggaaaaagcagagggcaccccagggcctcataagatggagcacggcggacgcgtcgtgtgcagcgactgcaatactgaggtcgactgctactcgcgcggacaggctttccacccgcaacccgtttcacgcgacagtgcccaaccctctgcaccaaacggccctgaaccaggaggcagcgatcaggagcactctccccaccatcagtgcagtaggacagccgctggatcctgccctgaatgtcaaggtagcctttatcctagcaatcacgatcgcatgttgacagctgtgaaaaaaaaaccaatggcatcactggacggcaaaggagactcttcatggactctggcacgactgtatcacccagacagtacagaactgcaaccagcatcttccttgacctcagggagcccagagcgcgctgaagcccaatacctcctggtatcaaacgggcatctgcctaaggcctgtgacgcctctccagaatcaacaccgctcactgggcagctgccgggtaagcagagagtgccattacttctggccccaaagtcctag

SEQ ID NO: 228393 - DNA, 3198 bp, synthetic construct
  misc_feature 1..3198: note = Description of Artificial Sequence: Synthetic coding sequence
  source 1..3198: mol_type = other DNA
atggccccagcaccactcggtgtgccagaagaacaactgcttgggtgcagaagcagagtgctttctagattattgttcatcgcacagaccgcactcctgctgctccctgctgctggcgctggcttgtgtccagccccatgttcatgtcgaatacccttacttgattgctcccgccgaaagcttccagctccaagctggcgggcacttagcgggctgctaccccctgacacagctatcctcgatttcagccacaataggctgtccaactggaacatctcactcgagtcccagaccctacaagaggtgaaaatgaattataacgagcttactgaaatcccttactttggagaacccacttcgaatattactctcctgtccctggtccacaatatcataccagagattaacgcccaagccctgcagttctatccggcattggaaagtctggacttgtcgagcaatatcatcagcgaaataaaaacgtctagcttccctagaatgcagctcaagtatctgaatctgtctaacaatcgtattacaacactggaagccggatgttttgacaaccttagcagctcactccttgtagtgaaactgaaccgaaaccggatgtccatgattcctccaaaaatttttaaactccctcacctccaattcctcgaactcaagagaaataggatcaaaatcgtagagggactcacatttcaggggctggactctctgcgctctctcaagatgcagcggaacggcattagcaagttgaaggatggcgcattttttggattaaacaacatggaggaactggaactagaacataataatctgacccgcgtgaacaaggggtggctgtatggactgagaatgctacagcagctgtacgtgagccaaaacgcgattgaaagaatctctcctgacgcatgggagttctgccaaaggctgtctgaactagacctgtcctacaatcagctgactcggctggacgaatcggcgtttgtagggcttagtctgctggaaaggctcaatctgggagataatcgcgtaactcacattgctgacggcgtgtttcgctttcttagtaacttgcagaccttagatctgagaaataacgagattagctgggctattgaggatgcatctgaagccttcgcaggactgacctccttgacgaagttaattctgcagggcaaccaaataaaatcgataacaaaaaaggcctttattggactggaaagtctggaacacctggatctcaataacaacgcaattatgtccatacaagaaaacgctttctcccagacgcatctcaaggaactcatccttaatacatcctctctgctctgcgactgtcaccttaaatggctgctgcagtggctcgtggacaacaatttccagcattcagtcaacgtaagctgtgcccacccagaatggctggctggtcagagtattctgaatgtggatctgaaggacttcgtgtgcgacgactttcttaagccacagattcgaacacacccggaaacaattatcgctctaagaggtatgaatgtcaccctgacttgtactgccgtgtcatcttccgactcacccatgtctacggtctggagaaaagactcagaaattctgtacgacgtggatactgaaaatttcgtgagatactggcagcaggctggtgaggcacttgagtataccagcatcctgcacctgttcaacgtcaactttacggatgaaggcaagtatcagtgtatcgtaaccaatcatttcggctcaaattacagtcagaaggcaaaactgactgtaaatgagatgccatcctttctcaagaccccgatggatcttacgattaggacaggtgctatggccaggttagaatgtgcagccgaaggtcaccctgcaccccagatatcctggcagaaagatgggggaaccgacttccccgctgccagagagaggaggatgcacgttatgccggaggacgacgtgtttttcatcgccaatgtgaaaattgaagatatgggaatctacagttgtatggcccagaacactgctggcggtttgtccgccaatgccagccttacggtcctcgaaaccccatccttcattaggccactcgaggacaaaacagtaacccgcggtgagactgcggttctgcagtgcatcgctggagggtcccctgcaccgaggctgaactggaccaaagatgacgggcctctcctggtgacagagaggcacttctttgcagctgcgaaccaactgctgattattgtggacgcgggactggaagacgccggtaaatacacctgcataatgtctaacactttggggacagagcgcggacacatttacctgaacgtcatctcatcaccaaattgtgacagtagccaatccagcataggtcacgaggacgacggttggaccacggtgggcatcgtgatcattgtggtggtgtgttgcgtcgtgggcacatccctgatttgggttatcgtcatttaccacatgagacgtaaaaacgaggactactctattacgaatacggaggaactgaatttacccgctgatatcccttcttacttatcctctcaggggaccttgagcgaaccccaggaaggttactctaattccgaagccggttcacatcagcagcttatgccccctgcgaacggatacatccacaagggtacagacggcggtaccgggacaagagttatttgtagcgattgttatgataatgcaaatatttactcaagaacaagggagtactgcccatatacctacatagcagaagaggatgtgctagaccagacgctgtctagtctgatggtacagatgcctaaggagacctacttagtgcacccccctcaggacaccaccgcactggaatcactcataccctcagccaatagagaaccttctgcctttccaaccaaccacgaacgaatatcagaaaaaaagctcccgtctacccaaatgagcggggaaactctccagcgtccagtgtggaacattaacagagaactgggccttcctcatcctccattttcccagcaaccggtccacgaatcaccgcaactccatcagaatgagggactggctggccgagagccagattgcagtgctagcagtatgtcatgccatcgtctgcaagaccacgcttttgacttctcccggactagaaacatccaggatggctccgaaggcacatag

SEQ ID NO: 228394 - DNA, 876 bp, synthetic construct
  misc_feature 1..876: note = Description of Artificial Sequence: Synthetic coding sequence
  source 1..876: mol_type = other DNA
atggaaagtgagcggtcgaagcggatgggcaacgcatgcatcccactgaagagaattgcctacttcctatgcttgctgagtgccctgctcctgaccgaaggtaagaagcccgcaaagccgaagtgccccgcagtgtgtacgtgtacaaaggataacgcactatgtgagaatgcaaggagcatccctcgtacagtgccaccagacgtgatcagtctgtcctttgtccggagtgggtttacagaaattagtgagggatctttcctgttcacacctagtctgcagctgcttctcttcacatcaaattcttttgatgtaattagtgacgacgcattcatcggattaccccacctggagtatctattcatcgagaataataacatcaaatcaatcagtcgtcacacattccgcggactgaaaagcctgatacatctgtctttggcaaacaataatttgcagactcttccgaaagatatttttaaggggctggatagtctcaccaatgttgacctgaggggcaattctttcaactgcgattgtaaacttaaatggttagtcgaatggctggggcacaccaacgcgacagttgaggacatctactgtgagggaccgcctgagtataaaaaaagaaaaataaacagtctgtccagcaaggacttcgattgcataattacggagttcgccaagtcacaggacctgccataccagagtctgtccatcgatacttttagttacctgaatgatgaatatgtggtgatcgctcagcccttcaccggcaaatgtatattcctggaatgggatcacgtcgagaagactttccggaattacgataatatcacagtgctgcgggagattcaccgcttcacgaacatgtcatag

SEQ ID NO: 228395 - DNA, 1674 bp, synthetic construct
  misc_feature 1..1674: note = Description of Artificial Sequence: Synthetic coding sequence
  source 1..1674: mol_type = other DNA
atggaaagcgagcgttctaagcgcatgggcaacgcttgtatcccactgaagcgaatagcgtattttttatgcctgttgagcgccctcctgttaacagagggcaaaaagcctgccaagcctaagtgcccagcagtttgtacttgcacgaaggataacgccctgtgcgagaacgccagaagtatccctcggaccgtccccccagacgtgatttccctttcctttgtgcgttctggcttcaccgagatcagtgaaggaagcttcctttttactccctcactgcaactgctgctttttacctcaaatagctttgacgtcatctcagatgatgcctttatcggattgccccacctagaatacctgtttattgaaaataacaacattaagtccatctctcgacacacctttcgcggtctgaaaagtctgatccacctcagcttggcgaataataacctgcagaccctgcctaaggacatattcaagggacttgacagcctgacgaacgtcgacctcaggggcaattcattcaattgcgattgtaaactgaaatggctggtggagtggctagggcacaccaatgccaccgttgaggatatctattgcgaaggtcctcccgaatataagaaaagaaagatcaatagtctttcctcaaaggattttgattgcatcattaccgaatttgctaagtcccaggatctgccctatcagtcactgtcaatcgatacattttcttatctcaatgatgaatatgttgtgatcgctcagccattcactggtaagtgcattttcctagagtgggaccatgtggagaaaaccttccggaattatgataatattacggggacaagcacagttgtgtgtaagccaattgtcatcgaaacccaactgtatgtgatcgtggcccagctcttcggaggatctcatatctataaacgtgattcctttgcaaacaaattcatcaagatacaggatatcgagattctgaaaatccgaaaacctaatgatatcgagacttttaagattgagaataactggtatttcgttgttgcggatagttctaaggccggatttacaactatatataaatggaatgggaatggcttctatagccaccagagcctgcatgcttggtacagggataccgacgtcgagtatctggagatcgtcaggacgccacagacacttcgtactcctcatttaatcctgagctcaagttctcagaggccagtgatctatcaatggaacaaggcgacccagttatttactaaccaaacagatattccaaatatggaggatgtgtatgccgtgaaacatttctctgtgaagggggatgtctatatttgtctaactcgattcattggtgactctaaagtaatgaaatggggtgggagttctttccaagatatccaacgcatgcccagccgaggttcaatggtgttccagcccctgcagatcaacaactaccagtacgccatcctggggtcagactactcatttacacaggtctacaactgggacgctgagaaggctaagttcgtaaagttccaggagctcaatgtgcaggcacctcgcagttttacacacgtttccatcaataaacggaattttttgttcgcttcctccttcaaagggaacacccaaatttacaagcatgttattgttgacctctcagcatag

SEQ ID NO: 228396 - DNA, 1530 bp, synthetic construct
  misc_feature 1..1530: note = Description of Artificial Sequence: Synthetic coding sequence
  source 1..1530: mol_type = other DNA
atggaaagtgaaagatcaaagagaatggggaacgcgtgcatccccctaaagcgaatcgcttattttctctgtctgttatctgccctcctgctgaccgaaggtaagaagcccgcaaagcccaagtgccctgcagtgtgtacctgcaccaaggataatgccctatgcgagaacgctcgctcaatcccgcgaacagtgccacccgatgtcatatcattgtcatttgtgaggagcggttttaccgaaatctcagagggatctttcctttttacaccttccctccagctcctcagtctggctaacaataaccttcagacactgccaaaagacatctttaaggggctcgactcactcacaaatgtggaccttaggggaaacagctttaattgcgactgtaagctgaaatggctggtagaatggctgggacacacgaatgctacggtggaagatatctactgtgaggggccaccagagtacaaaaagcgcaaaatcaattcattatcctctaaggactttgactgtatcattacagagttcgccaagtctcaggatctaccatatcagtccctctcgatagataccttctcctatttaaacgatgaatacgtcgtgatagcccagcccttcacaggcaaatgtattttcctggagtgggaccatgtggagaagacatttcggaattacgacaatatcaccggcacgagcacagtggtctgcaagcctatcgtgattgaaacccagctgtacgtaatcgtcgcccagctgtttggtggcagtcacatttataaacgagatagctttgctaacaagttcataaagatccaggatatcgaaatcctcaaaattcgaaaaccaaacgacatagagacattcaagattgagaataactggtactttgtcgtggcagacagctctaaagccggatttacaacaatttacaagtggaacggtaacgggttctactcacaccagtcattgcacgcctggtatagagacacggatgtagaatatctagagatagtccgcaccccccagaccctccggacaccacacttgattctaagctcgtccagtcagaggcctgttatttatcagtggaacaaggccacccaattgtttacaaatcagaccgatatacctaacatggaggacgtatatgctgtgaagcatttttccgtaaagggtgatgtgtacatatgtttgacccgctttatcggcgattccaaggtcatgaaatggggcggttcttcattccaggatatccagcgcatgccttcaagaggatctatggtcttccagcctcttcagatcaacaactatcagtacgcaatccttggaagcgattactctttcacgcaggtgtacaattgggatgccgagaaggcaaagtttgtgaaattccaggagcttaacgtccaagccccaaggagcttcacgcatgttagcataaataaaagaaactttctgttcgcatctagcttcaaaggcaatacgcagatctacaaacacgtaatcgtcgacttatccgcctag

SEQ ID NO: 228397 - DNA, 777 bp, synthetic construct
  misc_feature 1..777: note = Description of Artificial Sequence: Synthetic coding sequence
  source 1..777: mol_type = other DNA
atgtctgcctacccgaaaagctataaccccttcgacgacgatggcgaggatgagggagccaggccagccccatggcgagacgcacgcgatctgcccgacgggcctgatgctcctgcagaccggcagcaatacctccgtcaggaagtcctgcggagagcagaagccactgcagccagcacatcacggtcattggctttgatgtatgagagcgagaaggtcggcgttgctagtagtgaggagctagccaggcagcgcggagttctcgagagaacagaaaagatggtcgataagatggatcaggacttgaagatcagccagaagcatattaattctattaaatccgtctttgggggactggtcaactacttcaaatctaaaccagtggagacgcctcccgaacagaacggaaccctgacaagccaacccaacaacagattaaaggaggccatctccacatctaaagagcaggaggccaaataccaggcaagccatcctaatcttcgaaagctggacgataccgacccagtgccgaggggagcaggctccgccatgtcaactgacgcttacccaaagaatccacatcttagggcgtatcatcaaaaaatcgacagcaatctggacgagctcagtatgggccttggacgccttaaggatatcgccctgggcatgcagactgagattgaggagcaggatgacatcttggatcggctgaccacaaaagtagacaagttggatgtgaacattaagtctacggaacggaaagtaagacagctgtag

SEQ ID NO: 228398 - DNA, 2466 bp, synthetic construct
  misc_feature 1..2466: note = Description of Artificial Sequence: Synthetic coding sequence
  source 1..2466: mol_type = other DNA
atggcaggcccagggtcaacgggcggtcagatcggagcggctgcgctggctggaggagctcgctctaaagtagcccctagtgtggatttcgaccactcatgctctgatagcgtcgaatatctcacactgaactttggaccttttgagacagtgcaccgctggagacgactccccccttgtgacgagttcgttggagcacggaggtcgaaacatacagtcgtggcctacaaagacgccatatatgtgtttggcggagacaacggtgcatttacaacaggaaccccccctgcccctcggtaccaccactccgccgtcgtgtacggatcctccatgtttgtattcggcggatacaccggcgacatttattcaaactcaaatctcaagaataaaaacgatctgttcgagtataagttcgccaccggacagtggactgagtggaaaatagagggccgattaccggtcgccaggtctgcacatggcgctacagtttattcagataagctttggatattcgccggatacgatggcaacgctcggttgaatgacatgtggactatcggattgcaggaccgcgagcttacatgttgggaggaagtcgctcagtctggggagattcccccatcttgctgtaacttccccgtggcagtgtgcagggataaaatgttcgtgttcagcggccaaagtggggctaagatcacaaacaacctttttcaattcgagtttaaggataaaacatggacccggattcccacagagcatctcttgagaggctctccacctccgcctcagcgtcggtatggccacacaatggttgcgtttgaccgccacctgtacgtatttggtggcgctgccgataacactctccctaacgaattacattgctatgatgtggatttccagacttgggaagtggtccaacccagctcggattcagaggttggaggcgcagaggtgccagagcgagcatgtgctagcgaggaggtgcccacgctcacttacgaggaacgggtcgggtttaaaaagtcgcgtgatgtctttggactcgattttggaacaaccagcgctaaacagccgacccaacctgcgtcggaactgcctagcgggagactgttccacgccgctgcagtcattagcgatgccatgtatatctttggagggaccgtggataacaacatacgttcgggcgagatgtaccggtttcagttttcatgctaccctaaatgcacactccacgaggattatgggagactttgggagtctagacagttctgtgacgttgagtttgtgctgggagagaaagaagagtgtgttcagggtcacgttgcaattgttactgcaagaagtcggtggctcaggcggaagatcacacaagcacgcgagaggctggctcagaaactggaacaggaggccgctcctgtgcccagggaggccccaggagtcgccgcaggtggggctcgccctcctctgttacatgttgccatccgggaagctgaggccaggccctttgaggtactgatgcaatttctgtacactgataagattaagtatccccgaaaaggccatgtagaggacgtgttactcatcatggacgtctacaagcttgcgctcagcttccagttgtgccgccttgagcagttgtgtcggcagtacatcgaggcctcggtagatttgcagaacgtgctagtggtgtgtgagagcgccgctcggctgcaattgagccagttgaaagagcactgtttgaacttcgtggttaaggagtcgcacttcaaccaggttatcatgatgaaagaatttgagcggctgtcttctccactgattgtggagatagttcggagaaaacagcaacctccgcctcgcacacctttggaccagcccgtggacatcggtacttcgttgatccaggatatgaaggcgtatctggaaggggctggggctgagttctgtgacatcaccctgttgctggatggtcatccgcgtcccgctcataaggctattttggcagcccgatcctcctacttcgaggctatgttccgaagctttatgcctgaggatggacaggtgaacataagcatcggagaaatggtgccttctcgacaagcatttgagagcatgctacgttacatttactatggggaagtgaacatgcctccagaagatagcctgtatctgttcgcagccccatattattatggcttctataataaccgactccaggcctactgcaaacagaatctggagatgaatgtgactgtgcaaaatgtactgcagattcttgaggctgcagataaaacccaggcgctggatatgaagcggcactgcttacatattattgtccaccagtttactaaagtgtccaagctcccaacactacggtcactcagccagcaactactcctggacattatcgacagcttggccagtcacatctccgacaagcaatgtgctgaactgggcgctgatatttag

SEQ ID NO: 228399 - DNA, 2400 bp, synthetic construct
  misc_feature 1..2400: note = Description of Artificial Sequence: Synthetic coding sequence
  source 1..2400: mol_type = other DNA
atgaattacgaccccatcgtctccaaggtggcagaagtgctagcaagcggcagagccattcgcaagcgcgaggttgagaggagtaagcacactgttgtagcttataaggacgccatctatgtgtttggcggagacaatgggaaaacaatgctgaacgatcttctcaggttcgacgtaaaggactgcagctggtgccgggcatttaccacaggcactcctccggctccaagataccatcattctgcggtcgtatacggaagttctatgttcgtgttcggcggatatacgggagacatctatagcaacagcaacttgaaaaataagaacgatctgttcgagtataaattcgccactggacagtggacagagtggaaaattgaaggcaggttgccagtcgccagaagcgctcatggcgcaaccgtgtacagtgataagctgtggatcttcgcgggatatgatggcaacgctcgtctgaatgacatgtggacgatcggtctgcaagatcgtgaactcacgtgttgggaagaggttgctcaatctggtgagattcccccatcgtgttgtaacttcccagtggccgtctgccgagacaagatgttcgtgttctctggccagtcaggagccaagattaccaacaatctcttccaatttgagtttaaggacaaaacctggacacggattcccaccgagcacctgctgaggggtagtccaccccctccacagcggaggtatggacatacgatggtggcctttgacagacacctctatgtgtttggcggtgccgcagataacacactgcctaacgagctgcattgctacgatgtggatttccagacttgggaagtcgtccagccgtccagcgatagcgaggttggcggagcagaggtgccagagcgcgcatgcgcctccgaagaggttcctacgttaacctatgaggaaagggtcgggttcaagaaaagtagggatgtgttcggattagactttggcaccacgagcgccaaacaaccgacacagcccgcatccgaattaccctctggcagactcttccacgctgcggctgtgatctccgacgccatgtacatctttggagggactgtcgacaacaacattagatctggggagatgtatcgatttcagttcagctgctaccccaaatgtacccttcacgaggactacgggagattgtgggaatcccgtcagttttgtgatgttgagtttgtcctcggcgagaaagaggagtgcgtacagggtcacgtggcaatcgtcaccgctcgatctagatggctccggcgtaaaataactcaggcccgtgaaaggctggcacagaagctggagcaggaagccgcaccggtaccccgagaagcgcctggggtggcggcaggaggcgcacggccaccgctgcttcatgtcgctattcgagaggcggaagccaggcccttcgaggtgctgatgcagtttctctatacagacaaaattaagtatcctaggaagggtcacgtggaggacgtgctacttatcatggacgtatataaattagcactgtcattccagctgtgtcggctggagcagctttgccgccagtacattgaagccagcgtcgacttacaaaacgtgctggtcgtgtgcgaatccgctgcccgactccagctctctcagctgaaagaacattgcctgaactttgtggtgaaggagagtcattttaatcaagttattatgatgaaggagttcgagcggttgagtagtcctctgatcgtggagattgtgcgacgtaaacaacaaccacctccgaggacccctttggatcagccagtggacattggtacctcactgattcaggatatgaaggcctatttagagggcgctggcgctgaattttgtgacattacgctcctcttggacggacatcctaggccagctcataaggctatcctcgcggctaggtccagctattttgaagcgatgtttcggtcattcatgcccgaggacggccaggtaaacatcagtattggtgagatggtgccttcccggcaggccttcgagtctatgctccgatacatctattatggagaagttaacatgcctcccgaggacagcctctacctgttcgccgctccttattactacggcttctacaacaacagattgcaagcctactgcaaacagaaccttgagatgaatgtcactgtccagaatgttttacagatattagaagctgctgataaaacacaggcgctcgatatgaagaggcactgtctgcacatcattgtgcaccagtttacaaaagtgagcaagctgcccacgctgcgatctttgtctcagcagctcttactggacatcattgattcgctggcctctcacatctcagacaaacaatgtgcggagctgggggctgatatctag

SEQ ID NO: 228400 - DNA, 1560 bp, synthetic construct
  misc_feature 1..1560: note = Description of Artificial Sequence: Synthetic coding sequence
  source 1..1560: mol_type = other DNA
atgtcttatccacagttcggctatccttatagttccgctccccagttcttgatggctacaaattcgctgtctacatgctgtgagagcgggggacggactcttgccgacagtggaccagctgcaagcgcccaggccccagtttactgccccgtttatgaatccaggctgcttgcaactgctcgccatgaactgaacagcgccgcagctctcggtgtgtatggcggaccctatggtggctcccaggggtatggcaactacgtcacatatggatctgaagccagcgcgttctattctctgaatagctttgacagtaaggatggaagcgggagcgcccatggtgggttggcgcctgccgcagcagcttactacccatacgagcccgctctgggccagtatccctatgaccgatacggcacaatggacagcgggactcggagaaaaaatgccacccgggagaccacgagtacactcaaagcatggctacaggaacacagaaagaacccgtaccccactaagggggagaaaattatgctggccatcatcacaaaaatgacactgacccaagtgtcaacctggttcgcaaatgccagaaggcgtctcaagaaggaaaacaaaatgacttggccgccacgtaataagtgtgcagacgagaaaaggccctacgctgaaggcgaggaggaggaaggaggagaggaggaagccagggaagagccacttaaatcatctaagaacgctgagcctgtaggaaaggaggaaaaggagttagaactttctgatctcgacgattttgaccctctcgaggctgaaccccctgcctgcgagctcaaacccccatttcactcactcgatgggggtctggagcgtgtcccagctgcacccgacggacctgtgaaagaagcatcaggcgctctacgcatgtcattggccgctggcggaggcgctgcgcttgatgaggacttggagcgcgcaagatcctgtttacgcagcgccgctgcaggtcctgaaccactcccaggtgctgagggaggtccgcaggtgtgcgaggccaagctgggctttgttccagccggtgctagcgccggattggaggctaagcctcgcatctggtctctcgctcacaccgctactgccgcagccgctgcagcaacgtcacttagccagaccgagttcccatcatgcatgcttaaacgtcaggggcctgctgccccagctgctgtctcatctgcgccagcaaccagcccttccgtcgctttaccccacagtggggctctcgataggcaccaggattcccctgttacttccttgaggaactgggtggatggtgtgtttcacgatcccatcttgcgccattccactttaaatcaggcatgggctacagccaaaggcgctcttttagaccctggccctttgggcaggtctttaggcgctggcgctaatgtcctcacggccccattggcaagggccttccctccggctgtcccccaggacgccccagctgccggagctgccagagaacttcttgccctgcctaaagcaggcggaaaaccattttgcgcatag

SEQ ID NO: 228401 - DNA, 3036 bp, synthetic construct
  misc_feature 1..3036: note = Description of Artificial Sequence: Synthetic coding sequence
  source 1..3036: mol_type = other DNA
atgatcgagaacagcatgttcgaagaagagcccgatgtggtggatctggccaaggagccttgtttgcacccacttgaacccgatgaagtggaatatgaaccaagggggtcgcgactcctcgtgcggggactcggagaacacgagatggaagaggacgaagaggactacgagagctctgcaaagctactcgggatgtctttcatgaatcgctcctctggattacggaattcagccactgggtaccgacagagtcccgatggcgcttgctcagttccctcagcccgaaccatggtggtctgtgcctttgtaatcgtcgtggcggtttctgtgattatggtcatttacctgttgccgcgttgcacttttacaaaggaggggtgtcataagaagaaccaatcgatcggcttaattcagcccttcgctacaaatgggaaactatttccttgggcccagataaggctccctactgccgtagtgccacttcgttatgagctgtccctccatcccaacctgacctcgatgaccttcagaggctcggttactatatccgtgcaggcccttcaggtgacgtggaacataatactccatagtaccggccataatatttccagagtgacgttcatgagcgcagtttcctctcaggagaagcaggccgagattctggagtatgcatatcacgggcagatagcaattgttgcccctgaggctctacttgccggacacaactacacccttaaaatagaatatagcgcgaacatcagtagttcctactatggcttttatggcttctcttacactgacgaatcaaacgaaaaaaaatatttcgcggcaacgcagtttgagccattggccgctcggagcgctttcccctgctttgatgagccagcctttaaggccacattcatcattaaaatcataagggacgagcagtacacggccttgagcaacatgccaaaaaaaagcagtgtcgttcttgacgatggtctggtgcaggatgagtttagcgagtcagttaagatgagcacatacttagtagcatttatcgtgggcgagatgaaaaacctttcccaagatgtgaacggaacactcgtgagcatctacgctgtacctgaaaaaattggccaggtgcattatgcactggagactactgtgaaactacttgaattcttccagaactattttgagatccagtaccctctgaagaagttggaccttgtggccattcccgacttcgaagccggagccatggaaaattggggcctgcttacattccgggaggaaaccctgctgtacgacagtaatacatcttcaatggccgacaggaaactggtgaccaagatcatagcccacgagcttgcacatcaatggtttggaaaccttgtcaccatgaagtggtggaacgacttatggctgaatgagggcttcgccacatttatggaatatttcagcctggagaagatatttaaggagctgtcctcttacgaagactttctagacgctagatttaaaactatgaagaaagatagccttaacagcagccacccaatttcttcttccgtacagtcaagcgaacagatcgaagagatgtttgacagcctctcctacttcaaaggttcgtcacttttactcatgcttaaaacatatctgagcgaagacgtgtttcaacacgcagttgtcctttatcttcataaccatagctatgctagcatacagtcagatgatctctgggatagcttcaatgaagtgacgaatcaaacactggacgtaaaacgaatgatgaagacatggacactccaaaagggattccccttggtgacagttcagaagaaggggaaggaactctttatacagcaggaaaggtttttcttaaatatgaagccagaaatacaaccgagcgacacgagttacttgtggcatatcccacttagctacgtgacagagggcagaaactactctaagtaccagagcgtcagtcttctcgataaaaagagtggcgtgattaacctgaccgaggaagtgctgtgggtgaaggttaatattaacatgaatggctattatatagtccattacgcggacgatgattgggaagctctcatccatcagttgaagataaatccatacgtattgagcgacaaggaccgggcaaatcttattaacaacatattcgaactagctgggctgggtaaggttcccctgaagcgggcattcgatctgattaattatttaggcaatgagaaccatacagccccaatcaccgaggccctgttccaaaccgacttaatatataacctcctcgagaaacttggatacatggacctcgcctctaggctggtaacccgtgtgttcaagcttctccagaaccaaatacagcagcagacctggaccgacgaaggtaccccatctatgagagaactgaggagcgctctcctcgagtttgcttgtacgcacaacctggggaattgtagtaccactgccatgaaactctttgacgactggatggcttctaatggaacccagtccctgcccaccgacgtaatgacgaccgtgttcaaagtgggggcaaagacagacaagggttggtcgtttttactggggaaatacatttcgatcggttctgaagccgagaaaaataagatccttgaggccctagcgagctctgaagacgtccggaagttgtactggctgatgaagagtagccttaatggggacaatttccgtacccagaaactgagcttcataattcggaccgtgggcaggcactttccaggtcatctgctggcatgggactttgttaaggaaaactggaacaaacttgtacagaagttccctctgggctcgtacaccattcagaatatcgtggccggaagcacatacctgtttagtaccaaaacccacctgtctgaggtacaggccttttttgagaatcagtccgaggctacgtttcgactgcgatgcgtgcaagaagctctggaggttatacaattgaacatacagtggatggagaaaaacctgaaatccctgacatggtggctctag

SEQ ID NO: 228402 - DNA, 3450 bp, synthetic construct
  misc_feature 1..3450: note = Description of Artificial Sequence: Synthetic coding sequence
  source 1..3450: mol_type = other DNA
atggctgagcgtaagggtaccgcaaaagttgatttcctgaagaaaatcgaaaaagaaattcagcagaaatgggatacagaaagagtattcgaggtcaacgcaagtaatcttgagaaacagactagcaaagggaagtacttcgtcacctttccttacccttacatgaacggcagactccacctggggcacactttcagtctctctaaatgcgaggcttgtgccgataaactcaagcgggaaattgaactctacggatgccctcctgacttccctgatgaggaggaggaagaggaggaaactagtgtcaaaactgaagacataataatcaaagacaaagcaaaggggaagaagagcaaagctgctgctaaggctggtagtagtaaataccagtggggcataatgaaaagcctgggccttagcgacgaggagattgtgaagtttagtgaggctgaacactggctggactacttcccgcctctggccatccaggacctgaaaagaatgggcctgaaggtggattggcgccgtagctttatcaccaccgacgtgaatccttactacgactcctttgtgagatggcaattcttaacgctccgggagcggaataagatcaaatttggcaagaggtacaccatttatagccccaaggacgggcagccgtgcatggatcacgatcgacaaacaggcgagggagtagggccacaagaatacactctgttgaagctgaaggtgttggaaccgtacccgtcgaagttgtccggtctcaaagggaagaatattttcttagttgccgctaccctgcgacctgaaaccatgttcgggcagacgaactgctgggtgagaccagacatgaagtacataggattcgagacggtcaacggagatatcttcatttgcacccagaaagcggctcggaatatgagttaccagggcttcacgaaggacaacggtgtcgtaccagttgtgaaagagcttatgggggaggaaatcctcggagctagtttatctgccccactcacaagttataaggtcatctatgttctgcctatgctgacgatcaaggaggacaaggggaccggtgtggtgacttctgtaccatcagacagtcccgatgatattgccgctctccgtgatctgaagaagaagcaggctctaagagctaaatacggtattcgcgatgatatggtgctccctttcgagccggtacccgtgattgagatacctggattcggcaacctgagcgccgtgaccatatgcgatgagttgaaaattcagagccaaaatgacagggagaaattggccgaagccaaagagaagatttacctgaaaggattctatgagggcattatgctggtcgacgggttcaaaggccaaaaggtgcaggacgtcaaaaagactatacagaagaagatgatcgacgccggagatgccctcatctacatggagcccgagaagcaggttatgtctaggagttctgatgagtgcgttgtggcactgtgcgaccagtggtacctggactatggcgaggagaactggaagaagcagacaagccagtgtctcaaaaatctggaaacattctgtgaagagaccaggcgcaacttcgaggccactctcggttggctccaggagcacgcctgcagcagaacatatggactaggtactcatctgccatgggacgagcagtggctgattgaaagcctgagcgattccactatctacatggccttttataccgtagcgcacctgctgcaagggggaaacctgcacgggcaggctgagagcccactgggcatccgccctcagcagatgactaaagaggtgtgggactacgtgttctttaaggaagcccctttccccaaaacacagatcgccaaggagaaactcgatcaactgaaacaggagttcgaattttggtatcctgtagacttgagggtttctgggaaagacctagttcctaatcatctgtcttactacctatacaaccatgtagcaatgtggcctgaacagagtgacaagtggccaacagctgttagggccaacggacatctgctgctcaacagcgaaaaaatgtccaagagcaccggtaattttctgacgctgacacaagccatcgacaaattctcagccgacgggatgcggctggccctcgctgacgccggtgacaccgtggaagatgccaacttcgtcgaggctatggccgacgcgggaatcctaaggctctacacttgggtggaatgggtaaaggagatggtggcaaactgggattccctgagatctggccctgcttctacatttaacgatcgggtgttcgcctccgaattgaacgccggaattatcaaaacggatcagaactacgagaagatgatgtttaaagaggcccttaagaccggatttttcgaattccaagctgcaaaagacaaataccgcgagctcgctgtggaaggcatgcaccgtgaattggttttccgctttatcgaagttcagactctgctgctggccccattttgtccccacctttgcgagcatatctggactctgctaggaaaaccggatagcatcatgaacgcgagctggcccgtggcgggacccgtgaatgaagtgctgatacactcatcacagtatctgatggaagtcactcatgatttgaggcttaggcttaaaaattacatgatgcctgccaaaggtaaaaaaaccgacaagcagccgctccagaagccaagtcactgtactatttatgtggccaagaactaccctccttggcaacacacaacactgtctgtccttaggaagcacttcgaggcgaacaacgggaaattgcccgacaataaggtgatcgcatcggagctggggagcatgcccgagctgaaaaagtacatgaaaaaggtgatgcccttcgtagccatgataaaagaaaatctggagaaaatggggccacgaatcctagacttgcagctggagtttgatgagaaagcggttctcatggagaatatcgtctacctgacaaatagtcttgagctcgagcatattgaagtgaagtttgcatccgaagccgaggataagatccgggaggattgctgtcctggaaaaccattgaacgtattcagaatcgaaccaggggtgtcagtgagcttggtgaaccctcagccatcaaacggtcatttttctacaaagatcgagatccggcagggtgataactgcgactccatcattcggaggcttatgaaaatgaaccgcggtatcaaagacctgagcaaagtgaagctcatgcggtttgacgatcccttgcttgggcctaggcgcgttcccgtgctcggaaaggaatatacagagaagaccccaatcagtgaacacgctgtgttcaacgtcgacttaatgtccaagaagattcatctcaccgagaacggtatcagagtggacataggggacacaattatctacctggtgcactag

SEQ ID NO: 228403 - DNA, 480 bp, synthetic construct
  misc_feature 1..480: note = Description of Artificial Sequence: Synthetic coding sequence
  source 1..480: mol_type = other DNA
atggcagaacgaaagggtacagccaaggtggactttctcaaaaagattgagaaggagattcagcagaaatgggatacggagagggtatttgaagtcaatgcctcgaatcttgagaagcagacatctaaaggaaagtactttgtcacctttccctacccgtatatgaacggcaggttgcatctgggccatactttctcactgtctaaatgcgaatttgccgtgggctatcagcggttaaagggtaagtgttgtctcttcccttttggactgcactgcaccggaatgccaatcaaggcttgcgccgacaagctcaagagagaaattgaattgtacggatgccccccagattttcctgacgaggaggaagaggaagaggagacttcagtgaagacggaggatatcatcatcaaggacaaagctaagggtaagaaatcaaaggccgctaaactggacctgctgaatacatctggagcactgtag

SEQ ID NO: 228404 - DNA, 3531 bp, synthetic construct
  misc_feature 1..3531: note = Description of Artificial Sequence: Synthetic coding sequence
  source 1..3531: mol_type = other DNA
atggccgagcggaagggtactgccaaggtcgatttcctaaagaaaattgagaaggagatccagcagaagtgggatactgagagggtgttcgaggttaatgcttcgaacttggagaagcagacatctaagggtaaatactttgtaacattcccttacccatatatgaatggcaggctgcacctggggcacaccttttccctttcaaaatgtgaatttgctgtggggtaccaacgcctcaagggaaaatgttgccttttcccttttggcctgcattgcaccgggatgcctatcaaggcctgcgctgacaaacttaaacgagagattgagttatacggctgtccccctgattttcctgacgaagaggaagaagaggaggagacgagcgtgaaaacagaggacatcatcattaaagacaaggcaaagggaaaaaagagcaaggcagcagcaaaggcaggtagctctaagtatcagtggggtatcatgaagtctcttggcctctctgacgaagaaattgtaaagttcagcgaggctgaacattggttagattacttccctcctcttgccatccaagatctaaagcggatgggactgaaggtcgactggcggcgtagttttattacaacggacgtgaacccctactacgactcctttgtgcggtggcagttcctgactctacgagaacggaataaaatcaagtttggcaagcggtacacaatctatagccctaaggacggccagccttgtatggaccacgataggcagaccggggaaggcgtaggtcctcaggagtatacccttttaaagttgaaagtgctggagccctacccttccaaactcagcggacttaaggggaagaacatttttctcgtcgccgcaaccctgaggcctgagaccatgtttggacagacgaactgttgggtacggcctgacatgaaatacataggcttcgaaactgtgaacggggacatatttatatgtactcagaaagctgctcgcaatatgtcttatcagggctttacaaaggataacggggtagtcccagtcgtcaaggagctgatgggtgaggagatcctcggagcctctctgtcagcgccattgacttcttataaagtcatctatgtcttaccaatgctgacaataaaggaagacaagggaaccggtgtcgttacttcagtgccctctgattctcctgatgatattgcagctctccgcgacctcaagaaaaagcaggccctgagggcaaaatacggcatccgggatgatatggtacttccctttgaaccagtgccagttatcgagatcccagggttcgggaatttgtctgctgttactatatgcgatgagttgaaaatacagtcacagaacgatcgcgagaagctggcagaggccaaagagaagatatacttaaaaggcttttatgaaggcattatgttggtggatggttttaagggacagaaggttcaggacgtaaagaagaccattcaaaagaaaatgatcgacgctggcgatgcactcatctatatggaacccgaaaagcaagtgatgagcaggagttcagatgagtgtgttgtcgctctgtgcgatcagtggtacttagactatggtgaagagaactggaaaaagcagacatcgcaatgcctaaaaaatctcgaaactttttgcgaagaaaccaggcgaaactttgaagcgaccctcgggtggcttcaagaacacgcctgttcacgaacctatggattaggaacccaccttccatgggacgagcaatggctgatcgagtcactgtcggactccacaatctacatggccttttatactgtagctcacctgctccagggcggtaacctacatggtcaagccgagtctcccctaggcatcaggccccagcaaatgacgaaagaggtgtgggattacgtcttttttaaagaagcacccttcccaaagacacagattgccaaggagaagctggaccagcttaagcaggaatttgagttctggtacccagtggacctgagggttagcggaaaagacttggtcccgaaccatcttagctactacctctacaatcatgtggctatgtggcctgaacaaagtgataagtggccgactgccgtgcgcgctaatgggcatttactgctcaattcagaaaaaatgagcaagtcaaccggtaacttcctgacccttacccaagccatcgataagttttctgccgatgggatgagattagccctggccgacgctggcgacaccgttgaggatgctaatttcgtggaggccatggcggacgcaggaattctgcggctgtacacatgggtggaatgggtgaaagaaatggtcgccaactgggactctttacgctccggaccggcaagtaccttcaatgatcgagtgtttgcctccgagttgaacgccggtataataaaaacagaccagaactacgaaaagatgatgttcaaagaggcgctgaagactggcttctttgagttccaggctgcgaaggacaagtacagagagctggctgtagagggcatgcatcgagagctggtgtttcgctttatagaggtgcagaccctattactggcacctttctgtccccatctctgtgagcacatctggacactcctggggaaacccgactctataatgaacgcctcgtggcccgtggcgggacccgttaacgaggtcttgatccacagctcccagtatcttatggaggtgacccatgatctgagacttagactgaaaaattatatgatgcccgctaagggcaaaaaaaccgacaagcagccgctccaaaaaccctctcactgcactatctacgtggctaaaaactacccaccgtggcagcatactacacttagtgtcttgaggaagcacttcgaggcaaacaacggaaaactgcccgataacaaggttattgcctcagagttgggctccatgccagaactgaagaaatacatgaaaaaggtgatgccttttgtcgcgatgataaaggaaaatctcgaaaagatgggccctaggattttggatctccagttagagtttgacgagaaggccgtgctgatggaaaacatcgtatatctcaccaacagtctggaactggagcacatagaggtaaagttcgcttccgaagcagaggataagatccgagaggattgctgtcctggtaagccattgaacgtgtttaggattgagcccggagtctccgtttccctcgttaacccacagccctctaacggccacttctctactaagatagagatcaggcaaggagataattgcgactcgatcattcgcaggctgatgaaaatgaatcggggtattaaggacctgtctaaagtcaaattgatgaggttcgacgatcccttgctcggcccacgaagggtgccagtgcttggcaaggagtataccgagaaaacgcccataagcgagcacgctgtgtttaacgtagatctgatgtcgaagaaaatccatctgaccgaaaatggtattcgcgtggacataggagataccattatctacttagtgcactag

SEQ ID NO: 228405 - DNA, 3369 bp, synthetic construct
  misc_feature 1..3369: note = Description of Artificial Sequence: Synthetic coding sequence
  source 1..3369: mol_type = other DNA
atgaacggacggctacatctcggtcacacatttagcctgagcaagtgcgagttcgcagtgggctatcagcggctcaaggggaaatgttgtctttttccattcgggctccattgtactggaatgccaattaaggcctgcgctgataaattgaagagagagattgaactttatggatgccccccagactttcccgacgaggaggaggaggaggaggaaacaagcgtgaagaccgaggatattatcataaaggacaaggcaaaggggaaaaagtctaaggccgctgccaaggccggtagctccaagtatcagtggggaattatgaaaagtctggggctgtcagatgaagagattgtcaagttttccgaggccgagcattggctggactactttccaccgctggcaatccaggatctcaagcgaatgggattgaaggtggattggagacggtctttcatcactactgacgtgaacccatattacgacagcttcgtccgctggcagttcttgactctccgtgagcggaacaaaatcaaattcggaaagagatataccatctacagtcccaaagacgggcagccatgcatggatcatgaccggcaaaccggagaaggggtcggaccccaagagtacactctcttgaagttgaaggttctggagccttacccctctaagttaagcggcctgaaaggcaagaatatctttttagtggctgcaaccctgagaccagaaacgatgtttgggcaaactaactgttgggtgagacccgatatgaaatacatcggatttgagaccgtgaatggagatatttttatttgtactcagaaagccgctaggaacatgagctaccaagggttcaccaaggataatggcgtggtcccggttgtcaaggagctgatgggggaggagatcttaggtgcctccctaagcgccccactcactagttataaagtgatttatgttttgcctatgttaaccattaaagaggataaaggcacaggcgtggtaacttctgttccctcagattctccagatgacatagctgctctgcgagacctaaagaaaaagcaggcgctgcgggcaaaatacgggatcagggacgatatggtgctcccttttgagcccgtgcccgtgatcgaaattcccggattcgggaacctgagtgccgtcaccatctgcgacgaactaaagattcaatcacagaacgaccgggagaagctagctgaggctaaagagaagatctatttgaagggcttctacgaaggtattatgttagtggacggatttaaaggtcagaaggtccaggatgttaagaagacgatacagaagaagatgatagatgctggcgatgccctgatctacatggaaccagaaaaacaagtcatgagcagatccagtgacgaatgcgtggtagccttatgcgatcaatggtacctagactatggggaggaaaactggaagaaacagacatctcagtgccttaagaacttggagaccttttgcgaagaaaccagacgcaactttgaggcgaccctcggctggctgcaggaacatgcctgctccagaacatatggcttaggtactcatctgccatgggatgagcagtggcttatcgagtccctatcagactccaccatatacatggctttttataccgtcgcccacctcctgcagggcggaaacctccatgggcaggctgagtccccactcggaatccgaccacaacagatgaccaaggaagtttgggattacgtgtttttcaaagaggcccctttccccaaaacacagatagccaaggagaaactcgaccaattgaagcaggagtttgagttttggtatccagtcgacctgagagtctccgggaaggatctggtccccaaccatctgtcctactacctttataatcacgtggcgatgtggcccgagcaatcagacaagtggccaacggctgtgagagccaacgggcacctcctgcttaactctgagaaaatgtccaagtccaccggcaacttcctgaccctgactcaggccatcgacaagttctccgccgatggtatgcgattagctctggccgatgccggagacactgtagaagatgcgaactttgtggaagcgatggcggacgccggtattctccggttgtatacatgggtagaatgggttaaggaaatggttgcaaactgggactccctgcgctccgggccagcctccactttcaatgaccgggtgttcgcgagtgagctcaatgcgggaatcataaaaacagaccagaactatgagaagatgatgttcaaggaagccctgaagacaggcttctttgaattccaggctgctaaagacaaatacagggagctggccgttgagggtatgcacagagaactggtgttccgttttatcgaagttcaaactctgctcctggcccctttctgcccccatctttgtgagcacatctggacgttgcttggaaaacctgatagcatcatgaatgccagctggccagttgctgggccagtgaatgaggttcttatccacagcagccagtacctgatggaggtaacacacgacctgcgcctccgactcaaaaactacatgatgcccgctaagggcaaaaaaaccgacaagcagcctttgcagaaaccgagccattgtaccatatacgtagccaaaaactatccaccatggcagcatactaccctgtctgtattgcgcaagcattttgaggcaaacaacggcaaacttcccgataataaggtgattgcgtcagaactgggcagtatgcctgagttgaagaagtatatgaaaaaagtaatgcccttcgtggccatgattaaggagaatctcgagaaaatggggcctcggatcctggaccttcagttggagttcgacgagaaggccgttttgatggaaaatatcgtatatctcaccaacagcttggagcttgagcacatcgaagtaaagtttgcgtctgaagctgaagacaagattagagaggattgttgtcccggtaagccactaaatgttttcaggattgagcctggtgtgagcgtgagtctagtcaacccccagcccagcaatggccatttcagtactaaaattgaaatccgccagggagacaactgtgactccatcatccgcagactaatgaagatgaaccgcggaatcaaagacctctctaaggtgaagctgatgcggttcgatgatccactgcttggtcctaggagagtgccagttctcggcaaggagtataccgaaaaaacgcctatctctgaacacgctgtatttaatgtcgaccttatgtctaaaaaaatccacctgacggaaaatggtatcagggtggacatcggcgatactattatttatcttgtgcactag

SEQ ID NO: 228406 - DNA, 372 bp, synthetic construct
  misc_feature 1..372: note = Description of Artificial Sequence: Synthetic coding sequence
  source 1..372: mol_type = other DNA
atgtggcccgagcagtctgataaatggcctacagcggtgcgggctaatgggcacttattgctcaactccgaaaagatgtcaaagtcaaccggcaacttcctaacgctaacgcaagctatagacaagttcagcgctgacggaatgagactggccctcgcagatgccggagacaccgtagaggacgcaaattttgtggaggctatggccgacgcaggaatcctccgtctctatacttgggtggagtgggtcaaggaaatggttgcaaattgggatagtttaagatccggtcccgctagcaccttcaacgacagagttttcgcgagcgagttgaatgcaggcatcatcaagacggaccagaccatgaaacggtag

SEQ ID NO: 228407 - DNA, 1458 bp, synthetic construct
  misc_feature 1..1458: note = Description of Artificial Sequence: Synthetic coding sequence
  source 1..1458: mol_type = other DNA
atgtggccggaacagtcagacaagtggccaaccgctgtgcgagcaaatggtcacttgctcctgaatagcgaaaagatgagcaagtccaccgggaatttcctaacactgactcaggctatcgataagtttagcgcagacggcatgcggctggctctcgccgatgcaggagacactgttgaggacgctaactttgtggaggccatggctgatgcagggattctgcgactgtatacttgggttgagtgggtgaaggagatggtggccaactgggattctctacgtagcggacctgcatcaacctttaacgatcgtgtatttgcttcagagcttaacgccggaattatcaagacggaccagaactacgagaaaatgatgtttaaagaagctctgaagacgggattcttcgaatttcaagccgctaaagataagtatcgtgagttagctgtggagggaatgcatagggaattggtgttcagatttattgaagtacagacccttctgctggcacccttctgtcctcatctttgcgaacacatctggacactgctggggaagcccgacagcatcatgaatgcgtcatggccagtggcaggtcctgtcaacgaggtgctcatccactctagtcagtatctgatggaagtgacacatgacctgcgcctcagactgaaaaactacatgatgccagccaaaggcaagaagaccgacaagcagcccctccagaagccctcacactgtacaatttatgtggccaagaattaccctccctggcagcatactacacttagcgtactgcgcaagcacttcgaagccaacaatggtaagctgccagataataaggtaatagcttccgaacttggcagtatgccggagctgaaaaaatatatgaaaaaggtgatgcctttcgtggcgatgattaaagagaacctggagaagatggggcctcggattctggatctgcagttggagttcgacgagaaggccgtgttaatggaaaatatcgtttacttaaccaactcgctggaactggagcatatcgaagtgaagtttgctagtgaagcggaggataaaatccgggaagattgctgtcctggcaaacctttgaatgtcttccgcatcgaaccaggcgtcagtgttagcttagtcaacccccaaccctctaacgggcacttttctacgaaaatcgaaatccgtcaaggcgacaattgtgattctatcatcagacgtttaatgaagatgaacagaggtatcaaggacttgtcaaaggttaaactcatgcgattcgacgaccccttgttgggacctcgcagagtccccgttcttgggaaagagtatactgaaaaaacacctatatcagaacatgcggtcttcaacgtcgacctcatgagcaagaagatacacctgaccgaaaatgggatccgggtggacattggggataccataatctacctggtgcattag

SEQ ID NO: 228408 - DNA, 3393 bp, synthetic construct
  misc_feature 1..3393: note = Description of Artificial Sequence: Synthetic coding sequence
  source 1..3393: mol_type = other DNA
atggctgagagaaagggcacggcaaaagtggacttcctaaaaaaaatcgaaaaggagattcagcagaagtgggacaccgaaagagttttcgaggtaaacgcctctaatctggagaagcagacttctaagggaaagtatttcgtgacgttcccctacccatacatgaacggacggctgcatttaggtcacaccttctctctgagcaagtgtgaatttgccgttggttatcagcggttgaaagggaagtgctgcctttttccctttgggctccactgcacggggatgccaatcaaaagcaaagcagcagcaaaggcaggctcttccaagtaccagtggggtattatgaagtccctcggactgtctgatgaagagatcgtcaaattctcagaggcagagcactggcttgattactttcctcctctcgccatccaggacctaaagcgtatgggtctgaaggtagactggcgaagatccttcattacaaccgacgtaaatccatattacgactctttcgtgcgttggcagttccttactctgcgggagcggaacaagattaagttcggcaagcgctatacaatctactccccgaaggatggccaaccttgtatggatcatgatagacagacgggggaaggggtcggtccacaggaatataccctcctgaagcttaaagtgcttgaaccatatccgtccaagttgtccggcctgaaaggcaaaaatattttcctggtggccgcaacgttacgtccagaaactatgttcggacagacaaactgctgggtgcggccagacatgaaatacatagggtttgaaacagtgaatggtgatatattcatctgcacacagaaggccgcacggaacatgagttaccagggctttactaaggataatggggtggtgcctgtcgtgaaggagctgatgggagaggagatcctgggagcatcacttagtgctccactgacaagctacaaggttatctacgtcctgcccatgctgactatcaaggaggacaaaggcaccggggtagtcacaagtgtgccgtcagattccccagatgacattgcagccctgcgggacctcaagaagaaacaggcgctgcgagctaagtatggcatccgggacgacatggtgctgccatttgaaccagtcccggtgattgaaattcctggctttggcaacctgtctgctgtgactatttgcgacgaactcaaaatccaaagtcagaatgaccgggagaagctggccgaagccaaggaaaagatctatttgaaaggattttatgaaggtattatgctggttgatggttttaagggtcagaaagtccaggacgtgaagaagacaattcagaagaaaatgattgatgccggtgacgccctgatatacatggaaccagagaagcaggttatgtcaagatcttccgatgagtgtgtcgtcgccctatgcgatcagtggtatctggactatggcgaagaaaactggaagaagcagacaagccagtgcctgaagaatcttgaaacattttgcgaggagaccaggcgcaacttcgaagcaaccctgggctggctacaggagcacgcttgttcccgaacttacggccttgggactcacctgccttgggacgagcagtggctgatagaaagtctttcagattctaccatatatatggctttctatacagtcgcccacttacttcagggcggtaatctgcacgggcaggccgaatcacctttgggtatcaggcctcagcagatgacaaaagaggtgtgggactacgtgttctttaaggaagccccttttcccaagacacaaattgccaaggagaagcttgatcaacttaagcaagaattcgagttttggtaccctgtggatttgcgagtctccgggaaggacttggtccctaaccatctgagctattatctgtataatcacgtggccatgtggcccgagcaaagcgacaaatggccaacagccgtacgtgctaacggtcaccttcttctgaacagcgaaaaaatgtctaaatcgactgggaattttctcaccctgacgcaggcaatcgataagttcagcgccgatggcatgaggcttgctctggccgacgccggagatactgtagaggatgccaactttgtggaagcaatggcagatgctgggattcttagactgtatacgtgggtggaatgggtcaaggagatggtggcaaattgggactccttgcgttctgggcctgcctctacctttaacgacagagtgtttgcctccgaattgaatgccggaatcattaagacagaccagaattatgagaaaatgatgttcaaggaggctctgaagacggggtttttcgagtttcaggcagctaaggataagtatcgggaattggccgttgagggaatgcatagagagcttgtctttcgtttcatcgaggtccagactctcctgctggctcctttctgtccacatctttgtgagcatatttggaccctgctaggtaagcctgattcaattatgaacgcatcttggcctgtggcaggccctgtgaatgaagtccttattcattctagtcaatatctgatggaggtaacacacgacctcagacttagactgaagaactacatgatgcctgccaagggtaaaaagaccgacaaacagcccttacagaaaccaagccactgtacaatttatgtggcgaagaactaccctccctggcagcacacaaccctgtcagtcctgaggaagcacttcgaagcgaacaacggaaagctccctgacaacaaagtgatcgccagcgagcttgggtccatgcccgaactgaagaagtatatgaagaaggttatgcccttcgtcgccatgatcaaagagaaccttgaaaagatgggtccgagaatcctcgacctccaactagaattcgatgaaaaggctgtgctgatggagaatatagtgtaccttacaaactctctggaactagaacacatagaagtgaaatttgccagcgaagcagaggacaagatccgggaagattgttgtccgggtaagccactgaatgtgtttcgaattgagcctggggtctccgtgtcccttgttaatccacagccttctaatggccatttttctaccaaaatcgaaatcaggcagggggacaattgcgactcaatcatccgacgtctgatgaaaatgaataggggcattaaagacctgtccaaagttaagctcatgagatttgatgatcccttactgggccctagaagggtgcccgtcctgggcaaagagtacaccgagaaaactcctatctcagaacacgcagtgtttaacgtggatctgatgtctaagaaaatccaccttactgaaaacggcatccgagtggacataggcgacaccattatttacctggtgcactag

SEQ ID NO: 228409 - DNA, 2712 bp, synthetic construct
  misc_feature 1..2712: note = Description of Artificial Sequence: Synthetic coding sequence
  source 1..2712: mol_type = other DNA
atggcgtcagtgtggcaacggctaggtttctacgcttccctcctgaagaggcagttaaacggcggtcctgacgtcataaaatgggagcggagggtcatccctgggtgcacacgttccatatacagcgccaccggaaagtggaccaaagagtacacgctgcaaaccaggaaggatgtggagaagtggtggcatcagcgcattaaggaacaggcctccaaaatctccgaagctgacaaatcaaagcccaagttttacgttctctctatgttcccctatcccagcgggaaactacacatgggccacgttagggtatatacgatctctgataccatcgctagatttcagaaaatgcggggtatgcaagtaatcaatcctatgggatgggacgccttcggcctgccagcagaaaatgccgctgtcgaaagaaatctccacccccagtcctggacacagagcaacatcaaacatatgcggaaacagttagaccggttaggactgtgtttcagttgggatagagaaattaccacttgtctccccgactattacaaatggacacaatatctgtttataaagctttatgaagccggactagcttaccagaaagaggctcttgtgaactgggatcccgttgatcagacagtgctggcaaacgagcaagtggatgagcacggctgcagctggcggagcggcgctaaagtcgaacagaaatatctccgccagtggttcattaagaccacggcttacgcaaaggccatgcaggacgcgttggcggacctccctgaatggtacgggataaaaggcatgcaggcccactggattggcgattgtgtaggctgccatcttgacttcacgcttaaggtgcatgggcaggctaccggagagaaactgacagcctacaccgcaacccctgaggcaatctacggaacctctcacgtggcgatctcaccttcacataggctgcttcacgggcactcctccctgaaggaagcccttcggatggcgttggtgccgggtaaagattgcctgacccctgtgatggccgttaacatgctcacccagcaggaagtgcccgtcgttattctggcgaaagccgacctcgagggctcattggatagcaaaattggcattccttctacttccagcgaagacaccatcctggcacagaccctgggacttgcctacagcgaagtgatcgaaacattacccgacggcaccgaacggctgtcctcttcagctgaattcaccgggatgaccaggcaggatgcctttctggccttgacacagaaggctcgcggtaagcgtgtgggtggcgacgtaacaagtgacaaactaaaggactggctgatcagccgacagcgatactgggggactccaattcccatcgtgcattgtcccgtgtgtgggccaacccccgtgcctctggaggacctcccagttacactcccaaacatcgcttcatttacaggtaaaggtggcccacccttagctatggcatccgagtgggtgaattgtagttgcccccgttgcaagggggctgcgaagcgcgaaacagataccatggacaccttcgttgactctgcctggtactactttagatacaccgacccacacaatccgcatagcccattcaatactgctgtggcggattattggatgccagtggatctgtatattggaggtaaagaacatgccgtgatgcatttgttctacgcacgatttttctcgcacttctgccacgatcagaagatggtcaaacatcgcgaaccgttccataagctcctcgctcagggtctcatcaaaggacagaccttcagactcccttccgggcaatacctgcagcgagaagaggtagacctgacaggaagcgtacccgtgcacgccaagacaaaagagaagcttgaagttacctgggaaaaaatgagtaagtctaagcataacggcgtggaccccgaagaagtggtggaacagtacggaattgatacgatacggctgtatatcctttttgcagcaccccctgagaaggatattctgtgggatgtgaagacagacgcattaccaggagtcctgcggtggcagcagcggctttggacactaacgacgcgctttatcgaggctcgagcaagcgggaaaagtccacagccccagctgctctccaataaggagaaagccgaggctagaaaactctgggaatataagaatagcgtcatttctcaggtgactacgcactttactgaggatttcagcctcaattcagctattagtcagttgatgggcctctccaatgccctgtcccaggcgtcccaatccgtgatcctgcatagtccggagtttgaagatgcactttgcgcccttatggtcatggccgcacccctggctccacacgtgacctccgaaatctgggcaggacttgcgcttgtcccgaggaaactgtgcgcacactacacttgggatgcttcagtcctccttcaggcatggccagccgtcgatccagagtttctccaacagccagaagtggtgcagatggcagtcctgatcaataataaggcatgcggaaagattcccgtcccacaacaggtggctcgggaccaagataaagtccacgaatttgtgttacagagcgagttgggggttagactactacaaggaaggtcaattaagaagagcttcctgtccccaagaaccgcactgattaattttctagtccaggactag

SEQ ID NO: 228410 - DNA, 2583 bp, synthetic construct
  misc_feature 1..2583: note = Description of Artificial Sequence: Synthetic coding sequence
  source 1..2583: mol_type = other DNA
atggcttcagtctggcagagacttggcttttatgcttctctgctcaagcggcaactgaatggaggcccagacgttatcaagtgggaaagacgcgtgatccctggatgtactcggtcaatctactctgccacaggcaaatggacaaaggagtacacacttcagactcggaaagatgtcgagaagtggtggcaccagcggatcaaagaacaggcttcaaagatttcggaggcggatgtgatcaatcccatgggatgggatgcatttgggctgcctgccgaaaacgcagccgtagagcgtaacctgcaccctcaatcctggactcaatcgaacatcaaacacatgcggaagcagctcgatcggcttggcctgtgtttctcctgggaccgggaaatcactacctgcctgccagactattacaagtggacacagtatctttttatcaaactttacgaagcaggattggcataccagaaggaggccctcgtgaactgggaccccgtggaccagaccgtgctcgcgaatgagcaggtcgatgaacatggctgcagctggagaagcggcgctaaggtggagcagaaatacttgcgccaatggttcataaagaccacagcatacgccaaggcgatgcaggacgccttggccgacctgccagaatggtacggtatcaagggcatgcaggctcactggatcggcgattgcgtcgggtgccacctggactttacactgaaggttcacggccaggctacaggagagaaactgaccgcctataccgccacaccagaggcaatttacggcacctcccatgtcgccatctctccttcacatcgcctgctccacgggcactcatcactgaaggaagccttacgcatggcgctggtgcctgggaaagattgtctgacacctgtaatggctgtaaacatgctgactcaacaagaggtgcccgtggtcattctggccaaggcagatctggaaggaagcctggattctaagatagggatcccctccacatctagcgaagacacgatcctggcccaaacgttagggctggcctattctgaagtcattgagaccctgccagatgggacagagcgactctcaagctccgcggagttcacaggaatgacaaggcaggacgcgtttctcgccctgacacagaaggccaggggtaaacgcgtggggggtgatgtaacatcagataaactcaaggattggctgatctcccgtcagagatactggggaaccccaattcccatcgtgcactgccctgtctgcggacccacaccagttccccttgaagacctgcccgtgaccttgccaaatatcgcttcgttcacaggaaagggaggcccacccttggcaatggcgagtgaatgggtaaactgcagctgccccagatgcaaaggcgctgcaaagcgagaaactgatacaatggacaccttcgtggacagtgcctggtactactttagatacacagatcctcacaaccctcatagtccctttaataccgccgtagctgattattggatgcctgttgacctgtatatcggtggaaaggaacacgccgtgatgcacctgttctatgctcgctttttctctcacttttgccacgaccagaagatggtgaaacatcgtgaacccttccataaactcttagcccagggactgattaaaggccagacctttcgcctgccaagcggccaatacctccagagagaggaagttgatcttactgggtccgtaccagtgcacgcaaagaccaaggagaagctggaagtgacgtgggagaagatgtctaaatccaaacataacggcgtagacccggaagaggttgtcgaacaatacggcatcgacaccatcaggttatatattctgttcgccgcaccacctgagaaagatatcctctgggatgtgaagacggatgcactaccgggagtcctgaggtggcagcaacgactgtggactctgactactaggttcatcgaagcaagggcatctggtaaatctccccagcctcagctactgagcaataaagaaaaggcagaggcaaggaaattatgggaatataagaacagtgtcatcagtcaagtcactacccacttcacagaggacttctctttgaatagcgcaattagccagctgatgggtctgtccaacgccttgagtcaggctagtcagagcgtcatactccactcacccgaattcgaagacgccctgtgcgcgctgatggtgatggctgctccactagcaccgcacgtgacctcggagatttgggctggactggcgctagtgcccagaaagttgtgcgcccattacacctgggatgccagcgtcctattacaggcatggcccgcagtggatcctgagtttctgcagcaaccggaggtggttcagatggccgtattgatcaataataaggcatgtggaaagatccctgtgccacagcaggttgcacgcgaccaagacaaagtgcacgaatttgtgctccaatccgagttgggagttaggctgttgcaagggcgaagcattaagaagagctttcttagtcctcgaacggctttgattaatttcctggtgcaggactag

SEQ ID NO: 228411 - DNA, 2712 bp, synthetic construct
  misc_feature 1..2712: note = Description of Artificial Sequence: Synthetic coding sequence
  source 1..2712: mol_type = other DNA
atggccagcgtgtggcaaaggctcggcttctacgcatctttgctgaagaggcagctgaatggagggcctgacgtaattaaatgggaaagacgggttatcccgggttgcacacgtagcatttattctgccacggggaaatggaccaaagagtataccctccagactaggaaggacgtggagaagtggtggcatcagaggattaaggaacaggcctccaagatctccgaagccgacaaatccaaacctaagttctatgtgctgagtatgtttccttatccctctgggaagttgcacatggggcacgttcgggtctacactatttccgatacaattgccaggttccagaaaatgcgcggaatgcaggtcatcaatccgatgggttgggatgccttcggcctccccgcagaaaacgctgctgtggagcggaatcttcaccctcagagctggacacagtctaatatcaagcatatgcgaaagcagctggatagactgggcctgtgtttcagctgggatcgggaaatcactacatgcctgcccgactattacaaatggactcaatacctgtttataaagctgtacgaagccggactggcctatcagaaggaggccttagtcaactgggatccagtggaccagacggtgctagcaaacgagcaagttgacgaacacggctgtagctggagaagtggagcaaaggtagaacagaaatatttaaggcaatggttcattaaaacaacggcttatgccaaggccatgcaagacgcactggccgacttgcctgaatggtatgggattaagggcatgcaggcgcattggataggcgactgtgtgggatgtcatctcgattttacgctgaaggtacacggacaggccacaggcgagaagctgaccgcttacacagctaccccagaggccatttacggaacttcccatgtggccatcagcccatctcatcgcttgctgcatggtcatagctccctcaaagaggccctgagaatggctttggtccccggtaaggactgcctgacccccgtcatggccgtcaacatgttgactcagcaggaagtaccggtggtgatcctagcgaaggccgacctggagggaagcttggatagtaagatcgggatcccgtcaacctcttctgaggacacaatattggcccagactcttggcctggcctacagtgaggtcattgagactttgccagatggaaccgaacgcctgtctagctctgctgagtttacaggcatgactaggcaggatgcattcttggctttgactcagaaggccaggggaaagcgggtcggcggtgatgttacgagcgacaagcttaaggactggctgatttctcgacagaggtactggggcacacctatcccaatagttcactgtcccgtgtgcggtccgacccccgtccctctcgaagacttaccagtgactttgcccaacatagcaagctttacaggcaagggtggaccccctctagcgatggcctctgagtgggtgaattgttcatgcccccgttgtaagggtgccgcaaaacgggagactgacactatggacacttttgtggactcagcttggtactacttcaggtacactgacccccataatccccattccccttttaataccgctgtcgctgattattggatgcctgtggatctatacattgggggaaaagagcacgcagtgatgcacctcttctacgccaggttcttcagccacttttgtcatgatcaaaagatggtgaagcaccgtgaacccttccacaagctcctggcccagggactcatcaaggggcagactttccggcttccctccggccaatatctccagagagaagaagtcgatctgaccgggtccgtgccagtccatgctaagactaaagaaaaactcgaggtgacttgggaaaaaatgagcaagtccaagcacaatggcgtcgatccggaggaagttgtggagcagtatgggatcgataccatccgcctctatattttgttcgccgctcctcccgagaaagatatcctctgggatgtgaagacggatgcactgcccggagtgcttaggtggcaacaacggctgtggacacttacaactcgtttcattgaagccagagcatcgggtaagagcccacaacctcaacttctgagtaataaagaaaaggccgaagccagaaagctctgggagtataaaaactccgtgatttctcaggtcactactcacttcacagaggattttagtcttaactcagcgatttctcagctgatgggcctgtcgaacgctttatcccaggcaagccagtctgttattctgcactctccagaattcgaggatgccctgtgcgcactcatggtgatggctgcgcctctggcgcctcacgtgactagcgaaatatgggcaggactagccctcgtgccaaggaagttgtgcgcacactatacgtgggacgccagcgtgctcctccaggcatggcccgctgtcgatccagagtttctgcagcagcctgaggtggttcaaatggcagtgctaatcaataacaaagcctgtggcaaaatccctgtgccgcaacaagtcgcgagagaccaagataaggtgcatgagttcgtgcttcaatctgagctgggcgtaagactgctgcaggggcgatccatcaagaaatcctttttgagtcccagaactgccctgataaatttcttagttcaagattag

SEQ ID NO: 228412 - DNA, 345 bp, synthetic construct
  misc_feature 1..345: note = Description of Artificial Sequence: Synthetic coding sequence
  source 1..345: mol_type = other DNA
atggcgtctgtctggcagcgattggggttctacgcttcgctgctaaagaggcagctgaacggcggaccagatgttatcaaatgggaacggagagtaattccaggttgcactagaagtatctatagcgctactgggaagtggaccaaagagtacaccttgcagacaagaaaagatgttgaaaaatggtggcaccaacggattaaagagcaggcttcaaagatttcggaggccgataagagtaaaccgaagttctatgtactttccatgttcccttatccttccgggaagctgcacatgggacacgtgcgtgtctacacgatcagcgacacaatcgccaggttctag

SEQ ID NO: 228413 - DNA, 609 bp, synthetic construct
  misc_feature 1..609: note = Description of Artificial Sequence: Synthetic coding sequence
  source 1..609: mol_type = other DNA
atgaaggtgttggcagctggagtggtgccgttactgcttgtcctacactggaaacatggcgctgggtcacctctgcccataaccccagtcaatgccacttgtgccatccgccatccttgtcacaacaacctgatgaatcaaatcagaagccaactagcccagctgaatgggtccgccaatgcactcttcatcttatactatacagcacagggagaaccctttccgaataacctggacaagctctgtggccctaacgtgaccgactttcccccattccatgcaaatggcaccgagaaggctaaactggtcgaactgtatcgcatagtggtctacctgggaacaagccttgggaacatcacgcgggaccaaaagattctcaatccttcagccctgagtttgcattcaaagctgaacgccacagctgacattctgcgcggactactgtccaacgtgctatgcaggctgtgttctaaataccatgtgggtcacgttgacgtgacttacgggcctgatacgtcgggcaaggacgtattccaaaaaaaaaaactggggtgccagttgctggggaaatacaaacagatcatcgcagtcctggcccaagccttttag

SEQ ID NO: 228414 - DNA, 3294 bp, synthetic construct
  misc_feature 1..3294: note = Description of Artificial Sequence: Synthetic coding sequence
  source 1..3294: mol_type = other DNA
atgatggacatatacgtgtgtctcaaacgtccatcctggatggtagataacaagcgaatgcggaccgcaagcaatttccaatggctcctatctacattcatcttgttgtacttaatgaatcaagtgaattctcaaaagaaaggagcccctcatgatctgaagtgcgtcaccaacaacctgcaggtgtggaactgttcttggaaggcgccatccggtactggcaggggcactgattacgaagtttgtatagagaaccgaagtcggtcttgttatcaacttgagaaaacttccataaagatccccgctctatctcatggggattatgagataactataaatagtctacatgatttcggctcctccactagcaaatttacgcttaacgagcagaacgtgagtctcattcccgacacacctgagatactgaacctctctgcagacttctccacatcaaccttatacctgaagtggaacgatcgcggaagcgtgttcccacatcgatccaacgtcatatgggagattaaggttcttagaaaagaatccatggaacttgtgaagctcgttacacataacaccacccttaatggtaaagataccctgcatcattggtcctgggctagtgatatgccccttgagtgcgcgatacattttgtggaaatccgttgttatatcgacaacttacatttctccgggcttgaggagtggagtgattggtccccagtcaagaatatttcatggatccctgatagtcagacaaaggtcttcccccaagataaggtgattctggtgggcagtgatattacattctgttgcgtctcgcaggagaaggtcctgtctgcccttatcgggcacacgaattgccccttgatacacctagacggagagaacgttgcaatcaagatcaggaatatctctgtgagtgcttcttcaggcaccaacgtagtgttcactactgaagacaacatcttcggtaccgtgatcttcgcaggctaccctccagatacaccacagcagttgaactgcgagactcatgatctgaaggaaatcatctgctcctggaatccaggcagggtgaccgccctggttgggcctcgagccactagttatacgcttgttgagtcatttagcggcaaatacgttcgacttaagagagccgaggccccaaccaacgaatcttaccaattgctctttcaaatgctgcccaatcaggaaatctacaacttcacgctgaatgcgcacaaccctcttggcagatcccagtctaccattctagtgaacatcaccgagaaggtctacccacacactcccacttcattcaaagtcaaggatattaactctacagctgtgaaactgtcatggcatttacccggaaatttcgccaagatcaactttttgtgcgaaatcgagatcaagaagagtaattccgtacaggagcagcgcaacgtaaccataaaaggcgtagaaaactcttcctacctcgtggcactagacaaactaaacccttatactctctatacgttccgcatacgttgctctacagagaccttctggaagtggtctaagtggagcaacaagaagcagcatctcaccaccgaagctagcccaagcaaggggccagatacttggcgggagtggtcttctgatgggaaaaatctgattatttattggaagccccttcccatcaatgaagcgaacggaaagattttaagttacaacgtgtcatgttcctccgacgaggagacacagtccttgtctgagatccctgatccgcagcacaaggcagagatcaggttggataagaacgattacataatcagcgtagtggcgaagaactctgttggctcttccccaccctccaagattgcgtcaatggaaatcccaaatgacgatctgaaaatcgagcaggtcgtcggaatgggcaaaggaatcctcttgacatggcattatgaccccaatatgacatgtgactatgtgatcaaatggtgtaattcttcacgcagtgaaccttgcttgatggactggcgtaaggttccatcaaattccaccgagactgtgatagagtccgacgagtttagaccaggcataaggtacaacttctttttgtatggctgtcgcaatcagggttatcaactgctgaggtcgatgatcggctatattgaggagctcgcgccaatcgtcgcccctaacttcactgtcgaagatacatccgcagactcaatcctggtgaagtgggaggacattcctgttgaagaactaaggggattcctccgcggttacctcttctatttcggaaagggtgaaagagataccagtaaaatgcgagttctggaatcaggcagatccgatatcaaggttaaaaatattactgatatttcccagaaaacgctacgtatcgcagacctccagggcaaaacctcataccatctggtattacgcgcttacacagacgggggagtgggtcccgagaagagcatgtatgtagttaccaaggagaactcggtgggtctcataatcgcaatcctaatcccagtggcggtcgcagttatcgttggtgtcgtcacaagtattctgtgctataggaagcgcgaatggatcaaagaaactttctatcctgacatccctaaccctgaaaattgcaaagccttgcagttccagaagtcggtgtgtgaaggatcaagcgccctgaaaactctggaaatgaacccgtgcacaccaaataatgtcgaagtcctcgaaactaggagtgcctttccaaagatcgaagataccgaaatcatatctcctgtcgcagaaagacctgaagataggagcgacgcagaacccgaaaaccacgtagttgtttcatattgtcctccgattatagaggaagagatccccaatccagcagcagatgaagcgggtggaaccgcgcaggtgatctatatcgacgttcagtccatgtatcagccccaggcaaagccagaagaggaacaggaaaacgacccagtgggtggagccggatacaagcctcagatgcacctgccgatcaattccacagtcgaggacatagctgcagaggaagacttggacaaaacagccggttacagaccccaggcgaacgtgaatacatggaacctggtgagtccagacagcccccgatcaatcgactctaacagtgagatagttagctttgggagcccatgttctatcaactcacgacagttcctcataccgcctaaggacgaagacagccctaaaagcaacgggggagggtggtcctttacaaatttttttcagaacaagcccaacgattag

SEQ ID NO: 228415 - DNA, 3294 bp, synthetic construct
  misc_feature 1..3294: note = Description of Artificial Sequence: Synthetic coding sequence
  source 1..3294: mol_type = other DNA
atgatggacatatatgtgtgcctcaagcgcccatcatggatggttgataacaagaggatgagaacagcttctaatttccagtggctcctatcgactttcatactgctctatttaatgaaccaggttaactctcaaaaaaagggagcccctcatgacctgaaatgcgtaacgaataacctccaggtgtggaactgctcctggaaggcccctagtggaacgggcaggggaaccgattacgaggtatgcattgagaataggagcaggagctgctaccagctcgaaaaaactagcattaagatcccagcgcttagccatggggactacgagattaccattaacagtctgcatgattttggctcttcgacatcaaaatttacacttaacgaacagaatgtgtcgctgattcctgacacaccagaaattctgaacctgagtgccgatttcagtactagtaccctttacctcaaatggaacgatagagggtcggtgttccctcaccggtcaaacgtgatctgggagataaaagtgctgcgcaaagaaagtatggaactagtcaaactagtcacacacaacacaaccctgaatggcaaagacactctccatcattggtcttgggcatccgacatgcccctagaatgcgcgatccactttgtagagatccgttgctatattgacaacctccatttttccggtctggaggaatggtctgactggtcccccgttaagaatatctcctggatacctgactcccagacgaaggtgttcccccaggacaaggtcatcctggtgggcagcgatatcaccttttgttgtgtaagtcaggaaaaggtgctgagcgccctgatcggtcatacgaattgtccattgattcatcttgatggtgagaacgttgccataaaaattcgcaacatttccgtgagcgccagctccggtacaaacgtcgtctttacgaccgaagacaacatttttgggacggtcatcttcgcgggttaccctcccgacacgccccagcagttaaattgcgagacacacgatctgaaggaaatcatctgcagttggaatccaggtcgagtgactgcgctggtggggccacgcgctacaagctatacgctggtagagagttttagtggaaaatacgttagactaaagcgcgctgaggctcctaccaatgagagctaccaactgttattccaaatgcttccgaatcaggagatctacaactttactctgaacgcccataatcctctgggaagatctcagtccacaatattagtaaatatcactgaaaaggtgtacccccatacccctacatcctttaaagtgaaagacattaactctacagctgtgaaactgtcctggcacctgcctggcaacttcgcaaagattaacttcctgtgtgaaatcgagattaaaaagtctaactctgtgcaggagcagagaaatgtgactattaaaggtgtagaaaattcgtcttatctcgtggccttggacaagttaaatccttataccttgtatacatttaggatccggtgtagcactgaaacattctggaaatggtcaaagtggtctaacaagaagcagcacctgaccaccgaggcctcgcctagtaaagggccagatacatggcgggagtggagctctgacggcaagaatttaatcatctactggaagccactgccaataaatgaagcgaatgggaagatcctatcctataacgtttcttgctctagcgatgaggaaacccagtcactttccgaaatccctgatcctcagcataaagctgagattcgcctggataagaacgactacattattagcgtcgtcgccaagaattctgtgggcagctcacctcccagcaagattgcatctatggaaattcccaatgatgaccttaagatcgaacaggtggtgggtatgggaaaaggtattctgcttacttggcattacgatcctaatatgacatgtgattacgtgattaagtggtgtaattctagccgcagtgaaccatgtttgatggattggcgcaaagtaccctccaactctaccgagaccgttattgaaagcgatgagtttcgacccggaatacgatacaatttcttcttgtacggctgtcgcaatcagggttatcagctactccggtcaatgatcggctacattgaagaacttgcccctattgtggcacccaactttacagtggaagatacatctgccgattctatcctggttaagtgggaggatatacccgttgaggaattaagggggttcctgcgaggttatctgttttattttggaaagggtgagagagatactagtaagatgcgtgtcctcgagtccggtcggtccgacatcaaggtgaagaacataacggatatctcccagaaaaccctgcgaatcgcggacctgcagggaaagacatcttaccacctggtgttgcgcgcatacaccgatgggggagttggccctgagaaaagcatgtacgtcgtcactaaagaaaattccgtcggactcattattgctattctgatccctgttgctgtggccgtcattgtaggagtcgtgacgtctattctgtgttataggaagcgtgagtggatcaaagaaacattttacccggatatacccaacccagagaattgtaaagctctccagtttcagaagtccgtgtgtgagggctcttccgctctgaagactttagagatgaacccctgtacccccaacaatgtagaggtgctggagactcgtagtgcctttcctaagattgaggatactgaaatcatatcccctgtggcggaaagacctgaggataggagcgacgctgagcccgaaaatcacgtggtagtctcatactgtccccctatcatagaagaagagatccccaatccagctgcagatgaagcgggaggtacggcccaggtcatttatatcgacgtacagtcgatgtaccagccccaggccaagcccgaagaagaacaggaaaatgacccagttgggggagccggatacaaaccacagatgcacctgccaataaattcgacagttgaggatatcgcagccgaggaagacttagacaagacagcgggatacaggccacaggccaacgtgaacacctggaacttggtctcacctgacagtcctcgatctatcgattcaaattcagagattgtgagttttgggtctccttgctccattaattccaggcagtttttaatcccacccaaagatgaggattctcctaagtcgaacggcggtggttggagttttacaaattttttccagaacaaacccaatgactag

SEQ ID NO: 228416 - DNA, 381 bp, synthetic construct
  misc_feature 1..381: note = Description of Artificial Sequence: Synthetic coding sequence
  source 1..381: mol_type = other DNA
atgatggacatttacgtgtgtcttaagagacctagctggatggttgacaacaagcggatgcgaaccgcatcaaacttccagtggttgctttcgacattcatcctgctctacttaatgaatcaggtgaacagtcagaaaaaaggtgcaccccatgacctcaaatgcgtgactaataacctgcaggtgtggaactgtagctggaaggccccatctgggacagggagaggcacggactacgaggtgtgcatcgaaaacaggtcacggtcctgttatcagcttgagaagacttcaataaaaattccagctttatctcacggcgattacgaaatcaccatcaattcccttcatgattttggatcctcgactagcaagtttacctag

SEQ ID NO: 228417 - DNA, 228 bp, synthetic construct
  misc_feature 1..228: note = Description of Artificial Sequence: Synthetic coding sequence
  source 1..228: mol_type = other DNA
atgatggatatttacgtgtgtcttaaacgcccatcttggatggtagacaacaagagaatgcggacggcaagcaattttcaatggctgctcagcacgttcatactactctacttaatgaaccaggtcaacagtcagaagaaaggtgccccacacgacctaaagtgtgttacaaacaatctccaggtgtggaactgttcctggaaagctcctagtggcacaggtcgttag

SEQ ID NO: 228418 - DNA, 456 bp, synthetic construct
  misc_feature 1..456: note = Description of Artificial Sequence: Synthetic coding sequence
  source 1..456: mol_type = other DNA
atgttttccaccaaagctcttcttctagccggactaatctccactgctctggcgggaccttgggccaatatttgtgctggtaagagctcaaatgaaatcagaacttgcgatagacacgggtgtggacagtactcagcccagaggagtcagcgtccgcatcagggcgttgatatcctgtgttccgcgggatctacggtctacgccccattcacaggtatgatagtaggtcaagagaaaccttatcagaacaagaatgcaattaataacggagttcgcatttcaggacggggattttgcgtgaagatgttttacattaagcctatcaagtataaggggcctataaagaagggtgagaagctcgggactctgctcccactgcagaaagtatacccgggtatccagagccacgtgcatattgagaactgcgatagttcagaccctaccgcgtacctttag

SEQ ID NO: 228419 - DNA, 1128 bp, synthetic construct
  misc_feature 1..1128: note = Description of Artificial Sequence: Synthetic coding sequence
  source 1..1128: mol_type = other DNA
atgacccctatcctgacggtcctgatctgtcttggtctcagtctggatcctcgtacgcatgtgcaagctggcccactgcctaagcctaccctatgggccgaaccgggttccgtgattacccagggttcacccgtgaccctccgctgccagggatcgcttgaaactcaagagtatcacctgtacagagaaaagaagaccgctctgtggattactcgaatcccccaggagctggtgaaaaagggacaatttcctatcctaagtattacatgggaacacgcgggaaggtactgctgtatctatggctcacatactgcgggtctgtctgagtctagcgatccactggaactcgtggtgaccggcgcttacagcaagcccaccctgagtgccttaccgagcccggtggtcacatcagggggaaacgttaccatccagtgtgattcccaagtagccttcgatggcttcatactctgcgtgtccaagaaaccgtcacttagtgtgcagcctgggccagtggtggctcctggcgaaaagttaaccttccagtgtggtagcgacgctggttacgaccgcttcgtcctttacaaggaatggggcagagactttctccagaggcccggacggcagcctcaggcgggtctttcccaagctaacttcacccttggtcccgtctcgaggtcctacggaggacagtatacctgcagcggcgcttataacctcagctcggaatggtcggctccctctgatccattagatatcctgattaccgggcagatcagagcgagaccattccttagtgtgcgccctggaccaactgtagctagtggggagaatgtcacgctgctatgtcagagtcaggggggtatgcatacatttctccttactaaggagggagccgctgattctcctctgagattgaaatctaagaggcagtcccacaagtaccaggccgagtttcccatgtctcctgtcacatcagcccatgcagggacctatcgttgctatgggagcctgtcttccaacccctatctcctgactcatccctccgaccccctggaactggttgttagcggcgcagctgaaacattgtctccaccacagaacaagtcagactccaaggcaggagaatag

SEQ ID NO: 228420 - DNA, 1956 bp, synthetic construct
  misc_feature 1..1956: note = Description of Artificial Sequence: Synthetic coding sequence
  source 1..1956: mol_type = other DNA
atgacaccgatactgactgtactcatatgtttgggactttccttagggccacggacccatgttcaagccggtcaccttcctaaacctacgctatgggctgaaccaggaagcgtgattacgcaaggatcccccgtgaccctgaggtgccagggagggcaggagactcaggagtatcggctttacagagaaaagaagaccgctctgtggatcacacggattcctcaagaactggtgaagaaggggcaattcccaatcccgagcattacctgggagcacgccggaagatatcgttgttattacggtagtgacaccgccggaagatccgagagttctgaccctctggaattagtggtgactggagcatatattaaaccgactctaagcgctcagccttctcctgtggtaaacagcggaggaaacgtgatactgcaatgtgacagccaggtggccttcgacggattttctctttgtaaagaaggtgaggatgaacacccccagtgtctgaactcccagcctcatgcacgtgggtcatcacgtgccatcttcagtgttgggcctgtaagcccgagtcgcaggtggtggtaccggtgttatgcatatgatagtaatagcccttatgagtggtctctgccttccgacctacttgagctgctagtgttgggagtttcgaagaaaccatctctgagtgtccaaccaggacctatagtggcgccagaggaaacattaactctgcagtgcggaagcgacgctggctacaaccgctttgtactgtacaaagatggcgaaagagacttcctgcagctggccggagctcagccccaagctggcctgtctcaggcaaatttcacgcttggcccagtgtcacgcagctatggaggacaatacaggtgttatggcgcacataatctttctagtgaatggtccgctccttctgatcccctggacattctgattgccggacagttttacgatcgggtgtccttgagcgtgcagcccggtcccacagtagcgtccggggagaacgtgaccctcttgtgtcagagtcagggctggatgcagacgttcctgcttaccaaagagggagcagctgacgacccatggcggctgagatcaacgtatcagagccagaagtaccaagccgagtttcctatgggcccagtcacctcagcccatgctggcacctaccgctgctatggatcccagtccagcaagccataccttctgacccatccctcggaccccttggagttggtggtctcaggtccttccggagggccaagcagtcccactaccggacctacaagtactagcgctggtccagaagaccaaccactgactcccactggctcagatccccagagtggacttggacggcatttgggggtcgtcatcggcattctggttgcagtcatattgctgctgctgctcctgctgctgctatttctcatactgcgccacaggcgacagggcaagcactggaccagcactcagagaaaggccgatttccaacaccctgctggcgctgtgggaccagagccaactgatcgagggttgcagtggcgttcgtcccccgctgctgatgcccaggaagagaacctgtatgctgcagtgaagcacacccaacctgaggatggcgtagaaatggatacgcgatctcctcacgacgaagacccccaggctgttacttacgctgaggtgaagcattcacgcccacgccgagagatggcttccccgccttcccctctctctggggaatttttggacaccaaagatcggcaggcggaagaagataggcagatggatactgaggccgctgcatccgaggcaccacaggacgtaacatatgctcagctgcattccctgacattacgacgggaggctactgaaccgcctcctagccaggagggtccgtctccagctgtgccctctatatacgcgacactcgccattcactag

SEQ ID NO: 228421 - DNA, 1956 bp, synthetic construct
  misc_feature 1..1956: note = Description of Artificial Sequence: Synthetic coding sequence
  source 1..1956: mol_type = other DNA
atgactcccatcttgacggtcttgatttgtctcggccttagtctcgggccacgcacccacgtccaagctggccacctgccaaaaccgacactctgggcagagccaggctcagtgatcacccagggaagtcctgtgacgctacggtgccagggtggacaggagacccaggagtaccggctctatcgcgagaaaaaaaccgctctgtggattacccggatccctcaggagctggtgaagaaggggcagtttccgatccctagtatcacatgggagcacgccggtcgatatcgctgctactatggctctgatactgccggaagaagcgaatcttcagacccactcgaactggttgtcactggcgcttatattaagcccaccctgtccgctcagcccagtcctgttgtgaattccggtgggaacgtcattcttcagtgcgattctcaggtcgcctttgatggcttttcactgtgcaaagaaggagaggatgagcatccacagtgcctgaacagccagcctcatgctaggggatctagccgtgccatattctccgtcggaccagtgtcccccagtcggagatggtggtaccgctgctacgcatatgactctaacagcccttacgagtggagtctccctagtgacctgctggaactgctggtgttaggagtaagtaaaaaaccttctttgtcagtgcaaccgggacccatcgttgcgccagaggagacactgactctgcagtgtggaagcgacgcaggctacaacaggtttgtcctctacaaagatggagagcgggatttcctgcagctcgccggagctcagcctcaggccggactaagccaggccaatttcacactcgggccagtgtcacgatcatacgggggacagtaccgctgctatggagcacataatctgagctccgagtggagcgccccttctgaccccctggatattctcatcgccggacaattctacgatcgagtgtctctgtctgtccaacccggacccacagtcgcctccggggaaaatgtaactctattgtgccagtcacagggttggatgcagaccttcttgcttaccaaggagggggctgcagacgacccatggcggcttcggagcacctaccagagccagaaatatcaagccgagttccctatggggcctgtaacaagcgctcatgctggaacttataggtgctacggaagtcagtctagtaaaccttacttgctgactcacccgtctgatcctctagaactggtcgtctctggcccaagcgggggtccctcttctccgacgacgggcccaacttctacatctggtcccgaggatcagcctctgacgccgacggggtccgatccacagagcggcctaggacggcatctcggtgtcgttatcgggatcctagttgctgtgattctgcttctgttgctgctcttacttctctttctgattctgcgtcacagaaggcagggaaagcattggactagcactcagcggaaggcagatttccagcatcctgctggggctgtcggtcccgagccaacggatcgaggccttcaatggcgctcatcccccgcagcggacgcccaggaagaaaatctgtatgccgctgtaaagcatacccagccagaggatggggtagagatggacaccagacaatcaccccacgacgaagaccctcaagccgtaacatatgccgaggttaagcactcgcggcctcgtcgcgagatggcaagcccaccttcacctctgtccggcgaattcctggacaccaaggacaggcaagcggaggaggacaggcaaatggatacggaggccgcagcctctgaggctccacaggatgtcacatacgctcaactacacagtctgactttgcgcagagaagccaccgagccccctcctagccaggagggcccaagccctgctgttccttctatctacgcaaccctggctattcactag

SEQ ID NO: 228422 - DNA, 1794 bp, synthetic construct
  misc_feature 1..1794: note = Description of Artificial Sequence: Synthetic coding sequence
  source 1..1794: mol_type = other DNA
atgaccccaattgtgacggtgctcatatgtctggggctgagtctgggaccacgaacccatgtgcagacgggtacgattccaaaaccgactctctgggctgaaccagacagcgtgattactcagggctcgccagtcactttatcatgccagggttctcttgaggcacaggaataccgattatacagggaaaagaaatcggcatcctggattacccggattcgccctgagcttgtgaagaacgggcagttccatattcccagtattacctgggagcataccggccgttatggctgccagtactactccagagctcggtggtctgagctgagcgatcccttagtactggtcatgaccggcgcttatcctaagcccaccttgagtgcccagccttctccagtagtgacaagcggtggcagagtgactttacagtgcgagtcccaagtcgccttcgggggattcattttgtgcaaggagggggaggaggagcatccccagtgtctcaatagccagccccatgcccgtggatcgagccgagccatcttcagcgtgggacctgtgtctcctaatcgcaggtggagtcataggtgttatggttacgatcttaactccccctacgtctggtcctcacccagcgacttactggagttgctggtgcctggggtctccaagaagccttccttgtcagtccagccaggccctgtagtggcccctggcgaatccctgacattgcagtgcgtctctgatgtcggctatgaccgatttgtcctgtataaggagggagagagagatctgaggcagctgcctggcagacagccacaagcgggactctcacaggcaaactttacgcttggcccagtaagtcgttcctacggcggtcaatataggtgctatggcgctcataacttaagtagcgagtgctctgcaccttccgatcccctggacatccttattacaggacagatccggggtacgccctttatcagcgtgcagcctggccctacggtcgcttccggagaaaatgtgaccttattatgtcagagttggcggcaatttcataccttcctcctaaccaaggcgggagcagcagacgctcccttgcgcctccggagcattcacgagtatccaaagtaccaggcagaattccctatgtcccctgtgacatccgcccacgccggaacgtatcgctgctacgggtcactcaactctgatccttaccttctcagccaccccagcgaaccattggagctggtagtgtccggaccatcaatgggctctagcccaccacctaccgggcctatctcgacgccaggtcccgaggaccaacctttgaccccaactggatccgaccctcaaagcggattgggcaggcacttgggcgtggtgatcggcatcttagtcgcggtggtcttgctcttgttgcttctactgctgctgttcctgattcttcgacaccgtcgacagggcaagcactggacttctacacagcgaaaagccgattttcagcaccccgctggagccgtggggccagaaccaaccgatcgcggtcttcagtggagatcgtccccggcagcagatgcacaggaagagaacctgtacgcggcagtgaaagacacgcaacccgaagatggggtcgagatggataccagagctgcagcaagcgaagcacctcaagatgtcacctacgctcagcttcattcgctgacactgcggcgaaaggcaactgaacctccgccttctcaggagcgtgaaccacctgcagaaccctcaatatacgccacattagcgattcactag

SEQ ID NO: 228423 - DNA, 1899 bp, synthetic construct
  misc_feature 1..1899: note = Description of Artificial Sequence: Synthetic coding sequence
  source 1..1899: mol_type = other DNA
atgacacccgcactgacggcccttctgtgcctgggtctgtctctggggccaaggactagagtacaagcaggtccatttccaaagcccaccctgtgggccgagccaggctctgtgataagttggggttctcccgtaactatatggtgccagggctcacaggaggctcaggaatacaggctgcacaaggaaggtagtcctgagcctctggaccgcaataaccctctggagccgaagaacaaagcacgcttttctatccccagcatgactgaacaccacgcaggcaggtaccggtgtcactattattcgtctgctgggtggtccgaaccctccgacccacttgagatggtgatgactggtgcttacagtaaacctacactcagcgctctcccctcacctgtcgtcgcttcgggagggaacatgacgctgaggtgtggttctcagaaagggtaccatcactttgtcctgatgaaggaaggggagcatcagttacccaggactcttgactctcagcagctccatagcaggggctttcaagctctgttccctgtgggtcccgtgacgcccagtcatcggtggaggttcacttgctactattactacaccaacacgccctgggtttggagtcatccttctgatccacttgaaattctgccctcaggagtgtctagaaagccaagtctgttaaccctgcaggggccagtgctggcccctgggcagtccctgactctgcaatgcggatcggacgtgggatacaacaggtttgtgctgtacaaagaaggggagagggactttctgcagaggcctgggcagcagcctcaagccggtctctctcaggcaaattttacactcggtccagtcagcccctcgaatggcggacagtatcggtgttatggcgctcacaatttatcctccgagtggtccgctccttcagatcctctgaatattttaatggctgggcagatctacgacaccgtttccctcagcgcccagccagggcctactgtggcaagtggtgagaatgtcaccttgctctgtcagtcttggtggcagtttgatacgtttcttcttactaaagagggcgctgcccaccctccactgagactcaggtcgatgtatggcgcacataaatatcaggcggaatttccaatgtcccccgttacatccgcccacgcaggcacctaccgatgttacggatcgtacagctctaacccacatctgctgtctcatccctctgagccactggaacttgttgtgtctggccatagcggtggatctagcctccctcccaccgggcctccctcaactcccggtctgggcaggtacttggaagtgttaataggtgtgtcagtggcatttgtgctgcttctgttcctgctcttatttctactgctaagacgacagagacattccaaacatcgaacctctgatcagcgtaagactgacttccagaggccagccggagcagcggagactgagcctaaggatagaggactcctgcgacgctcaagccccgctgccgacgtgcaagaagaaaacctttacgccgcagtgaaggatacacagagtgaggatagggtggaacttgatagccaacagtcccctcacgatgaagaccctcaagcagttacttacgcccctgtaaagcattctagtcccaggagagagatggcctccccgccatcatctttgtcaggtgaatttctagacaccaaggaccggcaggtcgaggaggacagacagatggacaccgaggctgccgctagtgaggccagtcaagatgtcacctacgcacaacttcactctctcacccttaggcggaaggcgaccgaacctccgcctagccaggaaggcgagccaccagccgagcccagcatttatgcaaccttggcaatacattag

SEQ ID NO: 228424 - DNA, 1344 bp, synthetic construct
  misc_feature 1..1344: note = Description of Artificial Sequence: Synthetic coding sequence
  source 1..1344: mol_type = other DNA
atgattccaacattcacagctctgttgtgcctgggtctgtctctcggccctcggacccacatgcaggccggtccactcccaaaacccaccctgtgggccgaacccggatccgtgatttcttgggggaacagcgtcaccatctggtgccaggggaccctcgaagcacgcgagtatagactcgataaggaagagagccccgcaccatgggaccggcagaacccgctggagccaaaaaataaagccagattctctataccttccatgactgaggactacgccggaaggtacaggtgctattaccgttctccagtgggctggagccagcccagcgacccattagagctcgtgatgacgggtgcgtacagtaagccgaccctatcagcattaccgagccccctggtgaccagtgggaagagtgtgactctcctctgtcaaagcagaagccctatggacacgtttctgcttatcaaagaaagagcagcccaccccctcctgcatctgcgtagcgagcacggagcacaacagcaccaggccgaatttcccatgtctcctgtgacaagcgtgcatggaggaacgtatcggtgcttctccagccacggcttcagtcattacttactgtcccatccctcagaccccctcgagttaattgtttccggatccctagaggacccaagaccatcccccacacgatctgtctctacggccgctggccctgaggatcagcctctgatgccgaccgggtccgtgccccactccggcctccgaagacactgggaagtgctcattggggtccttgtggtgtccatactgctcctgagtctgctcttgtttctcctgctacaacactggcggcaagggaaacaccgaactctagctcagcgacaagcagacttccaacgccctccaggagcagccgagccagaacccaaggacggaggcctccagagacggtcatcccccgcagctgacgtgcagggcgaaaacttctgcgccgctgtgaagaatacacagccagaagacggcgtggaaatggacacacgctccccacacgatgaagaccctcaggctgttacatatgccaaggtaaagcacagccgcccacgccgagaaatggcctccccaccctccccgctgagcggagaatttctggacactaaagataggcaagcagaagaggatagacagatggacactgaggcagccgcatcagaagcgccacaagacgtgacctacgctcagctgcatagttttacccttaggcagaaagctacagaaccgcctccgtctcaagaaggtgcctctccagctgagccctctgtgtatgccaccctggcaatccattag

SEQ ID NO: 228425 - DNA, 1476 bp, synthetic construct
  misc_feature 1..1476: note = Description of Artificial Sequence: Synthetic coding sequence
  source 1..1476: mol_type = other DNA
atgacactgactttatctgtgctgatctgccttggactcagcgtcgggccacggacctgcgtccaggccggaacactgcccaagcccactctgtgggccgagcctgcttctgtgattgctcggggtaagcctgtaacactatggtgtcaaggaccattggaaaccgaggagtacaggttggataaggagggcttaccctgggctcgaaagcgccagaatccgcttgagcccggagccaaagccaaatttcatataccatccaccgtctatgattcagctggcagatatcgatgctactacgagacccctgcaggatggtctgaaccctcagatcccttggagttggtggcgaccggagtgtctagaaaaccctctctgctgatcccacaaggctcagtcgtagccagaggcggaagcctgacattacagtgccgatccgatgtcggttacgatattttcgtgctctacaaggaaggtgagcacgacctagtgcagggaagtggacagcagccccaggccggtttatcccaagccaacttcacattgggccctgtgagcagatcccacggaggacaatatagatgctatggtgctcataatctgtcaccaaggtggtccgcaccaagcgacccccttgacatcctcatcgctgggcttataccagatatccccgcactgtcagtgcagccagggcctaaggtggcatcaggggaaaatgtgacactcctttgtcaatcctggcaccagattgataccttcttcctgacaaaggaaggagcagcacacccccctctgtgcctgaaatccaagtaccagtcataccgacaccaggcagaattctccatgtcgccagtgacttcggctcagggcggaacttaccgttgctacagcgctataaggtcctatccttatctgctttcgtcccccagctatcctcaagaactggtcgtaagcgggccttctggcgatccatcccttagcccaactgggagcactcccacacctgcgggacccgaagatcagcccctcactcccacgggcctcgacccccagtcaggactggggagacacctgggggtggttacaggggtgagcgtcgctttcgtgcttctgcttttcctcctcttgtttcttctgctccggcatcgtcatcagtccaaacataggacctctgcccacttttacagacctgctggcgcagcaggtcccgagccaaaagatcagggtctacagaagcgcgcttcgccggtagccgacatccaggaagagattttgaacgcagcggttaaggacacacagccaaaggacggggttgagatggacgcaagagccgctgcttccgaggcccctcaggacgtaacgtatgctcaattacattccctcacccttagacgcgaagccaccgagccccctccgagtcaagagagagaacctccagctgaacctagcatctacgcacccctggccatacattag

SEQ ID NO: 228426 - DNA, 1470 bp, synthetic construct
  misc_feature 1..1470: note = Description of Artificial Sequence: Synthetic coding sequence
  source 1..1470: mol_type = other DNA
atgactccaatcgttaccgtgctgatctgcctgaggctctctctggggcctaggacacatgtgcaggccggtaccctccccaaacccactctgtgggccgagcccggtagtgtgatcacacagggatcaccagtgacactgtggtgtcaagggatcctggagactcaggaatatcgactctaccgagaaaaaaagacagccccttggattacacgaataccccaggaaattgtaaaaaagggacagtttccaataccatcgattacttgggagcacacaggccgttacagatgcttctacggtagccataccgcgggttggagtgaacctagcgatcccctggaactggtggtcacgggtgcgtacatcaagccaacgctcagcgcgctcccttctcctgtggttacaagcggaggcaacgtcactttacattgtgtctcacaggtggcttttggtagttttatcctatgtaaggagggtgaggacgaacacccacaatgcctgaacagtcagcccaggactcatgggtggtcgcgagctattttttctgtggggcctgtgtcacccagtagacgctggagctaccgatgctacgcttacgacagcaacagccctcatgtatggtctctaccttctgaccttctggagctcttggtcttgggggtctccaaaaagccctccctgtcagtgcaacccggaccaatagtcgcccctggcgagtccctcacattgcagtgtgtatccgacgtgtcttacgaccgatttgtgctatacaaggaaggagagagagatttcctgcagctgcccggacctcaacctcaagccggtctatctcaagcaaacttcacacttggacctgtgagcagaagttacgggggacaataccgctgttccggggcatacaatctgtcgtccgaatggagcgccccttcagatcccctggatatcctgatcgctggccagtttcgtggcaggcctttcatttcagtgcacccgggacctaccgttgcgagcggcgagaacgtaactctcttatgtcaaagctggggcccttttcacaccttcctgttaaccaaggcaggggctgccgacgccccattgcgactgagatccatccatgagtatccgaagtaccaggctgagttccccatgagccccgtcacttccgctcattctggcacgtatagatgctatggttctctgtcgtcaaacccatatctgctgtcgcatcctagcgattcactagagcttatggtgtctggtgcggcagaaacactatctcctccgcagaataagtccgattctaaggctggcgctgcgaacacactctcgccgagtcaaaacaaaaccgcctcacacccccaggactacaccgtagagaacttaatccggatgggaatcgctgggcttgttctggtggtgttgggtattctgctattcgaagcccagcatagtcagagaagcttgtag

SEQ ID NO: 228427 - DNA, 1401 bp, synthetic construct
  misc_feature 1..1401: note = Description of Artificial Sequence: Synthetic coding sequence
  source 1..1401: mol_type = other DNA
atgacacctattttaaccgtgctgatatgtctgggtctgtcgttgggaccacggacacacgtccaggccggacacctgcctaagcctactctgtgggcagagccaggttccgtaataattcagggttcccccgtgaccctcagatgtcaaggctcactgcaggccgaagagtaccacctgtatcgtgagaataagagcgcttcgtgggtccgcaggatccaggagccaggcaagaatgggcagttccccattccatcaataacttgggagcacgccggacgttatcattgccagtactactctcacaatcactcttcagaatacagcgaccctctcgagctcgtagtcacaggcgcatatagcaaacctacgctctcggcactcccgtccccggtcgtgacactggggggaaacgtcaccttacagtgcgtatcacaggtggcatttgatggcttcatcctttgcaaagaaggtgaagatgagcacccccagagactgaacagccactctcacgctagaggctggtcttgggcaatcttctccgtgggacctgtgtctccttctaggcgctggtcttatcgctgctacgcctacgacagcaactcaccttacgtttggtcactccccagcgatctcctggaacttctggttcccggagtctccaagaagccctctttgagtgtgcagccaggacccatggtagccccaggagaaagcctgactcttcagtgtgtatcagatgtgggatatgatagatttgttctctataaagagggagagcgcgacttcctgcagagacctggatggcaacctcaagccggtctgtcccaggcaaattttacactcggaccagtctctccctctcacggtggtcagtatcggtgctactcagcccataatttgagctccgaatggtcagcaccatctgatccactggacattctcatcactggtcaattctatgataggcctagtttgagtgtgcagcccgtccctacggtcgctccgggaaagaacgtgaccctgctgtgtcagagcaggggccagtttcatacttttctccttacaaaagagggggctggccacccacccctgcacctccggtcagaacaccaggctcagcagaatcaggcagagtttaggatgggccctgtcactagcgctcacgtagggacgtaccgatgttatagctccctgtcgagcaatccctacttgctctccctcccctccgaccccctcgaactcgtcgtctctgccagccttggtcaacaccctcaggattacacagtagaaaaccttatccgcatgggcgtcgccggtttggttctggttgtcctgggtattctgctgttcgaggcccaacattcgcaacgctcgctacaggacgcagctggaaggtag

SEQ ID NO: 228428 - DNA, 1452 bp, synthetic construct
  misc_feature 1..1452: note = Description of Artificial Sequence: Synthetic coding sequence
  source 1..1452: mol_type = other DNA
atgactcccattttgaccgtcctcatctgcttaggcctttcattgggcccacggacgcacgtgcaagcgggacatctgcccaaacctacgctgtgggcagagccgggaagcgttatcattcaaggatcacccgtgacgctgagatgtcagggtagcctgcaggccgaggagtaccatctgtatagggagaacaagtccgcgagctgggtgcgaaggattcaggaacctggtaagaatggtcagtttcctattccgtctattacttgggagcacgctggccgatatcactgccaatattatagccacaatcactcctcggaatatagcgatcccttagagctcgtggtgaccggggcttattccaagccgaccttgtctgccttacccagcccggtagtgaccctgggtggcaacgtcaccctgcagtgcgtatcacaggtggccttcgacggcttcattctgtgtaaggagggcgaagatgagcacccgcaacgtctcaactctcatagccatgccaggggctggtcctgggcaattttctcagtgggccctgtgtcaccaagcagaagatggtcctatcgctgctacgcatacgattcgaattctccctacgtatggtctcttccatccgatttgctcgagctcttggtacccggagtgtctaaaaaaccgagtttaagcgttcagcccggacctatggttgcccctggcgagagtctgaccctccagtgtgtttcggatgtgggatacgaccggtttgtgctgtacaaggaaggggagagagacttcttgcagagacctgggtggcaacctcaggctggcctgtcccaggctaactttactctgggcccagttagtccatcccacggcggacaataccggtgctatagtgctcataacctgagctctgaatggtcagctccatcagatccattggacattcttatcactggccagttctacgataggccttccctcagcgttcaaccagttccgacagtggcccctggtaaaaatgtaacattgctgtgccagtctcgaggccagttccataccttcctgcttaccaaggagggggctggccacccccctcttcacttgcggtcggaacaccaggcgcagcagaaccaggccgaatttaggatgggccctgtgaccagcgctcacgtggggacatatagatgttacagcagtttgtcaagcaatccttacctcctttccctgccctctgacccgctggaattggtagtgtccgaggctgcagagacattgagccccagccagaacaagactgacagcactactacctctctcggccagcatccacaggattataccgttgagaacctcatccggatgggggtggccggtcttgtccttgtggttttaggaattctcctcttcgaagctcagcactcacagaggagcctgcaggatgccgctgggagatag

SEQ ID NO: 228429 - DNA, 1452 bp, synthetic construct
  misc_feature 1..1452: note = Description of Artificial Sequence: Synthetic coding sequence
  source 1..1452: mol_type = other DNA
atgacccccattcttactgttctcatatgtttgggcctgtctctcggaccgaggacccacgttcaagccggtcacctacctaagccgacactgtgggccgaacccggttctgtgattattcagggtagcccagtaaccttgcggtgccaaggatcactccaggccgaggaataccacctttaccgggagaacaaatcggcctcctgggtcaggcgtatccaagagccagggaaaaatgggcagtttccaattccctcaatcacatgggagcatgccggaagatatcattgtcagtattattcgcacaaccattctagcgaatactccgatcctctggagctagtggtgaccggcgcatattctaagcctacactgagtgcgctgcccagcccagtggtgaccttgggcggaaacgttactttgcaatgtgtctcgcaagtggctttcgacggatttatactctgcaaggagggagaagacgaacatccacaaagactgaacagtcactctcacgccagagggtggtcctgggcaatctttagtgttggacctgtgtccccgtcgcgcaggtggtcttatcgctgttatgcttatgatagcaactccccctacgtatggtctttaccctcggacttacttgaactcttggtgcctggagtctccaaaaaaccctcgctgtccgtgcagccgggacccatggttgcccctggggagtcgctcaccctgcagtgtgtcagcgacgttggatacgataggtttgtattgtacaaagaaggtgagcgggatttcctacagagacctggctggcagccccaggcaggcctgagccaggccaattttacgctagggcctgtcagtccctcccatggtggccagtatcgctgctactcagcacacaatctcagctctgagtggtcagccccaagcgaccctctcgacattctgattactggtcagttttacgatagaccctctctctcagtacagccagtgcctaccgtggccccaggaaaaaatgttaccctgctatgtcagtctcgaggccagtttcacacctttctgctgacgaaggaaggtgcaggacacccaccccttcacctgaggtccgagcatcaggcacagcagaatcaagctgagttccggatgggccctgtgacctccgcccacgtcggaacatacagatgctacagcagtctgagttcaaacccttatttgttaagccttccctccgatcccctggagcttgtcgtttccgaagctgcagagaccctgtcaccctcgcagaacaagaccgatagtacgacaactagccttggtcaacatccacaggattacaccgtggaaaatctaataagaatgggggtcgccggactggtcctagtggtgctgggcattctgttgtttgaggctcaacattcccagaggtctttgcaggatgccgcaggccgatag

SEQ ID NO: 228430 - DNA, 984 bp, synthetic construct
  misc_feature 1..984: note = Description of Artificial Sequence: Synthetic coding sequence
  source 1..984: mol_type = other DNA
atgacacccatcctcacagtactaatctgcctcggcctgtctctgggcccaagaacccacgtgcaggcaggccacctgcctaagcccaccctgtgggccgaacctggaagcgtgataatccagggtagtccagtaactcttagatgccaaggatcactgcaagctgaggagtaccacctgtatagagagaacaaatctgcttcatgggttagacgtatccaggagccgggaaagaatggacaattcccaataccttcgattacctgggaacatgcagggcgttatcactgtcagtactattcacacaaccactcttcagaatatagcgatccgctcgaactcgtagtcacgggggcatacagcaagcccaccctctccgctttgccaagccccgtagtgaccctgggcggaaacgtgacgcttcagtgcgtctctcaggttgcttttgacggttttatcctgtgtaaagagggagaagacgaacatccacagcgcctgaatagtcattctcacgccagaggttggtcttgggcaatatttagcgttggcccagtgtccccatcccggagatggtcgtaccgctgctatgcctacgactctaatagtccctatgtctggagtctgccttccgatctccttgagctgctggtgcccggtgtcagtaaaaagccatctctctccgttcaacctgggcctatggtggcccctggagaatctttgacactgcaatgtgtgagtgatgtgggctacgacagatttgtactgtacaaggaaggggaaagggactttctccagcgcccaggctggcagccacaggccggattgtctcaggcaaactttactcttgggcctgtttcgccctcccatggcggacaataccgatgctattctgcgcataacctatcaagtgaatggtctgctccctccgatcccctggacatccttatcacggggcagttctatgatcggccaagcctgtcctag

SEQ ID NO: 228431 - DNA, 1320 bp, synthetic construct
  misc_feature 1..1320: note = Description of Artificial Sequence: Synthetic coding sequence
  source 1..1320: mol_type = other DNA
atgacgcctatcttaaccgtgctcatttgtctgggactatccctcgacccacggacacacgtgcaagccggtcccttgccaaaaccaaccctctgggcagagcctggctctgtgatcacacagggttctcccgttacactgcgatgccagggttcgctggagacccaggagtatcacttgtatcgcgagaagaagactgccctgtggatcacccgcatccctcaagagcttgtgaaaaagggtcaatttcctatccttagcattacctgggagcacgcagggaggtactgctgcatctacggaagccatacagcgggactgtccgagtccagcgacccgctggaacttgtggtgaccggcgcttatagcaaaccaacactcagcgcactgccttcccctgtagtcaccagcggcggaaatgtaactattcagtgcgatagccaggttgctttcgacggttttatcctttgtaaagaaggcgaggatgagcaccctcaatgccttaattctcacagccacgcgcgaggcagctctcgtgcgattttctcggtgggccctgttagcccctctcgtaggtggtcctaccggtgctacggctacgactcccgagcgccatacgtgtggtcacttccatctgacctactaggcctgctggtgcctggcgtctcgaaaaaaccgagcctttccgtgcagcccggtcccgtggttgctcccggagagaaattaacttttcagtgcggctctgacgccggatatgacaggttcgtactatataaagaatggggtagagattttctgcaacggcctggacggcaaccgcaggccggtctgtcccaggctaactttacactggggccagtgagccgtagctacggcggacagtacacctgttctggcgcatacaacctgtcgagtgaatggtctgcacccagcgatccactcgacatcctgattactggccagattagagccagaccttttctcagtgtgcgtcccggaccaaccgtcgccagtggtgaaaacgtgacactcttatgtcagagtcaagggggtatgcacacgtttttgctcaccaaagaaggcgcagcggattctcctctcagattgaaaagcaagagacagagtcataaataccaagccgagttccctatgtctcccgttacttccgcacacgccggaacctataggtgttatggctccctgtcatccaacccctacctgctaactcacccatccgaccctctggaactggttgtcagcggagccgctgagacgttgtcacctcctcagaataagagcgattctaaggccggtgagtag

SEQ ID NO: 228432 - DNA, 1371 bp, synthetic construct
  misc_feature 1..1371: note = Description of Artificial Sequence: Synthetic coding sequence
  source 1..1371: mol_type = other DNA
atgcatcgcggactgattcatccccagagttcagcagttggcggtgatgccatgactcctatactcacagtgttgatttgcctggggctgagcctggacccaagaactcatgtgcaggcagggccactcccaaaaccgaccctgtgggctgaacccggaagtgtgattacccaggggtctcccgtgacattacggtgccaaggtagtctggagactcaagagtatcacctctaccgcgagaaaaagaccgccctttggattacacggataccccaggaactagtgaaaaaggggcagtttcccatcctctcaattacctgggagcacgccggaaggtactgctgcatttacggtagccatacagctggactgtccgaatcttcagacccccttgaacttgtggtcacaggagcttatagcaagcctaccttgtcggctctgccgtctccagtggttactagcggcggtaacgtgaccatccaatgtgacagccaggttgcattcgacggattcatcctgtgtaaagagggtgaggatgagcacccccaatgccttaacagtcacagtcatgcgcgaggatcctcaagagccatattctctgtagggcctgtgtcaccctctcgcagatggtcataccgctgctatggctacgactctcgggcaccctacgtttggagtctcccttctgacttgcttggtctgcttgtgccaggagtgtccaaaaaaccttccctttcggtgcaaccaggcccagttgtggcaccaggagagaaactgacattccagtgcggctcggacgctggctacgataggttcgttctgtacaaggaatggggaagagacttccttcagcggccaggcaggcagccccaggctgggctgagccaggccaatttcacactggggcctgtgagcaggtcatacgggggtcagtatacatgttcaggggcatataatctaagttccgaatggagcgcccctagtgatccgctagatattctgattactggtcaaataagagcacgaccttttctgagcgtcagaccaggccctacagtcgcttcgggtgagaatgtgacgctcctgtgccaatcccaaggtgggatgcatacttttctgctaactaaagaaggggcagctgattctcctctacggctgaaaagcaagcggcagtcgcataaataccaggccgaattccccatgtcacccgttacatctgctcacgctgggacctaccggtgttacggcagtttaagtagcaacccttacctgctaacccacccctctgatccacttgagcttgtggtctccggagccgctgagacactttctccaccgcagaacaaatccgactccaaggcgggagagtag

SEQ ID NO: 228433 - DNA, 1959 bp, synthetic construct
  misc_feature 1..1959: note = Description of Artificial Sequence: Synthetic coding sequence
  source 1..1959: mol_type = other DNA
atgacacctatattgacggttctgatatgtctcggcctgagcctcgggccaagaacccatgtccaggctggtcacctgccgaagccaaccctttgggccgaaccaggctcagtgatcacgcaaggatctccagttacattgcgctgccaaggaggccaggaaactcaggaataccggctctatcgggagaaaaaaaccgcgctgtggatcacccgaataccccaggaattagtgaagaaaggccaattccccatacctagtattacctgggagcacgctggccgttaccgctgttattacgggagcgatacagccggaaggagcgagagttcggatcccttggagctggtggtcacaggcgcttacatcaagccaactctgagcgcccaaccttctcccgtcgtgaattccggcggaaatgtcattctgcagtgtgactcgcaggtagcgttcgatggcttcagcctgtgcaaggagggtgaggatgagcatccacagtgcctcaactcccagccccatgcccgtggaagctccagggctatcttctcagtgggacccgtgtctccatcccgacgctggtggtaccgttgctacgcctatgacagtaacagtccttacgaatggtccctcccatctgatcttttagagttactggtactgggcgtatctaagaaacctagcctttctgtccagccgggaccaatcgtggcccctgaagagacccttaccttacaatgcgggtctgacgccggatataacagattcgtcctgtacaaggacggagagagagattttttgcagttagcaggtgctcagccacaggctgggttatctcaagcgaactttactctgggacctgtgagtaggtcctacggaggccagtacaggtgctacggagcccacaacttaagctcagagtggtcagctccctctgatcccctagatatcctgatcgccggacaattttatgatagggtttctctgagtgtccagcctggccctacagtggcttcaggggaaaatgttaccctcctttgccaatcacagggctggatgcagactttcctccttaccaaggaaggtgccgctgatgacccctggcgcctgcgaagtacataccaatcacagaaatatcaggccgaatttcctatgggcccagtgacctccgctcacgcaggaacgtataggtgttacggcagccagagctctaagccatacctgttgacgcacccttccgaccctctcgaactcgtggtgtcaggtccgagcgggggtccttcatcccccacaacaggtcccaccagtacatctgcaggtcctgaggatcagcctcttacccccaccgggtcggaccctcagtcaggcctcggcagacacctgggagtcgtgataggtattctggtggctgtaatcctcctcctgctcctgttactgctcctgttcctgattctcagacaccggaggcagggaaagcactggacgtctacgcagaggaaggccgatttccaacatcccgctggtgcagtgggccctgagccaactgatcggggtctacaatggcgatccagtcccgctgctgatgctcaggaagagaacctttacgccgctgtgaagcacacccagcccgaggacggggtggaaatggatacaagacagagtccacacgacgaggatccacaggctgtgacctatgccgaggtgaagcattctaggcccagacgagagatggcctcccctccatccccgttgtccggtgagtttttggataccaaggaccgccaggccgaagaggacagacaaatggacacagaggcggcagcatccgaggcgcctcaggacgtgacatacgctcagctccacagtctgactctcagacgcgaggcgactgagcctcctccgtcacaggaaggcccatctccggcagttccttcgatctatgcgaccctggccattcactag

SEQ ID NO: 228434 - DNA, 1953 bp, synthetic construct
  misc_feature 1..1953: note = Description of Artificial Sequence: Synthetic coding sequence
  source 1..1953: mol_type = other DNA
atgacacccattttaacggttctcatctgcctggggctctcactgggcccacggacccacgtgcaggctggccatttgccgaagcctaccctctgggcagagcctggatcagtcataacgcaggggagccccgtgacactgcggtgccaggggggacaggagactcaggaatatagactgtatagagagaagaaaactgctctgtggataacgagaatcccacaggagctcgtcaagaaggggcaatttccaatcccatctatcacatgggagcatgccggaaggtacagatgctactatgggtcggacacggctggaaggagcgaaagttcagatccactggaattggtggtcacaggtgcctacatcaaacccactttatccgcccagcccagccccgtggtgaactccgggggtaatgttattcttcagtgtgactcacaagtggcttttgacggcttttccctgtgtaaggagggggaggacgaacatcctcagtgccttaactcccagccacacgccagggggagcagtagggctatatttagcgtcggacctgtcagtccttcccggaggtggtggtacagatgttatgcatacgactcaaacagcccgtacgagtggtccctgccgtccgacttgctagaactgctcgttttaggcgtgtctaagaagccctctctctccgtgcagcccggaccaatcgtcgctccagaggagacattgaccttgcagtgcggctctgacgccggttacaatcgctttgtcctgtataaagacggagagcgagattttttacagcttgccggagcccagcctcaggctgggctgagtcaggcaaatttcactctggggccagtgtcacgcagttacgggggacagtaccgatgttacggtgcccacaatctgagctccgaatggagcgcccctagtgatcccctggatattctaatcgctggccagttctatgatagagtctccctctctgtgcagcctggaccaaccgtggcctccggcgagaacgtgacacttctatgccagtcacaaggatggatgcaaaccttcctgctcacaaaagagggagcagccgacgatccctggagactgaggtctacataccagagtcagaaatatcaagctgaattcccaatgggcccagtgacctctgcccatgccggtacctacagatgttacggaagtcaaagtagcaaaccttacctgctgacccatccatccgatcctctggagctagtggtctcaggccctagcgggggtcctagttctccgacaacaggccctacgtccacttctggccctgaggaccagccactgaccccaacaggaagcgacccccagtcagggctggggcgacatcttggtgtagtcattgggatcctcgtggcagtgatcctgctacttttactgctgttgctgctgttcctgatattgcgccatcgcagacaggggaagcactggacatcaactcagcgaaaagccgactttcagcatccagctggcgcagtcgggccagagcctactgatcgcggtctgcagtggcgctcttcaccagctgctgacgcccaagaggaaaacctttatgcagctgtcaaacatacccagcctgaagatggggtggagatggatacacgctctcctcacgacgaagatccacaagccgtcacatatgctgaggtaaagcatagtcgccctcggcgagaaatggcgtccccaccttcaccacttagcggcgaattcctagacaccaaagacagacaggccgaggaagatcggcagatggatacggaggccgcagcgtcagaagcaccccaggacgtaacctatgcacagctgcattcacttaccctgcgtcgggaggccactgagcctcccccaagtcaagagggcccttctcctgcggtgccgtcaatctacgccaccctcgctatccactag

SEQ ID NO: 228435 - DNA, 1953 bp, synthetic construct
  misc_feature 1..1953: note = Description of Artificial Sequence: Synthetic coding sequence
  source 1..1953: mol_type = other DNA
atgaccccgatactaaccgtactgatctgtttagggctctctctggggcctcgcacacatgtccaagccggacacctgcccaaacccacactgtgggccgagccgggtagcgtcattactcagggatcccccgtgactctgagatgtcaaggtggacaagaaacccaggagtatcgtttgtatcgagagaaaaagaccgcactgtggatcaccagaatcccacaggagcttgtgaagaaaggacagttccccattccttcaattacttgggagcacgccggaaggtataggtgctattacgggtcagacacggctggtaggtccgaatcaagtgatcccctggaactggtagttaccggagcatatattaaaccgactctgagcgctcaacccagcccagtggttaattccggtggcaatgttatattgcaatgtgactctcaggttgctttcgacgggtttagcttgtgtaaggaaggagaggatgagcatccccagtgtctgaattctcaaccccacgcccgaggttcgtctagagccatctttagcgtggggcctgtctcgccttcccgacggtggtggtaccgctgttacgcctatgatagcaattccccctatgaatggagtctgccttccgatctgctggagctcctggtcctgggagtgagcaaaaaaccaagcctctcagttcagcccggtccaattgtggctcctgaggagactctgactttacaatgcggaagcgatgcagggtacaataggtttgtgctctacaaagacggagaacgggattttctgcagctggccggagcacaaccccaagctggcttgagccaagccaacttcaccctcgggcctgtctccagaagctacgggggacagtatcggtgttacggagcccataacctttctagcgagtggagcgcaccctccgaccctttggatattttgatagccggacaattctacgaccgggtgagtctgagcgtgcaaccaggcccaacagttgcaagtggggagaatgtgacccttctgtgccagtctcagggatggatgcaaacatttctcctcaccaaagagggcgctgccgacgatccatggaggctcaggtcaacctatcagagtcagaaatatcaagccgaatttccgatgggacctgtcacctccgctcacgctgggacataccggtgttacggctcacagagcagcaaaccatacttactcacacatccttctgatcccctggagctggtggtcagcggcccatccggagggccatcttcacctaccactgggccaacatccacaagcggcccagaggaccaaccgttgactccaacaggatccgacccccagtcaggtctgggccgacacctgggggtggtgatcgggattcttgtggctgtcattcttctcttactgctgttgttgctactgttcctgattctcaggcacaggcggcaaggaaagcactggacaagcacccagcgcaaagctgacttccaacatcccgctggggctgtcgggcctgaacctactgatcgcggactgcaatggagatctagcccagccgctgacgcccaagaagaaaacttatacgccgctgtgaagcacacacaacccgaggacggagtggagatggacactcgatcaccccacgatgaagaccctcaagccgtgacctacgcggaggtgaagcattcccgcccaagacgcgaaatggcctcacctccctcccctctgtcgggtgaatttttggatactaaggatagacaggctgaggaggaccgccagatggacaccgaagcggcagcatcagaggcccctcaagatgtgacatacgcccaactgcattccttgacgctgagaagggaagccacagagccaccaccgagccaggaggggccttctcccgcagtgcccagcatttacgcgacactggctattcattag

SEQ ID NO: 228436 - DNA, 1905 bp, synthetic construct
  misc_feature 1..1905: note = Description of Artificial Sequence: Synthetic coding sequence
  source 1..1905: mol_type = other DNA
atgacacctatactgactgtgctgatatgtttgggactaagcctgggcccaaggacccatgttcaggccggacacttacctaagcccacattgtgggcggagccgggttcggtgataacccaaggttcccccgtaacccttagatgtcagggaggtcaggagacgcaggaataccgcctgtacagagaaaagaagactgccctgtggatcacacgcattccgcaggagctagtgaagaagggtcaatttccaatcccctcaatcacctgggaacacgccggacgttatcggtgctactatggatccgacacggccggaagaagcgaaagtagcgacccactggagctggtcgtcacgggtgcatatataaagcctacacttagcgcacagccttcccctgtggtgaactcaggcggtaatgtgattctgcagtgtgattcccaggtcgcttttgatggattcagtctgtgtaaagagggagaggacgagcatccccagtgcctcaatagccagccccacgccagagggagctcccgtgccatcttcagtgtaggacccgtctcaccctctcgcagatggtggtatcgatgttacgcttacgacagtaacagcccctacgagtggtcactaccatctgatctgctggagctccttgtcctcggagtgtccaagaagcccagtctgagtgttcaacccggaccaatcgttgctccggaagagaccctgaccctgcagtgcggctccgatgccggatataatcgctttgtgctgtacaaagacggtgagcgagattttctgcagctcgcgggtgcccaaccacaggccggtctgagccaggcaaatttcacactcggccctgtctctagatcctatggtggtcagtacagatgctatggcgcacataatctgtcgtcagagtggtcagcccctagtgacccattagacattctcatcgccggacagttctatgatcgagtttctctttctgtgcaaccaggccctacagtggccagcggagagaacgtaacactgctctgtcagtcacagggttggatgcaaactttcctgttgacaaaagagggggcagcagatgatccatggaggcttcgtagcacataccagagccagaagtaccaggcagaatttccaatgggacctgtgacgtccgctcacgcaggcacctaccgctgttatgggtcccagtcttctaagccttacctgctgactcatccatccgatcctttggagttggtagtgagcgccggaccagaggaccaacctctcaccccgacgggctccgatccccagtcagggttggggcgtcatctcggcgtggtcatcggcatcttggtagcggtgatcctgctgctactgcttttgctgctgctgttcctcattctgcggcaccgcaggcagggcaaacactggaccagtactcaacgaaaggctgactttcagcatcctgccggtgccgtcggcccagagcctacggatcgtggcctgcagtggcgcagttccccggctgctgacgcccaagaggaaaacctgtatgcagctgtcaagcacactcagcccgaagacggggttgaaatggataccaggagtccccacgatgaagaccctcaagctgtgacttacgcagaagtaaagcacagcagaccacggagagagatggccagtcctccctcgcccctgtctggtgaatttttggacaccaaagatcgtcaggccgaggaggatagacagatggatactgaagcagccgcttcagaggcgccacaggacgtcacatacgcacagctgcactctctgactcttaggcgcgaagcaactgaaccacccccatcacaagagggcccttcccctgccgtgcccagtatttacgcaaccctggcaattcattag

SEQ ID NO: 228437 - DNA, 1953 bp, synthetic construct
  misc_feature 1..1953: note = Description of Artificial Sequence: Synthetic coding sequence
  source 1..1953: mol_type = other DNA
atgaccccaatcctgaccgtcttaatctgtctgggcctcagcctgggtcctcgcacacacgtccaggctggacatctcccaaagccaaccctctgggcggagccaggctctgtcatcacgcaaggctccccagtgaccttgagatgtcaggggggacaggagacacaggagtataggctttacagggaaaagaagacagcactgtggatcacaagaatccctcaagagctggttaagaagggccaattccccatcccatctatcacttgggagcatgctgggaggtacagatgctattacggctcagacaccgctgggcgatccgagtcctccgatcccctagaactcgtggttaccggcgcatacatcaagcccacactgtccgcacaacctagtcctgtcgtgaacagcgggggaaatgtgatcctccagtgcgatagccaggtggcctttgacggcttcagcctgtgtaaagagggggaagatgagcatccgcagtgcttaaactcacagccccacgcccgtggctcctcaagagctatcttctccgtgggaccggtttctccatccagaagatggtggtacagatgctacgcctatgattccaactcaccgtatgaatggtccctgccttcagacctgctcgagctgttggtcctgggcgtgagtaagaagccgagcctatctgtccagccagggcctatagtagctccagaagagactctaactttgcaatgtgggagcgacgcaggatataacagatttgtactctataaggacggcgagcgggatttcttacagcttgccggtgctcagccccaggctggcctgtcccaggctaatttcactctggggcctgtgtccagaagctacgggggacagtatcgttgttacggcgcacacaaccttagcagtgagtggtccgcgccatcggacccccttgatatcctcattgctgggcagttttacgatagagttagtctgtctgtgcaaccaggacctaccgtggcctctggggaaaatgtgaccctgctgtgccagagccaggggtggatgcagaccttcctgctgacaaaggagggggctgccgacgacccctggcggctgaggagcacttatcagtcacaaaagtaccaagccgaatttcccatgggtccagtaacctcagctcacgcaggaacgtatagatgttatggttcccaatcctctaaaccatacctccttacgcacccctccgatcccctggaacttgtcgtgtccgggccttcaggaggcccatcatcacctacgacaggcccaacttccacatccggccctgaggatcagcccctgactccgaccggctcagatcctcagtccgggctggggaggcatcttggggtggtgataggaattcttgtcgccgttattctgttgctactgctgctgctactactctttctgatcttacgccatcgtaggcaggggaagcattggaccagcacccaaagaaaggcagattttcagcacccagctggcgctgtagggccagaacctaccgatagaggccttcagtggagatcctccccggctgccgacgctcaggaagagaacctgtacgctgcagtgaaacatactcagccagaagacggcgttgaaatggatactagatcgcctcatgacgaagatcctcaggccgtgacgtacgcggaggtgaaacactctagaccgcgacgggaaatggcctcccccccaagcccactttcgggcgaattcctggacactaaggaccggcaggctgaggaagaccgacagatggacaccgaagccgcagctagcgaggcccctcaggacgtgacgtatgctcagcttcactccttaacattgcggagagaagccaccgagccgcctccaagccaagagggtcctagtcctgcagttccaagcatatacgccacactggctatccattag

SEQ ID NO: 228438 - DNA, 1533 bp, synthetic construct
  misc_feature 1..1533: note = Description of Artificial Sequence: Synthetic coding sequence
  source 1..1533: mol_type = other DNA
atgacaccgattttgaccgttctgatatgcttagggttgagtttaggaccacgcacccatgtccaggccggacacctgcctaagcctactctttgggcagagccaggatccgtgataacccaaggaagtcctgtgaccctcagatgccaaggaggccaagaaacccaggagtacaggttatatcgggagaagaagaccgcactctggatcactcgcatcccccaggaactcgtgaagaagggccagtttccgattccctccatcacgtgggagcatgccggtcggtaccgatgttattatggatcagatacagctgggagatcagaatcctcggacccactcgaactagtggttacaggggcttatataaagcctacactttccgcacaaccatcgcctgtcgtaaattccggcggaaatgttattctccaatgcgactcacaggttgcttttgacgggttttcactttgcaaggagggtgaggatgagcacccccagtgcctaaattcgcagccccatgccagggggtccagtagggcaatttttagtgtggggccagtgtccccatcacgccgatggtggtaccgatgctacgcatatgacagtaacagcccatacgaatggtctctgcccagcgacttgctggagctcctcgttcttggggtgtcaaagaagccttctttgtccgttcaacccggtccaatcgttgcccctgaagaaacgctgaccttgcagtgcgggagcgatgccggatacaatcggttcgttctttacaaggacggtgagagagacttcctgcagctggcgggagcccagccacaggctggactatctcaggctaacttcacccttggcccagtgtctcgcagttatgggggacagtacaggtgttatggggcacacaacctgtcatcagaatggagcgcgccttctgatcccctcgacattctgatagccggacaattctatgatcgcgtctcattgagcgtgcagccaggtcccaccgtcgccagcggcgaaaatgtgactttgctgtgccagagccagggttggatgcagacatttctcctcacaaaagaaggcgcagctgacgacccatggcgcttacgttccacatatcagtcacaaaagtatcaggcggaattcccaatggggcctgtcacctcagcccacgctgggacgtacaggtgttacggctctcaaagttcaaagccttatttgctgactcatccatccgaccccttagagctggttgtttcgggcccatcaggaggcccttccagcccaaccacaggacccaccagtacgagcggccctgaggatcaacctctgacgcccaccggcagtgacccgcagtctggtctgggtcggcacctgggtgttgtcatcggaatactggtcgcggtaattctgctgctcttgctgcttctcttgctttttcttatcctgcgccatcgcaggcaggggaaacactggacctcaagccctgcacaacttccaatgcctaggaaaaagacctccatgctcccctag

SEQ ID NO: 228439 - DNA, 1797 bp, synthetic construct
  misc_feature 1..1797: note = Description of Artificial Sequence: Synthetic coding sequence
  source 1..1797: mol_type = other DNA
atgactccaattgtgacagtacttatctgtcttggactgtctctggggccaaggactcatgtccagaccgggacgatcccgaagccaaccttgtgggccgagccagactcagtcatcacccagggcagcccggtgactctgagctgccagggatctttagaagcgcaggagtaccgactttacagggaaaaaaagtccgctagctggatcacccgcatcagacctgagctggtgaaaaatggtcaatttcacatcccaagcatcacctgggaacacacagggagatacggatgtcagtattactctcgcgcacggtggagcgagctgagcgatcctctcgtattggtcatgactggcgcttacccaaaacccacccttagcgctcagccttctccagtcgtgacatctgggggacgtgttactctgcaatgtgagtcccaggtggccttcgggggttttatcttgtgcaaagaaggtgaggaagaacacccgcagtgtttgaatagtcagccccacgccaggggctcgagtagagcaatatttagtgtcggaccggtctcccctaataggagatggagccatcggtgctatggatatgacctgaacagcccctacgtgtggtcttctccatccgacctcctagaactgttagtccccggagtttcaaagaagccgagcctctcggtgcagccagggccagttgtagccccaggcgaaagcctcacactgcaatgcgtgagtgatgtgggctatgatcggtttgttctgtataaggaaggcgaaagggacctgaggcagcttcctggacggcaaccacaagcagggctatcacaggccaacttcaccctcggccctgtcagtcggagttacggcggacagtatcggtgttacggggctcataacctgtcaagcgagtgtagtgcccctagcgatccccttgacatcttaatcactggccagatccgtggaactccctttatctctgtccagccgggaccgaccgtggcttctggcgagaacgtcaccttactttgccaaagttggagacagtttcatacatttctcctgacaaaagccggtgccgcagacgcacccctgcgactcaggtccattcatgaataccccaagtaccaggctgagttccctatgtcaccagtgacatcagcacacgcgggaacatacaggtgctatggctccctgaactcagacccctacttactcagccatccttctgaaccgttagagctggtggtcagtggacccagtatggggtcctctccacccccaactgggcctatctcaacgccggctgggccagaagaccaacctctgacaccaaccgggagcgacccccagagcggtctcggtagacatttgggagtcgtcataggcatcttggtcgctgtcgtgctgttgctgctgctgcttctgctgctgtttttaattttgcgacatcgcagacaaggtaaacattggacctccacccagcgcaaggccgacttccaacatcctgccggtgcggttggtccggagccaactgacagaggattgcagtggagaagctcacccgctgcagatgcccaggaagagaacctgtacgctgcagtgaaggacacacagcccgaagacggcgtagagatggacacacgcgcagctgccagcgaagctccacaagacgtgacctacgcccagttgcatagcctgaccctgcgaagaaaggctactgagccacctccatcacaggaacgcgagcctcccgctgaaccttcgatctatgccaccctagccatccattag

SEQ ID NO: 228440 - DNA, 1449 bp, synthetic construct
  misc_feature 1..1449: note = Description of Artificial Sequence: Synthetic coding sequence
  source 1..1449: mol_type = other DNA
atgacaggagcttacccaaaacccacactttctgcccagccgagcccagtggttacctccggcggacgcgtgacactccaatgcgagtcccaggtcgcctttggcggattcatcctctgcaaagagggggaggaagagcaccctcaatgcctcaacagtcagcctcatgcaaggggttcatcgcgcgctatcttcagcgtcgggccagtgagtcccaatagaaggtggagccatagatgctacggatacgacctgaactccccctacgtttggtcctctccctcagacctgctggagctgctggttcctggtgtatctaagaagccctcgttgtctgtgcagccaggtcccgtggtcgctccgggagaatctttaacgctccagtgcgtgagcgacgttggttacgaccgcttcgtgctgtacaaagaaggcgagagggatctacgtcagctccctggacggcagccacaagctggtttatcacaggcaaacttcaccttggggcctgtgagtaggagttatggagggcagtatcggtgttacggagcgcacaatctgagttctgaatgctccgccccatctgaccccctggatatcctgataaccggccagattaggggtacaccgttcatctcagtccagcccggacctacagtcgcctccggagagaatgtcactctgctgtgtcagagttggagacaatttcacacttttctgttaaccaaagcaggagccgctgatgcacctctgagactgcgatcgatccacgagtaccctaaatatcaagcggagttccccatgagtccagtgacatcagcccatgccggtacataccggtgttacggctctctgaacagcgatccctaccttctctcgcacccctcagaaccgttggagctagtggttagcggcccaagcatgggctcttcgccacccccaacagggcctatttccacaccagccggtcctgaggaccagcctttgacgcccacaggcagtgatcctcagagcggattaggcagacatctaggcgtggtaatcgggatactcgtggccgtcgtactcctgttactgctcctgctgctgctatttctgatacttcgccatagaagacaaggcaagcactggacctcaactcagcggaaggctgactttcaacatccagcaggagctgtcggacctgagccgaccgatcgcggattgcagtggcggtcttctccagccgctgatgctcaagaagagaatctgtatgccgctgtcaaggatacccaaccagaggatggcgtggagatggatactagagccgcagcttccgaggcaccacaggatgtcacttacgcgcagttacactcgctgactttacgcagaaaggccaccgagcctcccccatctcaggagagagagcctccagccgaaccttcaatctacgccactctcgccattcattag

SEQ ID NO: 228441 - DNA, 1932 bp, synthetic construct
  misc_feature 1..1932: note = Description of Artificial Sequence: Synthetic coding sequence
  source 1..1932: mol_type = other DNA
atgacccccgctctcaccgcattactctgtctggggctgagcttgggcccaagaacacgagttcaagctggcccatttcctaagcccacgctttgggccgagcccggtagcgtgatatcatggggctcccctgtcaccatctggtgtcagggtagtcaggaagcccaggagtaccgcctgcacaaagaaggcagtcctgaacccctcgatcggaataatcctctcgaacctaagaataaagccaggttcagcatcccttccatgaccgagcaccatgcaggaaggtatagatgccactattattcctcagcaggctggtccgagccctcagacccactagagatggtgatgacaggtgcatattctaaacccaccttgagcgctttgcccagccctgtcgtggcctctgggggtaacatgacgttgcgatgcggtagccagaaagggtatcatcattttgtcctaatgaaggagggcgaacaccagcttccacgcacacttgatagccaacaactgcacagccggggttttcaagctctgtttccagtcggccctgtgacaccaagtcaccgctggcgattcacgtgctactactattacaccaatacaccatgggtgtggtcacacccatctgaccctctggaaatcctcccatcaggagttagccggaaaccctccctgctgacactgcagggtcctgttctagcgccaggccaatcccttacacttcagtgtgggagcgacgttggatataaccgtttcgtgctctacaaggaaggagaaagggactttctgcaaagacccggtcagcaacctcaggcaggactcagtcaggctaatttcacactgggacccgtatccccctccaacggaggtcagtatcgttgctacggggcacacaatctgtccagtgagtggtcggcgccttcagatccgctcaacatccttatggcgggacagatctacgacactgtgtcactcagcgctcagcctggcccaacggttgcctccggagagaacgttaccctgctgtgccagagttggtggcaatttgatacttttcttctgaccaaagaaggagctgcccatcctccactccgcctgcggtcaatgtatggcgcacacaagtatcaggctgaatttccaatgtcacctgtgacaagcgcacatgcaggtacctatcgctgctatggctcttactcaagcaacccacacctattaagccaccctagcgagcctctggagctggtagtctctgggccagaggatcagcctctgaaccccccaggctccggtcctcagaaccccccaggtctcgggtccggtgcgggtacacgggcagcagggctgggccgttatctggaggtgctcattggcgtgagcgtggcatttgtgctgctcttgtttctcctgctgtttctgctccttagacgacagcgccattcgaaacaccgtacctctgatcagagaaagacagatttccaaaggccggcaggcgctgccgagactgagcccaaagatagagggctgctccgacggtcatctcccgcagctgatgtccaggaggaaaacctttacgccgctgtgaaagatacgcaaagcgaggatagggtggagcttgacagtcagtcaccccatgacgaggacccacaagctgtgacttacgcccctgtgaaacacagttcccccaggagagaaatggctagtcctccatcctctctttctggcgaattccttgacaccaaggatcgacaagtcgaagaggatcgacagatggataccgaagcagcagcatcagaagcgtcacaggatgtgacttatgcacagctgcacagcctaaccctgcgcaggaaggccactgaacctccccctagtcaggaaggtgaaccacctgccgagcccagcatctatgccaccctggccatccactag

SEQ ID NO: 228442 - DNA, 1896 bp, synthetic construct
  misc_feature 1..1896: note = Description of Artificial Sequence: Synthetic coding sequence
  source 1..1896: mol_type = other DNA
atgacacccgcactcacggccctgctctgtctgggtctgtccttaggccctcggaccagagtccaggctggaccattcccaaaaccgactctgtgggcagaacccggttcggtcattagttggggttcccccgtcacaatatggtgccagggttcgcaggaggctcaggagtaccgtctgcacaaggagggtagtcccgagccattagacagaaataatcctctggaaccaaaaaataaggccagatttagcattccttctatgacagagcaccacgcagggagatatcggtgccactactactcatctgccggttggtcagagccatccgatccattagagatggtgatgacgggcgcatactccaagcccaccctgtccgcacttcctagcccggtagtggcgtctggcggaaatatgactctacgctgtggatcccaaaagggatatcaccattttgtcctaatgaaagagggcgaacatcagctcccaaggaccctggattctcagcagctacactcacggggttttcaggccctgttcccggttggacctgtgaccccctcacaccggtggcgctttacatgctattattattacaccaacacaccctgggtgtggtcccacccatctgaccctctggagatacttccaagcggtgtgtcccggaagccgagcctgctgactctccaagggcctgtactcgcccctggacagagcttgactctgcagtgcggctccgacgtaggatacaacagattcgtgttgtacaaggaaggcgagagggactttctgcagcgccctggacaacaaccacaagctggcctgtctcaagctaatttcactctaggacccgtcagtccatctaacggcggacagtacaggtgctatggagcccataatctctcatcagaatggtctgccccatccgaccccctgaatattctgatggctggacagatctatgacaccgtctccctgagcgcacagcccggacccacagttgccagcggcgaaaacgtgacactgctgtgtcagtcatggtggcaatttgatacattcctgctcacaaaagaaggcgcagctcacccacccctaagacttcggtccatgtacggagcgcataagtaccaggcggaattccctatgagccccgtgaccagcgctcacgctgggacatacaggtgctacggaagttactcctccaacccgcacttactatctcaccccagcgagcccttagagctggtggtcagcgggcattctgggggatcatccttgccaccaactgggccaccatccaccccagggcttggtaggtacctggaggttctgattggagtgtctgtggcctttgtcttgctgctgtttctgttgttgtttctgttactgcgaagacagcgccacagtaagcataggacctccgatcagaggaagactgatttccaacgccctgccggagctgccgagactgagccaaaggacagggggctgctgcggaggagcagtccggcagccgacgtgcaggaggaaaacctgtacgccgctgttaaagacacacaatcggaggacagggtggagctggatagccaaagccctcacgacgaggaccctcaggcggtgacctacgccccagtgaagcactccagtcccaggcgagaaatggcctccccaccaagtagtctgtcgggagagttcctagatacaaaggacagacaggtagaagaggatcgacagatggacactgaggccgcagcgtctgaggcttcacaagatgtgacttacgctcagctccacagcttgacattaagaaggaaggctacagaaccccctccttcccaagagggggagcccccagcagaaccctccatctatgctaccttggcgatccattag

SEQ ID NO: 228443 - DNA, 1947 bp, synthetic construct
  misc_feature 1..1947: note = Description of Artificial Sequence: Synthetic coding sequence
  source 1..1947: mol_type = other DNA
atgacacctgccctgacggcgctcttgtgtctcggactgagtttgggccctagaactcgagttcaagcgggtccattccccaagcctactttgtgggctgaacccggaagcgtgatctcttggggatcccccgtcacaatctggtgccagggcagcctggaagcacaggaataccagctggacaaggagggctctcccgagcctctggacagaaacaacccgctggagcccaagaacaaggccagattcagtatcccttccatgacccagcaccacgccggtcgatacagatgccattattactcctctgctggatggagtgaaccaagtgatcccttggaactggtgatgacgggagcatattccaagcctactctgtccgcccttccaagtccagtggtagctagcggcggtaatatgactctgaggtgcggaagtcagaagggatatcaccattttgtgctcatgaaagagggcgaacaccagctgcctcggaccctggactcccagcagctgcatagccgcggtttccaggctctgttcccagtgggaccagttaccccatcacatagatggcgatttacctgttactactattacaccaatactccctgggtctggtcgcacccctcagaccctttggagatcctccccagcggtgtaagtcggaaaccatctcttctgaccctccaggggccagtgttggcgccaggccagagcctcaccttgcaatgcggctcagatgtggggtataaccggttcgtgctctacaaggaaggggagagggatttccttcagagacccggtcaacagccacaggctggactctcacaggcgaatttcacattggggccagtaagcccttccaacggtggtcaatatcggtgttacggcgctcacaatctgtcaagtgaatggtcggccccttcagaccctctcaacatcctcatggcaggccagatttatgacacagtttcgctctctgcccagccgggtcctacagtggccagtggtgagaacgtaactctgttgtgccagagctggtggcagttcgacaccttcttactaaccaaagaaggggcagcacatccgccactccggctccggtccatgtacggcgcacacaaataccaggccgaatttcccatgtctccagtgacgtcagctcatgccggtacatacagatgttatggatcatacagtagtaaccctcatctgctgtctcacccgagcgagcctctagaacttgtggtgtcgggacacagtggcggtagcagcctgcctccaacaggacccccaagcacccctgggggtccagaagaccagccgctgaaccctcccggttcaggtcctcaaaatagactgggccgttatttagaggtgctgatcggtgtgagcgttgccttcgttctcttgttattcctactgctctttctgcttcttcggagacagaggcactctaaacatcggaccagcgaccaaaggaaaaccgactttcagcgaccagcgggagcggcagaaaccgagccaaaagacaggggtcttctgcggaggagttctccagcagcagatgtccaggaggagaatctctatgctgctgtcaaagacacccagtccgaggatagggtggagctcgatagtcaatcccctcacgatgaggacccgcaagccgtaacttacgctccagtaaaacatagctctccgcgtcgggagatggcctcccctccttcgtctctgtcgggggaattcttggataccaaggatcggcaggtcgaggaagacaggcagatggatacggaggcagccgcaagtgaagcatcacaggatgtgacttacgcacaacttcactccctcaccctgcggagaaaggccacagagccacccccttcccaggaaggcgaacctcctgctgagccatccatctatgctaccctcgccatacactag

SEQ ID NO: 228444 - DNA, 1896 bp, synthetic construct
  misc_feature 1..1896: note = Description of Artificial Sequence: Synthetic coding sequence
  source 1..1896: mol_type = other DNA
atgacgcccgctctgactgctctgctgtgtctggggttatctctgggcccacgaaccagagtgcaagcagggccattcccaaagccaaccctgtgggccgaaccagggagcgtcatcagttggggctcacccgtaacaatttggtgccagggttctcaggaggcccaggagtaccggcttcataaagagggaagtccagaacccctcgaccgcaataatccattggaaccaaagaataaagctagattctctattccatccatgaccgaacatcacgccggacggtacaggtgtcattactactccagcgcaggctggtcagagcccagcgaccccctcgaaatggtgatgaccggagcctattctaagcctacacttagcgccctgccatctccagtggtggccagtggtgggaacatgaccctgcgctgcggaagccaaaaaggctaccaccatttcgtgttaatgaaggaaggcgagcaccagttgccgagaacactggactcccagcaactacattccagaggcttccaggccctcttcccagtaggtccagtaacaccatctcatcgttggaggttcacatgttactactactacaccaacaccccatgggtgtggtcccaccctagcgatccccttgaaattctgcccagcggcgtctctagaaagccgtccctgctcacactccagggaccggtgcttgcgcctggacagagtctgacactgcagtgtgggtcggatgtaggatataatcggtttgtgctatacaaagagggagaacgagattttttgcaacgcccaggacaacaacctcaagccggactgtcacaggccaactttacactagggcctgtgagcccgagtaatggtggacaataccggtgctacggcgcacacaacctcagttctgagtggtccgcgccatccgatcccctgaacatattgatggccggtcagatctacgataccgtgtctttgagcgctcaacccggtcctaccgtggcaagtggcgagaatgtgaccttactctgtcagagctggtggcagtttgacaccttccttctgacaaaagaaggagccgcacacccacctttaagactccgaagcatgtacggagctcacaaataccaggcggaattccccatgagccccgtgacatcggcacatgccggaacttaccggtgttatggctcctattcatcaaacccgcacctgctttctcatccgagtgagccactcgagcttgtcgtttctgggcacagtggtggctccagcctgcccccaacgggcccaccgagcacaccaggtctggggcgatatttggaggtgctcattggggtttctgttgctttcgtgctcttactctttctgctcctattcttacttctgcggagacaacggcactctaagcacaggacctcagaccagcggaaaactgattttcagcgtcccgctggcgctgccgaaacggagcctaaagaccgcggtctgttaagacggtcaagtcctgcggcagatgtacaagaggagaatctgtatgctgctgtgaaagacactcagtcagaggatcgggtggagctggattctcaatcaccacatgatgaggatcctcaggctgtgacctacgccccagttaagcactcctcacctcgtcgggagatggcctcccccccttcgtcactatccggggagtttttggacaccaaggatcgtcaggtggaggaggacagacagatggatacggaggccgctgcctccgaggcctcacaggacgtgacttatgcgcagctgcattctcttaccctccgaagaaaggccacggagccgcctccgtctcaggaaggcgagccacctgctgagccctcaatctatgcaactctcgcaatccattag

SEQ ID NO: 228445 - DNA, 477 bp, synthetic construct
  misc_feature 1..477: note = Description of Artificial Sequence: Synthetic coding sequence
  source 1..477: mol_type = other DNA
atgacccccgcattgaccgcccttctgtgtctggggttatccctgggacctaggacccgagtgcaagccggaccttttcctaaaccaacgctgtgggccgaacctggttccgtgatctcgtggggctcaccggtgaccatctggtgccaggggagccaggaagctcaggagtataggctgcacaaggagggctctcccgaaccccttgaccgcaacaacccattggaacctaaaaataaggcaaggttttctattccgtccatgactgagcatcacgcgggacgatacagatgccactactacagttctgctggctggagcgagcccagtgaccctttggagatggtcatgacgggcgcttatagcaaacctactttatctgcccttccctcacccgtcgttgcctccggcggtaatatgaccctgaggtgtggaagccaaaagggctatcatcactttgtgcttatgaaagagtag

SEQ ID NO: 228446 - DNA, 1347 bp, synthetic construct
  misc_feature 1..1347: note = Description of Artificial Sequence: Synthetic coding sequence
  source 1..1347: mol_type = other DNA
atgatccccaccttcacggcccttttgtgtcttggcctctctctgggtccgaggacccacatgcaggctggcccattgcccaaacccaccctttgggctgagccaggttccgtcattagctggggaaattctgtgaccatctggtgccagggcactctggaggcaagggagtacaggcttgacaaggaggagtcaccagccccttgggataggcaaaatcccttggagcctaagaacaaggccagattttctattccatctatgacggaagattatgcaggccgataccgatgttactacaggtcgcccgtggggtggtcccaacctagtgatcctcttgagcttgtcatgacgggggcttacagtaagccgaccctttctgcccttccatcccctctagtgacgtctggtaagtccgtgaccctattgtgtcagagtcgctcccccatggacacgtttctgctgattaaggagagagctgcacatcctcttctgcatttgagaagcgagcatggtgcacagcaacaccaggccgagtttcctatgagccccgttacttcagttcacggaggtacctatcgatgcttcagttcacatgggttctcccattatctgctgtcccaccctagcgacccactcgagttaatcgtgtcaggctcactcgaagatccacggccatctcccacaagaagcgtgtccaccgctgccggtcccgaagaccagccactcatgcctaccggctctgttcctcatagcgggctcaggcggcattgggaagtgttgatcggagtcctcgtggttagcatcctcctgctgtccctactgctgtttctcttgctgcagcactggaggcagggcaaacacagaacccttgcccagcggcaggccgattttcagagaccaccaggcgcagcagagcccgagccgaaagacggcggactccagagacgatcctcacctgccgcagatgtccagggggaaaacttctgcgcggctgtgaagaacactcaacccgaggatggtgtagaaatggacaccagacaatcaccccatgacgaggatccccaggccgtcacctacgcgaaggtgaagcatagtagacccagaagagagatggccagtcccccttctcccctgtctggggagttcctggataccaaggacagacaggccgaggaggaccggcagatggacactgaggcagctgcaagtgaggctccgcaggatgtaacatatgcccagttacactctttcacactccggcagaaagcaactgagccacccccatcccaggagggcgcttccccggcagagccctcagtgtacgccacacttgctatccattag

SEQ ID NO: 228447 - DNA, 1347 bp, synthetic construct
  misc_feature 1..1347: note = Description of Artificial Sequence: Synthetic coding sequence
  source 1..1347: mol_type = other DNA
atgatcccgacgtttaccgcactgctttgcttaggtctgagccttggaccacggacacacatgcaagctgggccactgcctaagccaaccctgtgggctgagccaggaagcgtcatttcctggggtaactctgttacgatctggtgtcaggggactctggaggcaagggaataccggttggacaaggaggaatcccccgctccctgggaccgtcagaaccctcttgaacccaaaaacaaggctcgattttctattccttcaatgacggaagattacgccggtcggtatcggtgctactacaggagtcctgtcggctggtcccagccctccgatcccctggaactggtcatgactggtgcgtactctaaacccactttgtccgcattaccctcccccctcgtcacgtcaggtaagagcgtaaccctgctctgccagagtaggagtccgatggatacattcctgttgataaaggagcgcgcagcacacccattactgcatctccgcagcgaacacggggctcagcagcatcaggccgagttcccaatgtctcctgtgacatccgtccacggaggtacctatagatgtttcagctcccatggtttttcccactacctcctatcacacccttctgatcctttagaactcatcgttagcggcagtttggaggaccctagaccttcaccaacaaggtccgtgagcaccgccgctggcccagaggaccagccgctgatgcccaccggttccgtgccacactccggcctccggagacactgggaggtgctgataggggtgctagtagtgtccattctgctgctttctttgctgctgttcctcctgttgcagcactggcgccagggaaagcaccgaactttggcccaaagacaggcagattttcagaggccccctggggctgcggaacccgaaccaaaggacggaggcctacagcgaaggtctagccctgccgctgacgtgcagggggagaacttctgtgcagctgtcaagaacactcagccagaggatggagtggagatggatacacggcagtccccacacgacgaagatccacaggccgtgacatatgccaaggtaaaacactctcgcccacggagagaaatggctagtcccccttcccccttgtccggcgaattcttagacacaaaagaccgacaagccgaggaagataggcaaatggatacagaggctgcagccagcgaggctccacaggatgttacatatgcccagctccactccttcactctgaggcagaaagcaactgagccacccccaagccaggagggcgctagtccagccgagcctagtgtttatgcaaccctggctatacattag

SEQ ID NO: 228448 - DNA, 1773 bp, synthetic construct
  misc_feature 1..1773: note = Description of Artificial Sequence: Synthetic coding sequence
  source 1..1773: mol_type = other DNA
atgaccttgacactgagcgtgctgatctgcctcgggctttctgttggtccaagaacgtgtgttcaggctggaaccctgccaaagcccaccttgtgggcagagccggcatcagtaatcgcccgtgggaagcccgtgacactgtggtgccaaggtcctttggaaactgaggaatatcgcttggacaaagaggggctcccttgggccagaaaacgtcagaatccactggaacctggggcaaaagccaagtttcatataccatctaccgtttacgacagcgcaggtcggtacaggtgttactatgaaacccctgccggatggtccgaaccatccgatccactggagctggtcgccacagggttttacgctgagcccacgttgttggcactaccgtcaccagttgtggcgtccggaggcaacgtcaccctgcaatgcgacactctcgacggtctgctgacattcgtcttggtggaggaggaacagaagcttcccaggaccctctactctcagaagctcccgaaagggccatctcaggcgttatttcctgttggacctgtgactccatcctgtcgatggcggtttaggtgttattattattatagaaagaatcctcaagtgtggtcaaacccatccgaccttctggagattcttgtgccaggcgtttccagaaaacccagcttgctcattcctcaaggaagcgtggtggcccgaggaggttcccttactttgcagtgccgaagcgacgtagggtacgatatattcgtgctgtataaagagggtgagcacgacctcgtccagggaagtgggcagcagccgcaggcaggactgagccaggccaactttaccctgggacccgtttccagaagtcacggaggtcaatacagatgttatggcgctcataatctgtcaccaaggtggagtgccccatctgatcctctcgacattctgatcgcaggtctgattcccgacatcccggctttgtcagtacagcccggtcctaaagtcgcgtcaggtgagaacgttacgttactctgccaatcctggcaccagatcgatacattctttctgaccaaggagggcgctgcccaccctccactgtgtctcaagagcaaatatcagtcctatcgccaccaagctgaatttagcatgtcaccggtgacatctgcccagggtggtacctatcgatgctattctgctatccggtcttacccatatctgctctcaagtccatcctatccacaggaattggtagtttccgggccttccggtgatccttccctatctcctactggctccacccctaccccagggccagaagatcagccactgaccccaaccggtctggatccgcagagcggcctcggcaggcacttgggcgtagttacaggggtctctgttgcgtttgtgttgctgctgttcctgctcctcttcttgctcctgaggcatcggcaccaatccaagcaccgaacgtccgcacatttctaccgcccagccggagccgcagggcctgagcctaaagatcagggactgcaaaagagggctagtcctgtggcagatatccaggaagagattctcaatgctgcagtgaaggatacacagcctaaagacggtgtggagatggacgcccgagctgccgctagcgaggcccctcaggatgtgacctacgctcagctccattccctgacactccgcagggaggcgactgaaccccctccttcacaggaacgcgaaccacctgctgaaccctcaatttacgctcccctggctattcactag

SEQ ID NO: 228449 - DNA, 1776 bp, synthetic construct
  misc_feature 1..1776: note = Description of Artificial Sequence: Synthetic coding sequence
  source 1..1776: mol_type = other DNA
atgactctgacactctccgtgctgatttgtctggggctctccgttgggcctcgaacatgcgtacaagctgggacactgccaaagccgactctgtgggccgaaccagctagcgtgatcgcaagaggtaagccagtgactctgtggtgccagggacccctagagaccgaagagtatcgcttagacaaggaaggcttgccttgggccaggaagaggcagaatccgcttgagcccggagctaaagccaagttccacattcccagcacagtgtatgactccgccggaaggtatcggtgctattatgagaccccagcaggatggtctgagccctcagaccccttggagcttgtcgctaccggcttctacgcagagcctacacttctggcactgcccagtcctgtcgtagcgagtgggggaaatgtgacactgcagtgcgacacactggatggcctgcttaccttcgtgttggtagaagaagaacaaaaactgccccgaaccctgtatagtcagaaactgccaaagggtccatcccaggctctgtttcccgtgggccctgtgaccccatcctgcagatggaggtttaggtgttattattattaccgcaagaacccgcaggtgtggtccaacccttcagatttactcgagattctggtgcccggagtgtctaggaagccttcacttcttattcctcaggggagcgttgtggcccgaggtggatcacttaccctgcagtgtagatccgatgtgggctacgatatcttcgtcctctacaaggagggggagcacgatttagtacagggctccgggcagcagcctcaggccggactgtcacaggccaattttaccctgggaccggtgtcacgaagtcacggaggacagtaccgttgctacggggctcataatctttctcctcgctggtccgccccttcggatcctctagatatcctgatagctggccttatcccagatattcccgctctctctgtacagccaggccctaaggttgcttctggggagaatgtgactctgctatgccagtcgtggcatcagatagatactttttttctcacaaaggaaggtgccgcacacccacccctgtgtcttaagtctaagtaccagagttaccgccatcaggcagagttttctatgtcccccgtgacatcggcccagggtggcacttataggtgctactccgccattagaagttacccatatttgctctcctccccctcctatccccaggagttagtggtctctggcccatccggagacccaagcctgtctcctacggggtccacccctacccctgcaggccctgaggatcaacccctaacccctactgggctcgatccacagtcaggattgggaagacacctaggggtggttaccggtgtgtctgtagcttttgtgcttttgttgtttctcctgctgttccttctacttcgccatagacaccagagcaaacaccggaccagcgcacatttttacaggccggcaggagcagcaggcccagaacctaaggaccaagggttgcagaagagagcctctcccgtggccgacatccaggaggaaatattaaatgccgcagtcaaagacacccaacctaaggatggcgtcgaaatggatgcacgcgcagcggctagcgaggcccctcaagacgttacgtacgcacagctgcattctctcaccctacgcagggaagccaccgagcctcctccaagtcaggagagggagccacctgcggagccgagcatatatgcgccactggctatccattag

SEQ ID NO: 228450 - DNA, 1869 bp, synthetic construct
  misc_feature 1..1869: note = Description of Artificial Sequence: Synthetic coding sequence
  source 1..1869: mol_type = other DNA
atgacactcactctgagcgtgctcatctgcctgggcttaagcgtgggtccacgcacatgtgtgcaggctggaacactccccaaacccactttgtgggcagagccagcctccgttatcgccagggggaagcccgtgactctgtggtgccagggaccactggagactgaagaataccggctggacaaggagggtctgccctgggctcggaagagacagaatccccttgagccgggtgccaaggccaagtttcacatcccgtcaactgtatacgacagtgccggaaggtacaggtgttactacgagacacccgcaggctggtcagagcccagcgacccactggaactggtagctactgccctgccctccccagtagttgctagcgggggaaatgttactctacagtgtgacacactggacggtcttcttacttttgtccttgttgaggaggagcagaagcttcctaggacgctttattcccagaaactgcctaagggccctagtcaagcactctttccagtgggtcctgtcaccccctcttgccggtggcggttcagatgctactattactatcggaaaaatccacaggtttggagtaaccccagtgacctgcttgagattctggtccccggagtcagtcggaagccaagtttgttaatcccccaggggtcggtggttgcccgaggcggaagtctgacgctgcagtgtcggagcgacgttggttacgacatcttcgtgctgtataaggaaggagagcacgatttggtgcaagggtctggtcagcaaccacaggccggtctctctcaggccaattttactctcgggccagtaagcaggagccatggtgggcaatatcgctgctacggtgcgcacaatctgtctcccagatggtccgcaccatctgaccccctcgacattctgattgcgggtcttatccctgatataccagccttatcagttcagcccggacctaaggttgcttctggtgagaatgttacgctgctgtgtcaatcttggcaccagattgacaccttctttctaactaaggagggcgctgcccaccctcccttgtgcctgaagagcaaataccagtcctacagacaccaggccgaattctcaatgtcaccggttacctctgcacagggcggtacgtacagatgttattccgctatccgcagttacccctatctgctgtcttccccatcctaccctcaggaactggtggtgagcggacccagcggagacccatccctgagccctaccgggtctactcctactccggctggaccagaagaccagcctcttacccctacaggactcgacccacaatcagggcttggtcgccacctaggcgtagtcaccggagtctccgtcgcttttgtcctgctcctcttcttgctactcttcctcctgctgcggcataggcaccaatcgaagcacagaactagtgcccacttttatcgaccagccggtgctgcagggccagaaccaaaggatcagggcctccagaagcgggcatcccccgttgcagacattcaggaggaaatcttaaatgccgcagtgaaggatactcagcccaaggatggagtcgaaatggacgcccgacagtccccacacgatgaggaccctcaggccgtaacatatgccgaggtgaaacattcaagacctcgcagagagatggcctccccccctagcccactgtcaggtgaattccttgacactaaagaccggcaggcagaggaggacagacagatggataccgagagagtcctcagctcacctggcccacaggcctcacctcccccacctagatctctgccgttgacgcttcctcggtgccggctcctgcatctgaagccgccacgcatgtag

SEQ ID NO: 228451 - DNA, 2595 bp, synthetic construct
  misc_feature 1..2595: note = Description of Artificial Sequence: Synthetic coding sequence
  source 1..2595: mol_type = other DNA
atgggatgttggggccagctgttggtgtggttcggtgcagcaggtgccattctgtgctcctcgccaggctcccaagaaacatttctgcgaagctcccctctgccactcgcctccccctctcccagagacccaaaggtatccgccccaccctcaatcctggaacccgcatctccgcttaatagtcccggaacagagggatcctggctgttttctacttgcggcgcatcaggtaggcacgggccaacacagacccaatgcgacggagcttacgctggaaccagcgtagttgtgactgtgggcgcagccggacaactgagaggagttcagttgtggagggtccctggtcccggtcagtacttaattagtgcttacggggctgctgggggaaagggtgcgaagaaccacctgtctagagcacacggcgtgttcgtgtcagctatattctccctgggactgggcgaatctctgtacatcttggtgggacagcagggcgaggatgcatgtcccggaggaagccccgaatcccagctcgtttgcttgggcgaaagtcgcgcagtagaggaacacgccgcaatggatggcagtgaaggagttcccggttcacgtcggtgggccggagggggtggaggtgggggtggtgcgacctatgtatttcgcgtgcgcgcaggcgagctggaacctttactagttgccgctggcggagggggacgagcttacttgaggcccagagatcgcggaagaactcaagcctcgcctgaaaagctggagaaccggtcagaggcccctggctctggagggcgaggtggggctgcaggagggggaggcggttggacatctagggccccttcgccacaagcaggccgttcactgcaagaaggagctgaagggggacagggatgttctgaagcatgggctaccctcgggtgggctgcagccggagggttcggaggaggaggcggtgcttgtactgctggagggggaggcggaggatacaggggcggagacgcttctgaaacagacaacttgtgggcagacggagaggacggcgtgtcctttattcatccaagctcagagttatttttgcagcctctcgctgtgaccgagaaccacggcgaggttgagatacgcagacacctgaactgcagccactgcccactgagggattgccagtggcaggcagaactccagctggccgagtgtttatgtccagaagggatggagctcgctgtggacaacgtgacttgtatggatcttcacaagcccccaggtcccctcgtcttgatggttgccgtcgtggccactagtactttatcgttgctcatggtgtgcggtgttctgatcctggtcaagcagaagaagtggcaaggccttcaggaaatgcgattgccctccccagagctggaactgtctaaactgcggaccagtgctattcggacggcaccaaatccatactattgccaggtggggctgggccctgctcaatcctggcccttaccacccggtgtgacagaagttagtccagcgaatgtgacactcctgagggccctcgggcacggtgcattcggggaagtgtacgagggcctggttatcggattaccaggcgactcgtctccactgcaggtggcgattaagactctgccagagctgtgcagcccgcaggatgaactggatttcttaatggaggctctcattatctctaaatttagacaccagaacatcgttaggtgcgtcgggcttagcctaagggcgaccccccgactcatcctgcttgaactaatgtctggtggggacatgaaatcattcctgagacatagccggccacacttgggccagccctcacctctggtaatgcgggatttgcttcagcttgctcaggacatcgcccagggttgccactatctggaggaaaatcacttcatccatagggatattgccgctcggaattgcctgctttcctgtgctggcccaagccgagtagcaaaaatcggcgacttcggtatggcgagggacatttatagggcctcgtattacagacggggagaccgcgcactattgcctgtcaagtggatgccaccagaagccttcttggaggggattttcactagcaagaccgattcttggagtttcggcgtcttgctgtgggaaatcttcagcctggggtacatgccctaccctggaaggacaaaccaagaagtactggacttcgtggttgggggtggtcggatggacccgcctagaggatgcccagggcctgtctacagaatcatgacgcaatgttggcaacatgaaccagagttgagacccagcttcgcatctattctggaacggctgcaatactgtacacaggaccccgacgtgctcaactctttactgccgatggagctggggccaacacctgaggaggagggtacttcaggacttgggaaccggagtctcgaatgtctcaggcctccacagcctcaggagctctcacctgagaaacttaagtcatggggcggttcccccctgggaccatggttatcctctggcttgaagccactcaagtcgagagggcttcaaccgcaaaacttgtggaaccccacatatagatcttag

SEQ ID NO: 228452 - DNA, 2412 bp, synthetic construct
  misc_feature 1..2412: note = Description of Artificial Sequence: Synthetic coding sequence
  source 1..2412: mol_type = other DNA
atgggttgctggggtcaattactcgtgtggttcggtgcggcaggagccatcctatgtagctccccgggttcccaggagacctttctgcggagctcacccctccccctggcatcaccgtcaccaagagatcccaaggtctcagcccctccttcaattcttgagccagcctcaccactcaattcacccggaacagaaggatcttggctgttttccacatgcggcgcaagtggcaggcacggcccaacccagacacaatgcgatggagcatatgcgggaacaagcgtcgttgtgacagtgggcgctgccggacaacttagaggcgtccagctctggcgcgtacccggtcctggccagtacctcatctcagcatatggcgctgctggtggcaaaggggcaaaaaatcatctgtctcgcgctcacggagtgttcgtgtctgccatcttctccctgggtctgggagagagcctctatatactggtggggcagcagggcgaagatgcctgtccgggagggagccccgagtctcagctcgtttgcttgggtgagagccgagccgtggaggaacacgcagctatggacggcagtgaaggagtgccagggagtagacgatgggcgggtggtggcggagggggagggggagccacgtacgtgttcagagtgagagcaggcgaactcgagcccctactcgttgcggctggaggtggcggacgggcatatttgcgcccaagggatcggggaagaactcaggccagccctgagaagttggaaaaccggtccgaagcgcctggatcagggggacgaggcggtgctgctggcggagatgcttctgagacggacaatctctgggcggacggggaagatggtgtctctttcatacatccatcttccgaattatttctccagccactggcagtaacggagaatcatggagaagtcgaaattcgcagacaccttaattgttcccactgtccgttaagggattgtcaatggcaagctgaactccaactggccgaatgtctctgcccagagggcatggagttggctgtggataatgtgacgtgcatggacctccacaaacctcctggtccactcgttttgatggttgccgttgtggcaacatctacactgagcctgctcatggtctgcggagttctgatcctagttaaacagaaaaagtggcaaggtctacaggaaatgaggctgccttcccccgagctggagctcagtaagctacgcacgagtgctattcgcacagccccaaacccttattattgtcaggtgggtctgggcccagctcagtcatggcccctgccacccggtgtgacggaggtgtctccagcaaatgttactcttctgagggcactgggccacggggcattcggggaggtctatgagggacttgttataggacttccaggagattcatcaccactgcaggttgcaatcaaaaccttgccagaactctgctcgccgcaggatgaacttgactttctgatggaggctctgatcatctctaaattccgccaccaaaatattgtaagatgtgtgggtctctcactccgtgcgacaccccgactgatactcttagagctgatgtctggaggtgatatgaagagcttccttaggcactctaggcctcatcttggtcagcccagtcccctggtgatgcgcgacctacttcagttggcccaagacatagctcaggggtgccattacctcgaagagaaccatttcattcaccgagatattgccgcaagaaactgtctcctgtcttgcgccggtccaagtcgtgtcgcgaagatcggcgactttggcatggccagagatatctaccgggctagctactacagaagaggcgaccgggctctcttaccggtaaagtggatgcccccagaagcctttttggaggggatctttaccagcaagactgattcatggagtttcggcgtgctgctttgggaaattttcagtctgggctacatgccatacccgggaagaacgaatcaggaggtgctggactttgtcgtagggggtggacgaatggatccacccagaggatgcccaggccctgtttatcgaataatgacccagtgctggcaacatgagcctgagctgcggccatccttcgccagtatacttgagcggctgcaatattgcactcaggatccggacgtcttaaactcattgctacctatggaactgggtccaaccccagaagaagagggaacttctggacttggtaataggagcctggagtgcctgcggcctccccagccacaggaactttcgcctgagaaactgaagagctggggtgggtcacccctcggcccttggctctctagcgggctgaagccattgaagtctagagggctccagccccagaacctttggaacccaacctatcgaagttag

SEQ ID NO: 228453 - DNA, 1437 bp, synthetic construct
  misc_feature 1..1437: note = Description of Artificial Sequence: Synthetic coding sequence
  source 1..1437: mol_type = other DNA
atgggatgttggggccagctgttggtgtggttcggcgctgccggagctattttgtgctcaagcccgggatcacaggagacattcctcagatccagccctcttccgctggcgtccccatcccctcgggacccaaaggtgagcgcccctccaagtatccttgagcccgcttcacccctaaactcacctggtaccgaaggatcatggctgttttccacatgtggtgccagcgggaggcacggcccaacccagacacagtgcgacggagcctatgccggaacttccgttgtggttaccgtgggtgctgccggtcaactcaggggtgtacaactttggagagtcccaggcccaggacagtatttgatcagcgcttacggtgctgcaggcggaaaaggcgcaaagaaccacctctcccgggcacatggcgtcttcgtcagcgcaattttctctcttggtctgggagaatccttgtacattttggtggggcaacaaggagaggatgcctgcccgggaggcagtccggagtctcagctggtgtgcctgggagaaagccgggcagtggaagagcatgctgccatggatggaagcgagggcgtgcccggatccagacgttgggcgggtggcggaggaggcggtggcggtgccacctatgtgttccgagtgcgcgctggggaacttgagcctctgttggtcgctgctggtgggggaggacgcgcttatctgaggcctagagatcggggtagaacccaggcatctccggaaaagctcgagaacagaagtgaggccccagggtctggtgggagaggcggagccgctggaggtggcggtggctggaccagccgggcaccgtctcctcaggctggccgtagtcttcaggaaggcgctgagggaggccaaggatgttctgaggcttgggccacattggggtgggccgctgcaggagggttcgggggagggggtggcgcttgtaccgctggaggtggagggggtggctacagggggggagacgcgtccgaaacggacaacctctgggccgacggggaggacggggtgtcattcatccacccctcaagtgagttatttctccagcctttagctgtcaccgagaatcacggagaagtggagatacgtcggcacctaaattgctcacattgtccactccgggactgccagtggcaggccgagttgcagcttgctgaatgcctttgtcctgagggaatggaactggctgtagataacgtcacatgtatggatctccacaaacccccagggccactcgttctgatggtggcggtggtggccacttctaccttgagtctgcttatggtctgcggcgtgctaatcctcggaaccaagcgcttggctggtaccgtggatagtcgccttctcttgagctccgagctgggttgggtgtctgccggaggaggcagaaggcgttag

SEQ ID NO: 228454 - DNA, 2205 bp, synthetic construct
  misc_feature 1..2205: note = Description of Artificial Sequence: Synthetic coding sequence
  source 1..2205: mol_type = other DNA
atgggttgttggggacaactcctagtctggttcggcgctgctggagctatcttatgttcaagtccaggctctcaggaaacctttttaagaagcagccctttaccccttgcctctcctagccctagagatccaaaagtgtctgcacccccatctattctagagcctgcttccccacttaatagccctggcacggaaggtagttggctcttctccacctgcggcgcttccggccgtcatggtccaacacagacccaatgtgatggcgcatatgcaggcacaagcgtcgtagttactgttggcgcagcaggacaactgagaggagtgcagttgtggagagtgccaggcccaggacaatacctgatcagcgcctatggagctgccggaggaaaaggagcaaaaaatcatctgtcaagggcgcatggggtattcgtctctgccatcttttcattgggcctcggtgagtctctctatattctagtgggacaacaaggcgaagacgcctgccccggaggttctcctgagagccagctagtctgccttggagaaagccgcgctgtcgaggaacatgccgctatggacggcagcgagggggtacctgggagtcgcaggtgggccggtggcggaggcggtggcggtggtgcaacgtacgtgtttagggtgagagccggagagcttgaaccactgttagtcgctgccggtggcggtggcagagcgtatctgagaccacgagatcgcggtcggactcaagcaagcccagagaaacttgagaacaggagtgaggcccctggcagtggcggtcgcggtggtgcggctggcggtgatgcttcggaaaccgacaacctgtgggctgacggcgaggacggcgtgtctttcatccacccatcatctgagttgttcctgcaacctttggccgtgaccgagaaccacggcgaggttgaaatcaggcgacatctaaactgctcccactgccctctccgggattgccaatggcaggcggaactccaattagccgaatgcctttgtcccgaaggtatggaactcgccgtagacaatgttacctgtatggatctacataaaccaccaggcccactcgtcttgatggttgcagtggtggcaactagtaccttgagtctgctcatggtctgtggggtgttaattttgggaggcgcatggcctggaccggtcctggcaagtgcgactaggtgccatcggggttttccaagtcagtgctattctgcccagacacttcccgagctgtgttccccgcaggacgaattggactttttgatggaggctttgatcatttccaagtttaggcaccagaatatcgttcgatgcgtgggcttgtctcttcgcgctactcctcggcttatactgctggaactgatgtctggaggtgacatgaaaagctttctgcggcactcccggccacatctgggccagccatctccccttgtgatgcgagacctccttcagctggcacaggacatcgcgcagggctgtcactatctagaggaaaaccattttatccatagagacatcgccgctagaaactgtttgctgagctgcgccggtcctagtcgggtcgctaagattggagactttggaatggctagagatatttacagggcctcctactaccggaggggagacagagccctgttaccggtgaagtggatgcctcctgaggcttttctcgagggcatctttacatcgaaaaccgatagctggtctttcggggtgctcctctgggagatcttctccttggggtatatgccatatcctggcagaacaaaccaggaggtcctagacttcgtggtcgggggtggacgaatggaccccccacgcggatgcccagggcctgtgtaccgcatcatgacccagtgctggcagcatgagccggagcttaggccttcattcgcctccatactggaacggttgcagtattgcactcaggatcccgacgtgctgaattcattgctccctatggagctcggcccaaccccagaggaagaagggacaagcggactcggtaatcggtccttggaatgtctgaggcccccacagccacaggaattaagcccagaaaagctgaaaagttggggcggtagccccctcggcccttggctctctagcggacttaaacccctaaaatctagaggtctgcagccacaaaatctgtggaatcctacctaccgcagttag

SEQ ID NO: 228455 - DNA, 180 bp, synthetic construct
  misc_feature 1..180: note = Description of Artificial Sequence: Synthetic coding sequence
  source 1..180: mol_type = other DNA
atgctctctaggaatgacgatatttgcatctacggaggtctaggcctgggtggcctgctcctacttgcggttgtgctgctgagcgcctgcctttgctggctgcataggcgaggcccaggactgttgcgggctggtacgccactgtgcatcagcgccgaggcggcttctgcacaacagtag

SEQ ID NO: 228456 - DNA, 201 bp, synthetic construct
  misc_feature 1..201: note = Description of Artificial Sequence: Synthetic coding sequence
  source 1..201: mol_type = other DNA
atgctctcacgcaacgatgatatctgtatctatggaggcttaggactgggcggattactgctgctcgccgtggtattgttgtctgcatgcctctgctggctccataggcgagcgccaagtgtcctggtgcccggacctggacttctacgggctgggacacccctatgtatttctgctgaagctgcttctgcccaacagtag

SEQ ID NO: 228457 - DNA, 222 bp, synthetic construct
  misc_feature 1..222: note = Description of Artificial Sequence: Synthetic coding sequence
  source 1..222: mol_type = other DNA
atgctgtcccgaaacgatgtgaaaagactggagagaagctggcatctgctgtcctggagtcaggcccagggttcttccgagcaggaactacactacgcctcactgcagagattgcccgtgccttccagcgagggacctgatctgcgtgggagggataagagaggtacaaaggaggatccccgtgctgactatgcatgtatcgccgagaacaaacctacctag

SEQ ID NO: 228458 - DNA, 201 bp, synthetic construct
  misc_feature 1..201: note = Description of Artificial Sequence: Synthetic coding sequence
  source 1..201: mol_type = other DNA
atgctgtcaaggaacgatgtcaagcgtttggagagatcctgggcacaggggtcctccgaacaggaacttcactacgcctccctgcagcggcttcccgtccccagctcggaggggccagacctgcggggaagagataaacggggaaccaaagaggaccctcgggcagattacgcctgcattgcagagaataagcccacttag

SEQ ID NO: 228459 - DNA, 108 bp, synthetic construct
  misc_feature 1..108: note = Description of Artificial Sequence: Synthetic coding sequence
  source 1..108: mol_type = other DNA
atgcttagtcgaaatgacgctccttctgtcctagtgcctggtccaggcctgttgcgcgctggaacccctctgtgtatctctgcagaggcagcctccgctcagcagtag

SEQ ID NO: 228460 - DNA, 315 bp, synthetic construct
  misc_feature 1..315: note = Description of Artificial Sequence: Synthetic coding sequence
  source 1..315: mol_type = other DNA
atgctctcccggaatgatgatatctgcatttatggagggctgggccttggcggactgcttctgctcgctgtggtgctcctgtcagcctgcctttgttggctccacaggagagttaaaaggcttgagagatcatggcacctactctcttggagtcaggcccaggggtcctcagaacaagaattacactatgcttccttgcaaaggctgcccgtgccttcttcagaaggcccagatttgagagggagagacaagcgaggcacaaaagaggaccctcgcgcagactacgcatgtatcgctgagaataagccgacgtag

SEQ ID NO: 228461 - DNA, 42 bp, synthetic construct
  misc_feature 1..42: note = Description of Artificial Sequence: Synthetic coding sequence
  source 1..42: mol_type = other DNA
atgctatcccggaatgatgaggccgctagcgcccaacaatag

SEQ ID NO: 228462 - DNA, 108 bp, synthetic construct
  misc_feature 1..108: note = Description of Artificial Sequence: Synthetic coding sequence
  source 1..108: mol_type = other DNA
atgttatcccggaatgatgcaccgtctgtgctggtaccagggccaggactgctccgcgctggcacacctttatgcatttcggcagaagctgcttcagcccagcagtag

SEQ ID NO: 228463 - DNA, 276 bp, synthetic construct
  misc_feature 1..276: note = Description of Artificial Sequence: Synthetic coding sequence
  source 1..276: mol_type = other DNA
atgatatatgtaagcactggagcctgggggtgggcaggcagctgtttttggcagtggtccttttgtccccctgcctgtgtgggctgcatagaggagcacctgctgagttggtcacaggcccagggatcctccgagcaggaattgcattacgcctcactgcagcgcctccccgtgccctcttctgaggggccagatctgagggggcgtgataaaaggggaactaaagaggaccctcgggcagactacgcatgtatcgccgagaacaaaccaacatag

SEQ ID NO: 228464 - DNA, 156 bp, synthetic construct
  misc_feature 1..156: note = Description of Artificial Sequence: Synthetic coding sequence
  source 1..156: mol_type = other DNA
atgttatccaggaacgatgttaagaggctagagcgcagctggcgtctgccagtcccctcttccgaaggtcccgaccttagagggagggacaagagagggactaaggaggacccccgagctgattacgcttgcatcgctgagaacaaacctacttag

SEQ ID NO: 228465 - DNA, 192 bp, synthetic construct
  misc_feature 1..192: note = Description of Artificial Sequence: Synthetic coding sequence
  source 1..192: mol_type = other DNA
atgcacctttgtcgagggtgccaatgtcctgctgtgcgggatctaacctctggtgccgaaaccagggaagcccctcggaggattcaggagttgactatgccagctctgttacggaccaatccaccagaacacccaagacacctgcctcaaccgcgaagggtagatcgagttcccttatggagtagccagtag

SEQ ID NO: 228466 - DNA, 222 bp, synthetic construct
  misc_feature 1..222: note = Description of Artificial Sequence: Synthetic coding sequence
  source 1..222: mol_type = other DNA
atgctttctcgcaacgacgtgaaaagactggagcggtcttggcacctcctatcttggagccaggcccagggttcatcggagcaggaactgcactacgcttcattgcagcggctcccggtccctagtagcgaaggtccggacctccgcggtcgtgataaacgagggacgaaagaagatcctcgagcggattatgcttgcatcgccgaaaataaacccacgtag

SEQ ID NO: 228467 - DNA, 108 bp, synthetic construct
  misc_feature 1..108: note = Description of Artificial Sequence: Synthetic coding sequence
  source 1..108: mol_type = other DNA
atgctgtcccggaatgacgccccaagcgtgttagttcccggacccggactgctacgagccggaacacccttgtgcatttccgccgaggctgccagcgctcaacagtag

SEQ ID NO: 228468 - DNA, 201 bp, synthetic construct
  misc_feature 1..201: note = Description of Artificial Sequence: Synthetic coding sequence
  source 1..201: mol_type = other DNA
atgcttagcagaaacgatgatatctgtatatacgggggtctcgggttaggtggtctactgttactcgcggtcgtcctgctgagcgcctgcctatgttggctgcaccggagagctccatccgtgttggtgccaggccctgggttgttacgtgctggcacacctctctgcatctccgctgaggcagcgtcagcgcagcagtag

SEQ ID NO: 228469 - DNA, 315 bp, synthetic construct
  misc_feature 1..315: note = Description of Artificial Sequence: Synthetic coding sequence
  source 1..315: mol_type = other DNA
atgctatcccggaacgacgacatctgcatctacgggggtctcggattaggcggactgcttttgctggccgtggtgctcctgagtgcatgtttgtgctggcttcaccggagagtaaaaagacttgagcggtcttggcacctgctatcctggagtcaggcacaggggtcctcagagcaggagcttcactacgcttcactgcagcgactgccagtgcccagcagcgaggggcctgatctgcggggtcgcgataagagagggacaaaagaagatcctcgggcagattatgcctgtatagccgagaacaagcctacatag

SEQ ID NO: 228470 - DNA, 135 bp, synthetic construct
  misc_feature 1..135: note = Description of Artificial Sequence: Synthetic coding sequence
  source 1..135: mol_type = other DNA
atgctatcacgcaatgatgatatctgcatctacggtggcttaggtctggggggtctgcttttgctggccgtcgtgctgttatccgcatgcctgtgttggcttcacagaagagaggccgctagtgcgcagcagtag

SEQ ID NO: 228471 - DNA, 201 bp, synthetic construct
  misc_feature 1..201: note = Description of Artificial Sequence: Synthetic coding sequence
  source 1..201: mol_type = other DNA
atgctcagcagaaacgacgatatttgtatctatggaggcctggggctgggcggtctgctattactcgctgtggtcttactgtctgcctgcctgtgctggttgcaccggcgagtcaaaagactggagcgatcatggcgactcccagtcccctctagtgagggtccagatctgcgcggacgggacaaacggggaacaaagtag

SEQ ID NO: 228472 - DNA, 201 bp, synthetic construct
  misc_feature 1..201: note = Description of Artificial Sequence: Synthetic coding sequence
  source 1..201: mol_type = other DNA
atgttgagcaggaatgatgtaaagcggctcgagcgctcttgggctcagggctcatcagaacaggagctgcattatgcctccttgcagcgtctcccagtcccttccagtgaaggaccagatctcaggggtcgggataagcgcggaacaaaggaagacccccgagccgattacgcttgtatcgccgaaaacaagcccacgtag

SEQ ID NO: 228473 - DNA, 294 bp, synthetic construct
  misc_feature 1..294: note = Description of Artificial Sequence: Synthetic coding sequence
  source 1..294: mol_type = other DNA
atgctgtctcgcaacgatgatatttgtatctatggcggactgggcctgggcggtctcttgctcctcgccgtagttctgctgtctgcctgtctgtgttggctgcatagaagagtgaaaagactggagcgtagctgggcacaagggagctccgaacaggaattgcactatgcgagcctccaacggctgcccgtgccctcgagcgaaggaccagatctgcggggaagagacaaaagaggcactaaggaagacccgagagcagactatgcctgcattgctgaaaacaaaccaacttag

SEQ ID NO: 228474 - DNA, 180 bp, synthetic construct
  misc_feature 1..180: note = Description of Artificial Sequence: Synthetic coding sequence
  source 1..180: mol_type = other DNA
atgctgagtaggaacgatgacatttgtatctatggcggtctgggattgggagggctcttgctgctggccgtggtgcttttatctgcttgtctgtgttggcttcaccgcagggggcctggactcctgagagccggaactccactatgcatcagcgccgaggccgcaagcgctcagcaatag

SEQ ID NO: 228475 - DNA, 87 bp, synthetic construct
  misc_feature 1..87: note = Description of Artificial Sequence: Synthetic coding sequence
  source 1..87: mol_type = other DNA
atgctgtctcggaacgatgggccagggctccttagggccggaacacctctatgtatttctgcagaggcagcctccgcccagcagtag

SEQ ID NO: 228476 - DNA, 87 bp, synthetic construct
  misc_feature 1..87: note = Description of Artificial Sequence: Synthetic coding sequence
  source 1..87: mol_type = other DNA
atgctttcccgtaacgacggaccaggcctgctccgagccggtaccccactgtgcatctcagcggaagccgcatcagcacagcagtag

SEQ ID NO: 228477 - DNA, 87 bp, synthetic construct
  misc_feature 1..87: note = Description of Artificial Sequence: Synthetic coding sequence
  source 1..87: mol_type = other DNA
atgctgagccgcaacgacggtccaggcttgctgcgcgcagggacacccctgtgcattagcgccgaagcagcttccgcgcagcagtag

SEQ ID NO: 228478 - DNA, 87 bp, synthetic construct
  misc_feature 1..87: note = Description of Artificial Sequence: Synthetic coding sequence
  source 1..87: mol_type = other DNA
atgctcagccggaacgacgggcctgggttactcagggctggcacacccctttgcatcagcgctgaggccgcttccgcacagcaatag

SEQ ID NO: 228479 - DNA, 42 bp, synthetic construct
  misc_feature 1..42: note = Description of Artificial Sequence: Synthetic coding sequence
  source 1..42: mol_type = other DNA
atgctgtcgagaaacgacgaggccgcttcagcgcagcaatag

SEQ ID NO: 228480 - DNA, 249 bp, synthetic construct
  misc_feature 1..249: note = Description of Artificial Sequence: Synthetic coding sequence
  source 1..249: mol_type = other DNA
atgctctcaaggaatgacgatatctgcatctacggaggccttggcctcggcggactcttactgctggctgtcgtgctactctccgcctgtctctgctggctgcaccgcagagtcaagcgccttgaacgtagttggagactgcccgtcccatcgtcagaaggacccgaccttcgtggcagagataaacgcggtaccaaagaagatccgagagcagactatgcgtgtatcgcggagaataaacctacgtag

SEQ ID NO: 228481 - DNA, 201 bp, synthetic construct
  misc_feature 1..201: note = Description of Artificial Sequence: Synthetic coding sequence
  source 1..201: mol_type = other DNA
atgttgtcaagaaatgatgtcaaacggctggaacgctcctgggctcaaggctcttccgagcaggaactccattacgcaagcctccagcgattgcctgtgccgtctagcgaaggcccagatttgcgcggacgcgataagaggggcacaaaagaggacccacgcgcagattacgcttgtatagcagaaaacaagccgacctag

SEQ ID NO: 228482 - DNA, 201 bp, synthetic construct
  misc_feature 1..201: note = Description of Artificial Sequence: Synthetic coding sequence
  source 1..201: mol_type = other DNA
atgctctcacggaacgacgttaagcgattggaacggagttgggcacaggggtcatcagaacaggaactgcattacgcgagtcttcagcgtctcccggtcccgtcctcggagggacccgacctgcgtgggagagacaagaggggaactaaggaagaccccagggcggactacgcttgtattgccgaaaataagcctacgtag

SEQ ID NO: 228483 - DNA, 294 bp, synthetic construct
  misc_feature 1..294: note = Description of Artificial Sequence: Synthetic coding sequence
  source 1..294: mol_type = other DNA
atgctgagtcgcaatgacgatatctgcatctatggaggtctaggactgggaggactactgttgctggctgtggtccttctaagcgcctgtttgtgttggctccatcggagggttaagcgcctggagagatcctgggcacagggtagcagtgaacaggagttgcactacgcaagcctgcagagactgcctgtgccatcatcagaaggacccgacctgaggggacgggataagagaggaacaaaggaggatcctagggcagattacgcgtgcatcgcagaaaacaagcctacctag

SEQ ID NO: 228484 - DNA, 156 bp, synthetic construct
  misc_feature 1..156: note = Description of Artificial Sequence: Synthetic coding sequence
  source 1..156: mol_type = other DNA
atgttaagtaggaacgatgttaaaaggctcgaacgtagttggaggctgccagtgccaagtagtgaaggcccagacctcagggggcgagataagagggggaccaaagaagatcccagggcggactacgcctgcatcgcagaaaataagcccacatag

SEQ ID NO: 228485 - DNA, 294 bp, synthetic construct
  misc_feature 1..294: note = Description of Artificial Sequence: Synthetic coding sequence
  source 1..294: mol_type = other DNA
atgctttcccgcaatgacgatatctgtatttacggcggtctggggctggggggtctgcttctgcttgccgtggtgttacttagtgcctgcctctgttggcttcatcgccgagtcaagcgactcgaacggagctgggcccaggggtctagcgagcaggagctgcattatgcctcacttcaaaggctgcctgtcccttcctccgaggggccagaccttcgaggcagagataagcgtggaaccaaagaggatcccagagcggactatgcgtgtatagctgagaataagcccacctag

SEQ ID NO: 228486 - DNA, 315 bp, synthetic construct
  misc_feature 1..315: note = Description of Artificial Sequence: Synthetic coding sequence
  source 1..315: mol_type = other DNA
atgctcagccgtaatgatgatatttgcatttacggcggtctgggcctgggcggactcctcctgctagcagtagtgctcctgagcgcctgtttgtgttggctgcaccggagggtgaaaaggctggagcgatcatggcacctgctgtcgtggagtcaagcacagggtagtagtgagcaagagctgcattatgcttccctacagagactaccggttccttccagcgaggggcctgacctgcgcggtcgcgataaaaggggtacaaaggaagatccccgtgccgactacgcgtgcatcgccgagaataagcccacatag

SEQ ID NO: 228487 - DNA, 132 bp, synthetic construct
  misc_feature 1..132: note = Description of Artificial Sequence: Synthetic coding sequence
  source 1..132: mol_type = other DNA
tatcgcggtatgatgatctacgttagcacgggtgcttggggttgggcagggtcttgcttctggcagtggagtttttgtccccctgcttgcgtaggttgtatcgaggaacggctgcctgttccctcctcttag

SEQ ID NO: 228488 - DNA, 111 bp, synthetic construct
  misc_feature 1..111: note = Description of Artificial Sequence: Synthetic coding sequence
  source 1..111: mol_type = other DNA
atgctgtccaggaacgacgacatatgtatctacggaggcctggggctaggcggactcctgctgctcgccgtcgttttactaagtgcctgtctgtgttggctgcatcgctag

SEQ ID NO: 228489 - DNA, 315 bp, synthetic construct
  misc_feature 1..315: note = Description of Artificial Sequence: Synthetic coding sequence
  source 1..315: mol_type = other DNA
atgttgagccgaaatgatgacatctgtatttacgggggtctgggcctgggtgggttattgttgttagctgtagtgctgctgagcgcctgcctgtgctggttgcatcgacgggtgaaacgtctggaaaggagctggcatctgctttcttggagtcaggcacaaggctcctctgagcaggaattgcattatgctagcctgcaaagactccccgtgcccagttctgaaggacccgacttacggggacgggacaaacgcggaacaaaagaagacccaagagccgattacgcctgcatcgcagagaacaaacccacctag

SEQ ID NO: 228490 - DNA, 141 bp, synthetic construct
  misc_feature 1..141: note = Description of Artificial Sequence: Synthetic coding sequence
  source 1..141: mol_type = other DNA
atgctgtcacggaacgatgatatttgtatttacgggggactggggctcgggggtttactgctcctggctgtcgtgctgttaagtgcttgcctgtgctggctccacagaagagaacattgtctggctctggaaccgctgtag

SEQ ID NO: 228491 - DNA, 42 bp, synthetic construct
  misc_feature 1..42: note = Description of Artificial Sequence: Synthetic coding sequence
  source 1..42: mol_type = other DNA
atgctgtcccggaacgacgaagctgccagcgctcagcaatag

SEQ ID NO: 228492 - DNA, 87 bp, synthetic construct
  misc_feature 1..87: note = Description of Artificial Sequence: Synthetic coding sequence
  source 1..87: mol_type = other DNA
atgctatcacgtaacgatggtcctggtctgttgcgtgcagggaccccattgtgtattagtgcagaggccgcttccgcacagcagtag

SEQ ID NO: 228493 - DNA, 201 bp, synthetic construct
  misc_feature 1..201: note = Description of Artificial Sequence: Synthetic coding sequence
  source 1..201: mol_type = other DNA
atgctgagtcgaaatgatgtcaaaaggttagagagatcctgggcgcaaggctcttctgagcaagagctgcattacgcctccctccaacggttgcccgtgccatcttccgagggtccagacttgcgcggaagagacaagcgaggaacgaaggaggatcctcgcgcagattatgcctgcatcgcagagaacaagcccacctag

SEQ ID NO: 228494 - DNA, 87 bp, synthetic construct
  misc_feature 1..87: note = Description of Artificial Sequence: Synthetic coding sequence
  source 1..87: mol_type = other DNA
atgctctctagaaatgatggccctggcctgctccgtgccggaacccctctttgcatctcagccgaggccgcaagtgcacagcagtag

SEQ ID NO: 228495 - DNA, 87 bp, synthetic construct
  misc_feature 1..87: note = Description of Artificial Sequence: Synthetic coding sequence
  source 1..87: mol_type = other DNA
atgctgtctcgcaatgacggtccaggcctgcttcgggctggaacaccattatgcatatccgcagaggcggcttcagcccagcagtag

SEQ ID NO: 228496 - DNA, 132 bp, synthetic construct
  misc_feature 1..132: note = Description of Artificial Sequence: Synthetic coding sequence
  source 1..132: mol_type = other DNA
tgatctcgtaacgatgatatttgcatctacggcggattaggtcttgggggactgttgctgctggccgttgtgcttttatctgcctgcttgtgctggttgcaccgcagagaagcggcatcggctcaacagtag

SEQ ID NO: 228497 - DNA, 156 bp, synthetic construct
  misc_feature 1..156: note = Description of Artificial Sequence: Synthetic coding sequence
  source 1..156: mol_type = other DNA
atgctgagtcgaaacgacgtgaaacgcctggagcgcagttggcgactgccggtcccctccagcgagggcccagacttgcgcggacgggacaaaagaggcacaaaggaagaccctcgagcagactatgcctgcatagctgaaaataagcccacttag

SEQ ID NO: 228498 - DNA, 108 bp, synthetic construct
  misc_feature 1..108: note = Description of Artificial Sequence: Synthetic coding sequence
  source 1..108: mol_type = other DNA
atgctgtcccgaaacgacgcgccaagcgtcttggtccccggtccgggattgctgagggctggaacgcctttgtgcatcagtgcggaagccgctagcgctcagcagtag

SEQ ID NO: 228499 - DNA, 42 bp, synthetic construct
  misc_feature 1..42: note = Description of Artificial Sequence: Synthetic coding sequence
  source 1..42: mol_type = other DNA
atgctgtcccggaatgacgaagcagcgtctgcccagcagtag

SEQ ID NO: 228500 - DNA, 294 bp, synthetic construct
  misc_feature 1..294: note = Description of Artificial Sequence: Synthetic coding sequence
  source 1..294: mol_type = other DNA
atgctcagccggaacgacgacatctgtatctacggcggtcttggcttgggcggtttgctactgttggcagtggtcctgttgtctgcctgcctgtgttggttgcacagacgcgttaaacggttagaacgaagttgggctcagggatccagtgaacaggaactgcactatgcaagcctgcagagacttcccgtccccagttccgagggacccgatctgagggggcgagataaacgcggaaccaaagaggaccccagggcggattatgcctgcatcgctgaaaacaagcctacttag

SEQ ID NO: 228501 - DNA, 201 bp, synthetic construct
  misc_feature 1..201: note = Description of Artificial Sequence: Synthetic coding sequence
  source 1..201: mol_type = other DNA
atgctgagtcgtaacgacgtgaagcggctggagagaagttgggcccaaggatcttcggaacaggagttgcactatgcaagcttgcagaggcttcccgtcccttcatccgaaggacccgatctgcgaggccgtgacaagcgaggaacgaaggaggatccaagggccgattacgcatgcatagctgagaataagcctacgtag

SEQ ID NO: 228502 - DNA, 141 bp, synthetic construct
  misc_feature 1..141: note = Description of Artificial Sequence: Synthetic coding sequence
  source 1..141: mol_type = other DNA
atgctgagccgcaatgacgacatttgcatttatggcggtctgggcctggggggacttctccttctcgccgtggtgctcctgagtgcatgcctatgctggttacaccgcagggaacactgtctggcactggaacctttgtag

SEQ ID NO: 228503 - DNA, 132 bp, synthetic construct
  misc_feature 1..132: note = Description of Artificial Sequence: Synthetic coding sequence
  source 1..132: mol_type = other DNA
tgaagcagaaacgatgatatatgcatctacggtggtttgggtctaggaggtctgctcctgttagctgtcgtccttctgagcgcctgcttgtgctggttacacagacgagaagctgcttccgcacagcaatag

SEQ ID NO: 228504 - DNA, 141 bp, synthetic construct
  misc_feature 1..141: note = Description of Artificial Sequence: Synthetic coding sequence
  source 1..141: mol_type = other DNA
atgctttcccgaaacgatgatatatgtatatacggcggactcggactcgggggtctcttgctactggctgtggtcctgctgtccgcctgcctgtgttggctacaccggagagagcactgtttagctctggagccgctgtag

SEQ ID NO: 228505 - DNA, 87 bp, synthetic construct
  misc_feature 1..87: note = Description of Artificial Sequence: Synthetic coding sequence
  source 1..87: mol_type = other DNA
atgctgagtaggaatgatgggcctggccttctgagagcaggaactccactttgtatatctgcagaggccgcttctgcccagcagtag

SEQ ID NO: 228506 - DNA, 132 bp, synthetic construct
  misc_feature 1..132: note = Description of Artificial Sequence: Synthetic coding sequence
  source 1..132: mol_type = other DNA
tagagccgtaacgatgatatctgcatatatggaggactgggactggggggattgttgctgcttgctgtagtcctgttgtcggcgtgcctttgctggctccaccgccgtgaagctgctagcgcgcagcaatag

SEQ ID NO: 228507 - DNA, 201 bp, synthetic construct
  misc_feature 1..201: note = Description of Artificial Sequence: Synthetic coding sequence
  source 1..201: mol_type = other DNA
atgttgagcaggaatgatgtcaagcgcctggaacgcagttgggcccaagggtctagcgagcaggaactgcactacgcctcattacagcgattgcctgtccctagcagcgaaggcccagatctgcgcggtagggacaagcgcggaaccaaagaagatccgagagccgattatgcctgtattgcagagaataagccaacctag

SEQ ID NO: 228508 - DNA, 180 bp, synthetic construct
  misc_feature 1..180: note = Description of Artificial Sequence: Synthetic coding sequence
  source 1..180: mol_type = other DNA
atgttgagtcgtaatgatgacatctgtatttacggtggcttgggacttggcggactcctcctgctcgctgtggtactgctttcggcttgtctttgttggttgcacaggcggggtcccggactcctccgcgcaggcactccattgtgtatctccgctgaagctgcctccgcacagcagtag

SEQ ID NO: 228509 - DNA, 222 bp, synthetic construct
  misc_feature 1..222: note = Description of Artificial Sequence: Synthetic coding sequence
  source 1..222: mol_type = other DNA
atgttgtcaaggaacgacgtcaagcgactggagcggtcttggcacctgctctcctggtcccaggctcagggctcaagcgaacaggagctgcattatgctagccttcagagactgcccgtgccttcgagtgagggtcctgatcttaggggcagggacaagagaggaaccaaggaagaccctcgcgcagactacgcatgtatcgccgagaataaaccaacttag

SEQ ID NO: 228510 - DNA, 201 bp, synthetic construct
  misc_feature 1..201: note = Description of Artificial Sequence: Synthetic coding sequence
  source 1..201: mol_type = other DNA
atgttaagccgaaacgatgacatttgcatttacgggggactgggcctcggcggactcctgctcctggctgtggtgctgctttcagcatgcctttgctggctgcaccggagagcccctagtgtgctcgttccagggcctggactcctgagagctggaacgccgctctgtatcagcgccgaggctgcttctgctcaacagtag

SEQ ID NO: 228511 - DNA, 201 bp, synthetic construct
  misc_feature 1..201: note = Description of Artificial Sequence: Synthetic coding sequence
  source 1..201: mol_type = other DNA
atgctctcacggaatgacgtgaagagactcgagcgctcctgggctcaaggttctagcgagcaagagctgcactacgccagcctgcagagactcccggtgccctcctctgaaggacccgacctcagagggcgagataagagaggcacaaaagaggatcctcgggctgactacgcatgcatcgccgaaaacaaacccacctag

SEQ ID NO: 228512 - DNA, 87 bp, synthetic construct
  misc_feature 1..87: note = Description of Artificial Sequence: Synthetic coding sequence
  source 1..87: mol_type = other DNA
atgttatcccgtaacgacggtccagggctcctccgagcaggcaccccattgtgtataagcgctgaggccgcaagcgcccaacagtag

SEQ ID NO: 228513 - DNA, 249 bp, synthetic construct
  misc_feature 1..249: note = Description of Artificial Sequence: Synthetic coding sequence
  source 1..249: mol_type = other DNA
atgctgtcacgcaacgatgatatctgcatatacgggggacttggtctcggcggactcctgctacttgccgtggttctcctgtcggcatgcttgtgttggttacaccgcagggtgaagcgtctggagagatcttggaggcttcccgtcccctcttccgaaggaccagatcttcgaggcagggataagaggggaactaaggaagacccacgcgctgattatgcctgcatcgcagagaacaaaccgacttag

SEQ ID NO: 228514 - DNA, 156 bp, synthetic construct
  misc_feature 1..156: note = Description of Artificial Sequence: Synthetic coding sequence
  source 1..156: mol_type = other DNA
atgttgagtaggaacgatgttaagagactcgagagaagctggcgactgccggtgccatctagtgaaggtcctgacttgcgaggcagagacaaacggggaactaaagaagatcctcgggcagactatgcttgcattgcagaaaataaaccaacttag

SEQ ID NO: 228515 - DNA, 180 bp, synthetic construct
  misc_feature 1..180: note = Description of Artificial Sequence: Synthetic coding sequence
  source 1..180: mol_type = other DNA
atgctgagtagaaacgatgatatctgtatttatggcggtcttggtttaggtggtctgctgcttttggcagttgttctcctctccgcttgcttgtgctggctccacaggaggggtcccggactcctccgggctggcacccccttgtgcatttcagcggaagccgcttccgcccagcagtag

SEQ ID NO: 228516 - DNA, 201 bp, synthetic construct
  misc_feature 1..201: note = Description of Artificial Sequence: Synthetic coding sequence
  source 1..201: mol_type = other DNA
atgctgtccagaaacgatgtgaaaagacttgaacgatcgtgggctcagggctctagcgagcaagagttacattatgcctccctgcagaggctcccagtgccttcaagcgaaggacctgacctgagagggcgtgataaaaggggaaccaaagaggaccccagagctgactacgcctgcatagcagagaacaagccaacttag

SEQ ID NO: 228517 - DNA, 156 bp, synthetic construct
  misc_feature 1..156: note = Description of Artificial Sequence: Synthetic coding sequence
  source 1..156: mol_type = other DNA
atgctgtcgcgaaacgacgttaaacgccttgagcgatcatggcgcctgcctgtgcccagcagtgaggggccagacctccggggaagagataagagaggcactaaagaagaccctcgggctgattatgcctgtatcgctgaaaacaagccaacctag

SEQ ID NO: 228518 - DNA, 249 bp, synthetic construct
  misc_feature 1..249: note = Description of Artificial Sequence: Synthetic coding sequence
  source 1..249: mol_type = other DNA
atgctgtccagaaacgatgatatttgcatttacgggggattaggcctaggtgggcttctgctgttagccgtggtgttgctcagcgcatgtctctgttggctgcacaggcgcgttaagagattagagaggtcttggcggttacctgtgccaagtagcgagggacctgatctcaggggacgtgacaaaagaggcaccaaagaggaccccagagccgactatgcctgtattgctgaaaataagcctacatag

SEQ ID NO: 228519 - DNA, 141 bp, synthetic construct
  misc_feature 1..141: note = Description of Artificial Sequence: Synthetic coding sequence
  source 1..141: mol_type = other DNA
atgctgtctcgcaacgacgacatctgcatctacggaggactagggttgggcggattgcttctgctggccgtcgttcttctgtccgcctgtttgtgctggctgcaccgacgtgagcactgtctggcattagagcccctgtag

SEQ ID NO: 228520 - DNA, 108 bp, synthetic construct
  misc_feature 1..108: note = Description of Artificial Sequence: Synthetic coding sequence
  source 1..108: mol_type = other DNA
atgttgagccgcaacgatgcgccaagcgtcctggtgccaggcccaggactgctcagggcagggactcctttgtgcatcagcgcggaggccgcatctgcacagcagtag

SEQ ID NO: 228521 - DNA, 249 bp, synthetic construct
  misc_feature 1..249: note = Description of Artificial Sequence: Synthetic coding sequence
  source 1..249: mol_type = other DNA
atgctctctcgcaatgacgatatctgcatctacgggggattgggcctgggtggactcctgctgctcgctgtggtgctcctttctgcttgcctgtgctggctccaccggcgtgtcaaacgcttggaaagatcatggagactgcctgtaccaagctcagaaggacctgatctgcgcggtcgagacaagaggggtactaaggaagatccgcgagctgactatgcttgtattgctgagaacaaacccacgtag

SEQ ID NO: 228522 - DNA, 87 bp, synthetic construct
  misc_feature 1..87: note = Description of Artificial Sequence: Synthetic coding sequence
  source 1..87: mol_type = other DNA
atgttaagtaggaacgatggccctggcctcctgcgcgcaggcaccccactatgtattagtgctgaggccgcttcagcacagcagtag

SEQ ID NO: 228523 - DNA, 294 bp, synthetic construct
  misc_feature 1..294: note = Description of Artificial Sequence: Synthetic coding sequence
  source 1..294: mol_type = other DNA
atgctgtctcggaacgacgatatctgcatttatggaggtctgggactgggagggttgctcctgctggcagttgtgttgttgtcagcctgcctatgttggctccaccgcagggtgaagaggttagagaggtcctgggctcaggggagctccgagcaggaattacattatgcctcgctgcaacggcttcccgtgccatctagcgagggacctgacctccggggacgcgataagaggggcactaaggaggatcccagagcggactacgcatgcattgcggagaacaagcctacctag

SEQ ID NO: 228524 - DNA, 87 bp, synthetic construct
  misc_feature 1..87: note = Description of Artificial Sequence: Synthetic coding sequence
  source 1..87: mol_type = other DNA
atgctttcccgaaatgacgggcctggcctgctgcgcgctggcacaccgttatgtattagtgccgaggctgcctccgcacaacagtag

SEQ ID NO: 228525 - DNA, 108 bp, synthetic construct
  misc_feature 1..108: note = Description of Artificial Sequence: Synthetic coding sequence
  source 1..108: mol_type = other DNA
atgttgtctaggaatgatgccccttccgtgctagttccaggccctggtctgcttcgtgccggaactccactgtgtatatccgcagaagccgcatccgcacagcagtag

SEQ ID NO: 228526 - DNA, 294 bp, synthetic construct
  misc_feature 1..294: note = Description of Artificial Sequence: Synthetic coding sequence
  source 1..294: mol_type = other DNA
atgctctctagaaacgacgacatttgcatatacggaggattgggactggggggtctattgctgctggcggtggtgttactgtccgcctgcctatgctggctgcacaggcgtgttaaaaggctggagcgatcctgggcccaaggttcttcagagcaagagcttcactacgcttcactgcagaggttacctgtccctagtagcgaggggccagatctaaggggcagggataaaagaggcacaaaagaggacccccgagcggactatgcctgcatcgcagagaacaagcccacctag

SEQ ID NO: 228527 - DNA, 201 bp, synthetic construct
  misc_feature 1..201: note = Description of Artificial Sequence: Synthetic coding sequence
  source 1..201: mol_type = other DNA
atgctgagccgcaacgacgtgaaaagactggagcgctcttgggcgcaggggtctagcgaacaagaactgcattacgctagtctgcagaggctgcctgtgcctagctccgagggcccagacttgcgtggacgcgataagcggggaacaaaggaggatcctagggccgactacgcatgtatcgccgaaaacaaacctacctag

SEQ ID NO: 228528 - DNA, 201 bp, synthetic construct
  misc_feature 1..201: note = Description of Artificial Sequence: Synthetic coding sequence
  source 1..201: mol_type = other DNA
atgctgagccggaacgacgtgaagcgactggagagatcctgggcacagggctcgagcgaacaagaacttcactacgctagcctgcagcgactgccagtgccaagttcagaaggccctgatctccgcggtcgtgataagaggggtacaaaagaggaccctagagccgactacgcatgcatcgctgagaataaacctacctag

SEQ ID NO: 228529 - DNA, 42 bp, synthetic construct
  misc_feature 1..42: note = Description of Artificial Sequence: Synthetic coding sequence
  source 1..42: mol_type = other DNA
atgctgtctagaaatgacgaagccgcttctgcgcaacagtag

SEQ ID NO: 228530 - DNA, 87 bp, synthetic construct
  misc_feature 1..87: note = Description of Artificial Sequence: Synthetic coding sequence
  source 1..87: mol_type = other DNA
atgctgagtaggaatgatggcccaggactcctgagagccggtactcctctttgtattagtgcagaagctgcgtccgcccagcagtag

SEQ ID NO: 228531 - DNA, 111 bp, synthetic construct
  misc_feature 1..111: note = Description of Artificial Sequence: Synthetic coding sequence
  source 1..111: mol_type = other DNA
atgttgagccgcaacgacgacatctgcatctatggtggtctgggtttagggggacttctgctgctggccgtagtccttttgtccgcctgcttatgttggttacacagatag

SEQ ID NO: 228532 - DNA, 294 bp, synthetic construct
  misc_feature 1..294: note = Description of Artificial Sequence: Synthetic coding sequence
  source 1..294: mol_type = other DNA
atgttgagccgaaatgatgacatttgcatctacggaggcctgggcctgggaggactgctcttgctggccgtggtgttactgtctgcctgtctgtgctggctgcatcgcagggtgaaacggctcgaacgcagctgggcccaagggagtagcgaacaggagcttcactacgcttctttgcagcgcctccctgtcccatcctccgaaggtccagatctgcgcggtcgtgataagcggggtaccaaggaggacccacgggctgactacgcctgtatcgccgaaaataagccaacctag

SEQ ID NO: 228533 - DNA, 180 bp, synthetic construct
  misc_feature 1..180: note = Description of Artificial Sequence: Synthetic coding sequence
  source 1..180: mol_type = other DNA
atgctgagtcgcaatgacgatatttgtatctatggtgggctcgggctcggcggtctgttactgctggccgtcgtgctgttgtcagcttgcctgtgttggctgcaccgtaggggtcccggacttttgcgggcagggacacctttatgtatatctgccgaagccgcttccgcccagcaatag

SEQ ID NO: 228534 - DNA, 294 bp, synthetic construct
  misc_feature 1..294: note = Description of Artificial Sequence: Synthetic coding sequence
  source 1..294: mol_type = other DNA
atgctaagcagaaacgacgatatctgtatttacgggggactgggcctcggcggactgttactactcgctgtggtgttgctcagcgcctgtctatgctggttgcaccgcagagtaaagcgattggaacgctcctgggcacaaggatcttcagagcaggagcttcactatgcttccctgcagcgattgccagtccccagctccgaggggccagatcttagaggccgagacaaaagagggaccaaggaagacccaagggccgattacgcctgcatcgcggaaaacaaacccacgtag

SEQ ID NO: 228535 - DNA, 201 bp, synthetic construct
  misc_feature 1..201: note = Description of Artificial Sequence: Synthetic coding sequence
  source 1..201: mol_type = other DNA
atgctctcaaggaatgatgacatctgtatctacggagggctgggcctgggaggcctcctgctcctcgccgtggtcctcctcagtgcctgtttgtgctggttacaccgacgggctccatctgtgctcgttcccggacctggtttgttaagggctggaacaccactgtgcatcagcgccgaagctgcctccgcccagcaatag

SEQ ID NO: 228536 - DNA, 87 bp, synthetic construct
  misc_feature 1..87: note = Description of Artificial Sequence: Synthetic coding sequence
  source 1..87: mol_type = other DNA
atgctaagccgtaatgacggcccaggtcttttacgagccggaaccccattatgcatttctgcagaggcggcatctgcccagcagtag

SEQ ID NO: 228537 - DNA, 180 bp, synthetic construct
  misc_feature 1..180: note = Description of Artificial Sequence: Synthetic coding sequence
  source 1..180: mol_type = other DNA
atgctgtccagaaacgacgatatttgcatttacggcggactggggctcggcggtttgctacttctcgctgtcgtccttttgagcgcatgtttatgctggttacaccggagaggtcctggcctcttaagagcaggcacccctctgtgtataagtgcggaagctgcatctgcccagcaatag

SEQ ID NO: 228538 - DNA, 201 bp, synthetic construct
  misc_feature 1..201: note = Description of Artificial Sequence: Synthetic coding sequence
  source 1..201: mol_type = other DNA
atgctttccaggaacgacgtcaaacggctcgagaggtcttgggctcaaggctcctcggagcaggaattgcattatgcgagtttgcagcgactgcctgttccttctagcgaaggtcctgacctcagggggagagataagcgaggaacaaaggaggatcctcgtgctgattacgcatgcatagcggaaaataagcccacgtag

SEQ ID NO: 228539 - DNA, 108 bp, synthetic construct
  misc_feature 1..108: note = Description of Artificial Sequence: Synthetic coding sequence
  source 1..108: mol_type = other DNA
atgttgagccggaatgatgctccctccgttctcgttcctgggcctggcttgctgcgagctggcacaccactctgcatcagtgctgaagccgcttccgcccagcagtag

SEQ ID NO: 228540 - DNA, 201 bp, synthetic construct
  misc_feature 1..201: note = Description of Artificial Sequence: Synthetic coding sequence
  source 1..201: mol_type = other DNA
atgctcagccgaaacgacgtcaagcggttggaacgctcttgggcgcaagggagttccgaacaggaattacactacgcaagcctgcagcgtttgcctgtccctagttcagaaggtcccgatctccgtggcagagacaagaggggaacgaaggaagaccctagggccgattacgcctgcatcgccgaaaataaacctacctag

SEQ ID NO: 228541 - DNA, 87 bp, synthetic construct
  misc_feature 1..87: note = Description of Artificial Sequence: Synthetic coding sequence
  source 1..87: mol_type = other DNA
atgttatctcggaatgacggtcccggattgttacgagccggaactcccttgtgcatctcggccgaggctgcaagcgcccagcagtag

SEQ ID NO: 228542 - DNA, 108 bp, synthetic construct
  misc_feature 1..108: note = Description of Artificial Sequence: Synthetic coding sequence
  source 1..108: mol_type = other DNA
atgctgtctcggaatgacgccccttccgtcctggttccaggacctggcctcctcagggccggaacacctttgtgcataagcgccgaggccgcatcagctcaacagtag

SEQ ID NO: 228543 - DNA, 132 bp, synthetic construct
  misc_feature 1..132: note = Description of Artificial Sequence: Synthetic coding sequence
  source 1..132: mol_type = other DNA
taatccagaaatgatgacatttgtatctatgggggtttagggctgggcggactacttctactggcagttgtattactgtcagcctgtctttgttggcttcaccgcagagaggcggcttccgctcagcaatag

SEQ ID NO: 228544 - DNA, 111 bp, synthetic construct
  misc_feature 1..111: note = Description of Artificial Sequence: Synthetic coding sequence
  source 1..111: mol_type = other DNA
atgctgtcaagaaatgacgatatttgtatttatggaggcctcgggcttggcggtttgttgcttctggccgtggtccttttgtcagcttgcctttgttggctccatcgttag

SEQ ID NO: 228545 - DNA, 111 bp, synthetic construct
  misc_feature 1..111: note = Description of Artificial Sequence: Synthetic coding sequence
  source 1..111: mol_type = other DNA
atgctcagcaggaacgatgacatctgcatatacggcggattgggccttggcggattgctgctccttgccgtggtgctcctctcggcctgcttatgctggctgcatagatag

SEQ ID NO: 228546 - DNA, 201 bp, synthetic construct
  misc_feature 1..201: note = Description of Artificial Sequence: Synthetic coding sequence
  source 1..201: mol_type = other DNA
atgctgtcccggaacgacgtcaaacgactagagcgctcttgggcacaggggtcctcggaacaggaattgcattacgcgtccctccagagactcccggtgcccagctcagaagggccagacctgaggggaagagataagcgtggcacaaaagaggaccccagggctgattacgcgtgcatcgctgagaataaacccacttag

SEQ ID NO: 228547 - DNA, 294 bp, synthetic construct
  misc_feature 1..294: note = Description of Artificial Sequence: Synthetic coding sequence
  source 1..294: mol_type = other DNA
atgctctcaaggaacgacgatatctgcatctatggcggactggggttggggggactccttttgctggccgtcgtccttcttagcgcctgtctctgttggctgcatagaagggtcaagcgcttggagcggagctgggcacaggggagcagtgaacaggaacttcactatgcatctctgcagcgccttccagttccatcttccgaggggccagatctgaggggtagggataagcggggaacaaaagaagatccccgagccgactatgcttgtatcgccgagaataagcctacctag

SEQ ID NO: 228548 - DNA, 87 bp, synthetic construct
  misc_feature 1..87: note = Description of Artificial Sequence: Synthetic coding sequence
  source 1..87: mol_type = other DNA
atgttgtcccgcaacgatggccctggtcttctccgcgctggaacacccttatgtatttccgccgaagctgccagcgcccagcagtag

SEQ ID NO: 228549 - DNA, 315 bp, synthetic construct
  misc_feature 1..315: note = Description of Artificial Sequence: Synthetic coding sequence
  source 1..315: mol_type = other DNA
atgctgagcagaaacgatgatatttgcatatacggtggcctgggcctgggaggattgctgctgctggcagtggtactgctcagcgcctgcctgtgctggctgcatcgccgagtgaagcgcttggagcggtcctggcacctcctgagttggtcccaggcgcaaggaagttcagaacaggagctccactatgcctccctacagagactgcctgttccgtcctccgagggtcccgacctgcgaggacgggacaagagaggcaccaaggaggatccccgtgctgattacgcatgcatcgccgagaacaagcctacttag

SEQ ID NO: 228550 - DNA, 201 bp, synthetic construct
  misc_feature 1..201: note = Description of Artificial Sequence: Synthetic coding sequence
  source 1..201: mol_type = other DNA
atgctcagtcgcaacgatgtgaagcgcttagagaggagctgggcacagggttcctccgagcaggagctgcattatgcgagtctgcagcgtctcccggtcccttcctcagaggggcctgacctgagaggacgagacaaacgagggaccaaagaagatcctcgggcagactacgcatgcatcgctgagaacaaaccaacctag

SEQ ID NO: 228551 - DNA, 111 bp, synthetic construct
  misc_feature 1..111: note = Description of Artificial Sequence: Synthetic coding sequence
  source 1..111: mol_type = other DNA
atgctgtccaggaatgatgacatctgtatttacggagggctcggactcggtggcctgttgctgctggcggtcgtgctgctatccgcatgcctctgttggctgcatagatag

SEQ ID NO: 228552 - DNA, 294 bp, synthetic construct
  misc_feature 1..294: note = Description of Artificial Sequence: Synthetic coding sequence
  source 1..294: mol_type = other DNA
atgctctctcgaaacgatgatatctgtatttatggcggattaggcttagggggactcctgctgctcgctgtcgtgctattgtccgcttgcttgtgctggctacaccgtagagtgaagaggctcgaaagatcctgggctcagggctcatctgagcaagagctccactacgcttctctgcagcgactgcctgtgccaagcagtgagggtcccgatctgagagggcgtgataagagagggacgaaggaggacccaagggcagactacgcctgcatcgccgagaacaagccgacatag

SEQ ID NO: 228553 - DNA, 156 bp, synthetic construct
  misc_feature 1..156: note = Description of Artificial Sequence: Synthetic coding sequence
  source 1..156: mol_type = other DNA
atgcttagcaggaatgacgtcaaacgcctcgagagatcctggaggctgcccgttcccagcagcgaagggccagatctgcgcggtcgggacaaaagggggacaaaagaggaccccagggcggattacgcctgcatcgcagagaacaaaccaacttag

SEQ ID NO: 228554 - DNA, 315 bp, synthetic construct
  misc_feature 1..315: note = Description of Artificial Sequence: Synthetic coding sequence
  source 1..315: mol_type = other DNA
atgttaagtagaaacgatgacatttgcatttatgggggtctcggactggggggattactgctgttagcggtggtccttctctcagcctgtttgtgttggctccatagacgcgtcaagaggctggaacgtagctggcacctcctgtcctggtcccaggcacagggctcatcagaacaggaattacactatgcctccctccagcggctgccagtcccaagttcagagggacccgatctgagaggcagagataaacggggaacaaaggaagaccctagggcggattacgcttgtatcgcggaaaacaaaccaacctag

SEQ ID NO: 228555 - DNA, 294 bp, synthetic construct
  misc_feature 1..294: note = Description of Artificial Sequence: Synthetic coding sequence
  source 1..294: mol_type = other DNA
atgctcagccggaatgacgacatctgcatctacggagggctgggccttggaggtctgctgctgctcgcggtggtcctgctgtccgcctgtttatgttggctgcaccgtcgggtcaagagactcgagaggagctgggcgcagggaagttctgagcaagagctgcattatgccagtctgcagcgtctaccggtgccctcttcagaaggcccagacttgaggggcagagataagcggggaactaaggaggatcctagggcagactatgcatgcatcgccgagaataaacccacctag

SEQ ID NO: 228556 - DNA, 315 bp, synthetic construct
  misc_feature 1..315: note = Description of Artificial Sequence: Synthetic coding sequence
  source 1..315: mol_type = other DNA
atgttaagccgtaacgatgacatttgcatatatgggggattaggactgggtggcctgctcctgctggctgtcgtcctcctctcagcatgtctgtgttggttacatagaagagtgaagcggttggagcgctcatggcacctcctgtcttggtctcaggcccagggttctagcgagcaggagctgcactatgcctcactgcagagactgcccgtgccgtctagcgagggacccgaccttaggggaagagataaacgcggaaccaaggaggacccaagagccgattacgcgtgcatagcagaaaataagcctacgtag

SEQ ID NO: 228557 - DNA, 156 bp, synthetic construct
  misc_feature 1..156: note = Description of Artificial Sequence: Synthetic coding sequence
  source 1..156: mol_type = other DNA
atgctgtccaggaatgacgtcaaacgattagaaaggtcctggcggctcccagtgccttcctcagagggcccagacctcagaggacgcgacaagcgcggtactaaggaggatccaagggcggattacgcttgcatagctgagaataaacccacatag

SEQ ID NO: 228558 - DNA, 201 bp, synthetic construct
  misc_feature 1..201: note = Description of Artificial Sequence: Synthetic coding sequence
  source 1..201: mol_type = other DNA
atgttatctcggaacgatgatatctgcatctacggcggactaggactcggtggactgctattactggcagtggtgttgctgtccgcgtgcctatgttggctgcacaggcgggctccctcagtactggtaccgggaccgggactgctcagagcaggaacgcccttatgcatttctgcagaggctgcttctgcgcagcagtag

SEQ ID NO: 228559 - DNA, 111 bp, synthetic construct
  misc_feature 1..111: note = Description of Artificial Sequence: Synthetic coding sequence
  source 1..111: mol_type = other DNA
atgctgtcacgtaacgacgacatatgtatctacggcggacttggcctggggggactgttacttctagctgtagtcctcctcagtgcctgcctctgctggttacacagatag

SEQ ID NO: 228560 - DNA, 222 bp, synthetic construct
  misc_feature 1..222: note = Description of Artificial Sequence: Synthetic coding sequence
  source 1..222: mol_type = other DNA
atgctgtcccgaaacgacgttaaaaggcttgagcgatcctggcatctgttgagttggtctcaggcacagggatccagtgaacaggaactccactacgcctcattacagcgcctgcccgtgccaagctccgaggggccagacttacggggaagagacaagaggggaactaaggaagaccctagggccgattacgcttgtatagccgagaacaagcccacctag

SEQ ID NO: 228561 - DNA, 201 bp, synthetic construct
  misc_feature 1..201: note = Description of Artificial Sequence: Synthetic coding sequence
  source 1..201: mol_type = other DNA
atgctcagccggaatgatgtgaagcgtctggagaggagttgggctcagggcagctccgaacaggagcttcactatgcttccctacagagactgcctgtaccgagctcagagggtcccgatctccgaggtcgggacaagcggggtacgaaggaggacccacgggcagattacgcctgtatcgctgaaaataagcctacctag

SEQ ID NO: 228562 - DNA, 201 bp, synthetic construct
  misc_feature 1..201: note = Description of Artificial Sequence: Synthetic coding sequence
  source 1..201: mol_type = other DNA
atgctgtctcggaatgacgtgaagagactcgaaaggtcctgggcccagggctcctcagagcaggaactgcattacgcctcgctgcagcggctcccagttccatcatctgagggaccagatttgagggggagagataagagaggtaccaaagaggacccccgagccgattacgcgtgtattgctgaaaataagcctacatag

SEQ ID NO: 228563 - DNA, 108 bp, synthetic construct
  misc_feature 1..108: note = Description of Artificial Sequence: Synthetic coding sequence
  source 1..108: mol_type = other DNA
atgttaagcagaaatgacgccccatcagtgctcgtacctggcccagggttgctccgagccggaactcccctctgcatttccgctgaagccgctagcgcccagcaatag

SEQ ID NO: 228564 - DNA, 87 bp, synthetic construct
  misc_feature 1..87: note = Description of Artificial Sequence: Synthetic coding sequence
  source 1..87: mol_type = other DNA
atgctgtcaaggaatgatggaccaggcctactgcgtgctgggactcctttgtgtattagtgctgaagccgctagtgcccagcaatag

SEQ ID NO: 228565 - DNA, 141 bp, synthetic construct
  misc_feature 1..141: note = Description of Artificial Sequence: Synthetic coding sequence
  source 1..141: mol_type = other DNA
atgctgtcacgcaatgacgatatatgtatctatggtggattggggctgggtggtcttctactgctggcagtagtgctactgtcggcctgcctgtgctggctgcatcgcagagaacattgtctagcccttgagccactgtag

SEQ ID NO: 228566 - DNA, 141 bp, synthetic construct
  misc_feature 1..141: note = Description of Artificial Sequence: Synthetic coding sequence
  source 1..141: mol_type = other DNA
atgctgagtaggaacgacgacatctgtatttatggcggtctggggctgggtggattattgttacttgccgtggttctcctgagcgcctgcctctgttggctccatagacgggagcattgcctagcacttgagcccctctag

SEQ ID NO: 228567 - DNA, 201 bp, synthetic construct
  misc_feature 1..201: note = Description of Artificial Sequence: Synthetic coding sequence
  source 1..201: mol_type = other DNA
atgttgagcagaaatgatgacatctgcatctatggcggacttggcctcgggggtctcctactactcgctgtcgtgttgctgagtgcttgcttgtgctggctgcaccggcgtgcccctagcgtacttgtgcctggtccgggtctcctccgcgctggcacccccctctgtatctccgctgaggcagctagcgcacagcagtag

SEQ ID NO: 228568 - DNA, 141 bp, synthetic construct
  misc_feature 1..141: note = Description of Artificial Sequence: Synthetic coding sequence
  source 1..141: mol_type = other DNA
atgctgtctaggaatgacgatatctgcatctatggcggtcttgggttggggggattactgctgctcgcggtggtgctgctgagcgcttgcctgtgttggctgcatcgccgtgagcactgcttggccctggaaccgctctag

SEQ ID NO: 228569 - DNA, 87 bp, synthetic construct
  misc_feature 1..87: note = Description of Artificial Sequence: Synthetic coding sequence
  source 1..87: mol_type = other DNA
atgctgtcaaggaacgacggaccagggctactccgagctggcactcccctgtgtataagcgccgaggccgcatctgcacagcagtag

SEQ ID NO: 228570 - DNA, 294 bp, synthetic construct
  misc_feature 1..294: note = Description of Artificial Sequence: Synthetic coding sequence
  source 1..294: mol_type = other DNA
atgttaagcagaaatgacgatatctgtatctatggtggtttaggactggggggactgcttctactcgctgtggtgctgctcagtgcctgtttgtgctggctgcacagaagagtcaagcgcctggagagaagctgggcacagggttccagcgaacaggagttacattacgcatcactgcagcgcctgcccgtgcctagcagtgaaggccctgacctccggggaagggacaagcgcggtactaaagaagatccgagagccgattacgcatgcattgccgagaataaacctacttag

SEQ ID NO: 228571 - DNA, 180 bp, synthetic construct
  misc_feature 1..180: note = Description of Artificial Sequence: Synthetic coding sequence
  source 1..180: mol_type = other DNA
atgctgagcaggaatgatgatatctgtatctacgggggtctgggattaggtggtttgttgttactggcagttgtgctcctgagcgcctgcctgtgttggttacacaggagaggccctgggctgctgagagccggtactcccttgtgtatatctgcagaggctgcttcagcgcagcaatag

SEQ ID NO: 228572 - DNA, 294 bp, synthetic construct
  misc_feature 1..294: note = Description of Artificial Sequence: Synthetic coding sequence
  source 1..294: mol_type = other DNA
atgttgtcccggaacgacgacatctgtatctacggcggactgggcctcgggggtttactgctcctggccgtggtgctgttgtctgcttgcctgtgttggctgcatagaagagtgaagcgacttgaaaggtcctgggcacagggaagctcggagcaggaactgcactacgccagcctgcagagactccccgttccttccagcgaaggacccgacctgaggggacgggataaacgcggtacgaaggaggatcctcgggctgattatgcctgtattgctgagaacaagccaacatag

SEQ ID NO: 228573 - DNA, 87 bp, synthetic construct
  misc_feature 1..87: note = Description of Artificial Sequence: Synthetic coding sequence
  source 1..87: mol_type = other DNA
atgctgagccggaatgacgggcctggactgctgcgtgctgggactcccctatgtatctcagccgaagcggcatcagctcagcagtag

SEQ ID NO: 228574 - DNA, 111 bp, synthetic construct
  misc_feature 1..111: note = Description of Artificial Sequence: Synthetic coding sequence
  source 1..111: mol_type = other DNA
atgctgagtcggaatgacgatatctgcatatacgggggactcggcctgggcggacttctgttacttgccgtggtactcctatccgcttgtctctgctggctccaccggtag

SEQ ID NO: 228575 - DNA, 156 bp, synthetic construct
  misc_feature 1..156: note = Description of Artificial Sequence: Synthetic coding sequence
  source 1..156: mol_type = other DNA
atgctctctagaaatgatgtcaaacgtctcgaacgcagctggcgacttcctgtaccaagcagtgagggccctgacctgcgcggtcgcgataagcgaggcaccaaagaggaccctagagcagattatgcctgcatagccgaaaacaaacccacatag

SEQ ID NO: 228576 - DNA, 42 bp, synthetic construct
  misc_feature 1..42: note = Description of Artificial Sequence: Synthetic coding sequence
  source 1..42: mol_type = other DNA
atgctgtctaggaatgacgaggccgcttccgcacagcagtag

SEQ ID NO: 228577 - DNA, 201 bp, synthetic construct
  misc_feature 1..201: note = Description of Artificial Sequence: Synthetic coding sequence
  source 1..201: mol_type = other DNA
atgctcagccggaatgacgtgaagcgcctggagaggtcatgggctcagggatcaagcgaacaggagctacactacgctagcctgcagaggttacctgtacccagctctgaggggcctgatctccggggacgcgataagcggggaacaaaagaggatcccagggcagattacgcctgcatcgcagagaacaagccgacatag

SEQ ID NO: 228578 - DNA, 87 bp, synthetic construct
  misc_feature 1..87: note = Description of Artificial Sequence: Synthetic coding sequence
  source 1..87: mol_type = other DNA
atgctgagccgcaacgacggacccggattgctccgagctgggactccactatgtatttcggcagaggcagcaagtgcccagcaatag

SEQ ID NO: 228579 - DNA, 315 bp, synthetic construct
  misc_feature 1..315: note = Description of Artificial Sequence: Synthetic coding sequence
  source 1..315: mol_type = other DNA
atgctgtcccgtaatgatgacatctgcatttacggaggcctcggacttggaggcttattactactggcagtcgtcctgctcagcgcttgcctgtgctggcttcatcgcagggtcaaacgcctggaacggagctggcacctgcttagctggtcccaagctcagggtagcagcgagcaggagctacattatgcctctttacagcgcctgccggtacccagctcagaggggcctgacctccggggacgagacaagagaggcaccaaggaggacccacgggcagattacgcctgtatcgccgagaacaagcctacgtag

SEQ ID NO: 228580 - DNA, 249 bp, synthetic construct
  misc_feature 1..249: note = Description of Artificial Sequence: Synthetic coding sequence
  source 1..249: mol_type = other DNA
atgttatcccgcaacgacgatatttgtatttacgggggactgggcctgggcggtttgctcttgctggccgttgtcctgctgtctgcttgcctttgttggctgcaccgacgcgtgaaacgactagagcgctcttggaggctacctgttcccagctctgaagggccagatttgcgaggtcgcgacaagaggggtacaaaggaggacccacgagctgattacgcatgtatagccgagaacaagccaacatag

SEQ ID NO: 228581 - DNA, 201 bp, synthetic construct
  misc_feature 1..201: note = Description of Artificial Sequence: Synthetic coding sequence
  source 1..201: mol_type = other DNA
atgttatctcggaatgacgtaaaacgattggagcgctcttgggcccagggctcttccgagcaagaattgcactacgccagtctccaacgcctgcctgtgccctcatccgagggtcccgatcttaggggaagagataagagaggcacgaaagaggatccaagggcagactatgcctgcatcgcggaaaataagcctacctag

SEQ ID NO: 228582 - DNA, 87 bp, synthetic construct
  misc_feature 1..87: note = Description of Artificial Sequence: Synthetic coding sequence
  source 1..87: mol_type = other DNA
atgctgtcacggaatgatgggcctggactcttacgggcagggacccccctgtgtatctctgctgaagccgcatccgcacagcaatag

SEQ ID NO: 228583 - DNA, 132 bp, synthetic construct
  misc_feature 1..132: note = Description of Artificial Sequence: Synthetic coding sequence
  source 1..132: mol_type = other DNA
tgaagccgtaatgatgatatctgcatatacggcggtctcggactggggggactgcttttactggcggtggtactgctatcagcctgcctgtgctggctgcatcgccgtgaggctgcctcagcacagcagtag

SEQ ID NO: 228584 - DNA, 249 bp, synthetic construct
  misc_feature 1..249: note = Description of Artificial Sequence: Synthetic coding sequence
  source 1..249: mol_type = other DNA
atgttgtcacgcaacgacgatatatgcatatatggcggattgggcttaggtgggttgttgctgctcgcagtggtcctgttgtctgcatgcttatgttggttgcacagacgagttaaaaggcttgagagaagttggaggctgccagtcccttcgtcagagggcccagatctgcgcggacgggataagcgagggacaaaggaggacccaagggctgactatgcctgtattgcggagaataagccaacttag

SEQ ID NO: 228585 - DNA, 201 bp, synthetic construct
  misc_feature 1..201: note = Description of Artificial Sequence: Synthetic coding sequence
  source 1..201: mol_type = other DNA
atgcttagtaggaatgatgtgaagcgcttggaaagaagctgggcacagggctcttccgagcaagagctccactacgccagtctccagaggctgcccgtgccttctagcgagggacctgacctgcggggaagggataaacgtggcaccaaggaggaccctcgagctgattatgcatgcattgcagagaacaagcctacttag

SEQ ID NO: 228586 - DNA, 180 bp, synthetic construct
  misc_feature 1..180: note = Description of Artificial Sequence: Synthetic coding sequence
  source 1..180: mol_type = other DNA
atgctgtctagaaatgatgacatttgcatttacggaggactgggccttggcggtctgctcctgctggcagtggtcttactatctgcttgcctgtgttggttgcaccgacgcggtcctgggctactgagggccggtacacccctctgcatctcagctgaagcggctagtgcgcagcagtag

SEQ ID NO: 228587 - DNA, 87 bp, synthetic construct
  misc_feature 1..87: note = Description of Artificial Sequence: Synthetic coding sequence
  source 1..87: mol_type = other DNA
atgctctcccgcaacgatgggccagggctgcttcgggcaggcacacccctctgtattagcgcagaggctgcatcagctcagcagtag

SEQ ID NO: 228588 - DNA, 249 bp, synthetic construct
  misc_feature 1..249: note = Description of Artificial Sequence: Synthetic coding sequence
  source 1..249: mol_type = other DNA
atgctgtctagaaatgatgacatttgtatttatggcggactggggctcggtggtcttctactgctggctgtcgtgctgctttctgcttgtctctgttggttgcacaggcgagtgaaacgattagagcggtcatggcggctaccagtcccttccagcgagggacccgacctgcggggtagagacaagaggggcactaaggaagacccccgtgctgactacgcttgcattgcagaaaataaaccgacatag

SEQ ID NO: 228589 - DNA, 111 bp, synthetic construct
  misc_feature 1..111: note = Description of Artificial Sequence: Synthetic coding sequence
  source 1..111: mol_type = other DNA
atgttatcacgaaatgatgacatctgcatctatgggggactgggcctgggtggattactgctgctcgcggtagtcctcctgtccgcttgtctgtgttggctgcataggtag

SEQ ID NO: 228590 - DNA, 222 bp, synthetic construct
  misc_feature 1..222: note = Description of Artificial Sequence: Synthetic coding sequence
  source 1..222: mol_type = other DNA
atgctctccagaaacgacgtgaaaaggctggaacgcagttggcacctcctaagttggtcacaggcccaaggctctagcgagcaggagctgcactatgcatccttgcagcggctcccggttccatcttctgagggcccagatctgagaggtcgcgataagcgaggcactaaagaggacccccgagctgactacgcctgtatcgctgagaacaaacccacctag

SEQ ID NO: 228591 - DNA, 201 bp, synthetic construct
  misc_feature 1..201: note = Description of Artificial Sequence: Synthetic coding sequence
  source 1..201: mol_type = other DNA
atgctcagccgtaacgatgttaagcgactggaaaggagttgggcacagggttcgtcagaacaagagctacactatgcctccctgcagagactcccggtaccttcgtctgagggccctgatctcagaggcagagacaaacgcggaacaaaagaagacccccgagcagattatgcgtgcattgccgagaataagccaacgtag

SEQ ID NO: 228592 - DNA, 87 bp, synthetic construct
  misc_feature 1..87: note = Description of Artificial Sequence: Synthetic coding sequence
  source 1..87: mol_type = other DNA
atgctctctagaaacgacgggccaggactcctgagggctggtacgccactatgcatatccgctgaagccgcttcagctcagcagtag

SEQ ID NO: 228593 - DNA, 201 bp, synthetic construct
  misc_feature 1..201: note = Description of Artificial Sequence: Synthetic coding sequence
  source 1..201: mol_type = other DNA
atgctctccagaaacgacgacatttgcatctatggtggtttaggactcggcggactactgttgctggcagtagtgctgttgtctgcgtgtctgtgttggctacatcggcgtgcaccttcggtcctggtaccaggcccaggcctgctcagagccggaacccccctctgtatctctgccgaggctgcaagcgcacaacagtag

SEQ ID NO: 228594 - DNA, 222 bp, synthetic construct
  misc_feature 1..222: note = Description of Artificial Sequence: Synthetic coding sequence
  source 1..222: mol_type = other DNA
atgctgagtaggaatgacgtcaagcggttggagcggtcctggcacctgctcagctggtcgcaggcccagggaagttccgagcaagaactgcattacgctagccttcagcgcttgccagtgccctccagcgaaggtcctgaccttcgcggtagggacaaaaggggaaccaaggaggatccaagagctgactatgcatgcattgcggaaaacaaaccgacctag

SEQ ID NO: 228595 - DNA, 201 bp, synthetic construct
  misc_feature 1..201: note = Description of Artificial Sequence: Synthetic coding sequence
  source 1..201: mol_type = other DNA
atgctcagcagaaacgatgatatttgcatctatgggggactaggcctgggcggtcttttgttgctggctgtcgtcctgctcagtgcttgcttatgttggctgcacagacgagcacctagcgttctggtgccgggaccaggcttgctaagggctggcacccccctgtgcatcagcgcagaagcagcctcagcccaacaatag

SEQ ID NO: 228596 - DNA, 87 bp, synthetic construct
  misc_feature 1..87: note = Description of Artificial Sequence: Synthetic coding sequence
  source 1..87: mol_type = other DNA
atgttatccaggaatgacgggcctggcctgttgcgggctggcactcccctatgcatctccgcggaggctgcctctgcacagcagtag

SEQ ID NO: 228597 - DNA, 87 bp, synthetic construct
  misc_feature 1..87: note = Description of Artificial Sequence: Synthetic coding sequence
  source 1..87: mol_type = other DNA
atgctctcaagaaacgatggacccggtttgcttcgagctggcactcccctttgcatcagcgctgaagccgcatccgcccaacagtag

SEQ ID NO: 228598 - DNA, 87 bp, synthetic construct
  misc_feature 1..87: note = Description of Artificial Sequence: Synthetic coding sequence
  source 1..87: mol_type = other DNA
atgctctctcgcaatgatggaccaggtctcttgagggcagggacacccctgtgcatctcagctgaagctgcatctgcacagcagtag

SEQ ID NO: 228599 - DNA, 87 bp, synthetic construct
  misc_feature 1..87: note = Description of Artificial Sequence: Synthetic coding sequence
  source 1..87: mol_type = other DNA
atgcttagtagaaatgatggccctggcctcctgcgcgcaggcacccccctgtgtatcagcgccgaggctgccagcgcccagcagtag

SEQ ID NO: 228600 - DNA, 294 bp, synthetic construct
  misc_feature 1..294: note = Description of Artificial Sequence: Synthetic coding sequence
  source 1..294: mol_type = other DNA
atgctttctagaaacgacgacatttgtatttatgggggtctgggcctggggggtctgcttttgctggccgtggtattactatcggcgtgcctgtgctggttgcataggagggttaaaaggctggagcggtcttgggcacagggaagctcagagcaagagctgcattatgccagcctgcagagactgcccgtgcccagttccgagggacctgacttgaggggacgcgacaaacgtggaaccaaggaggatccaagagcggattatgcatgcatcgcagagaacaaaccaacatag

SEQ ID NO: 228601 - DNA, 222 bp, synthetic construct
  misc_feature 1..222: note = Description of Artificial Sequence: Synthetic coding sequence
  source 1..222: mol_type = other DNA
atgctaagccgaaatgacgtgaagcgcttagagaggtcttggcatctgctgtcgtggagtcaggctcaagggtcttcggagcaggagttgcattatgccagcctgcagagactgccagtgcctagtagcgaggggccagacctgagaggaagagataagcgcggtactaaagaggacccaagggctgattacgcttgtattgcggagaacaagcccacatag

SEQ ID NO: 228602 - DNA, 87 bp, synthetic construct
  misc_feature 1..87: note = Description of Artificial Sequence: Synthetic coding sequence
  source 1..87: mol_type = other DNA
atgctttcccgtaatgatggccctggtctccttcgcgctgggactcccctttgcatcagtgccgaagccgcatcagcccagcagtag

SEQ ID NO: 228603 - DNA, 294 bp, synthetic construct
  misc_feature 1..294: note = Description of Artificial Sequence: Synthetic coding sequence
  source 1..294: mol_type = other DNA
atgctctcgcggaacgatgacatttgtatctatggtggcttagggctggggggattacttcttttagcagtcgtgttactgagcgcctgcctatgctggctacaccggagggtgaaacgtttagagcgtagttgggcacaggggtcctccgaacaggaactccattacgctagcctgcagaggctgcccgtgccttcaagtgagggcccagacctgagaggacgtgacaaaaggggaaccaaagaggacccacgcgcagactacgcttgcattgctgagaataaaccgacttag

SEQ ID NO: 228604 - DNA, 201 bp, synthetic construct
  misc_feature 1..201: note = Description of Artificial Sequence: Synthetic coding sequence
  source 1..201: mol_type = other DNA
atgcttagtagaaacgacgtgaagagactcgagagatcttgggctcagggatcctccgaacaggagcttcactacgccagtctgcagagactacccgtgccctcttccgaggggcctgacctgcgaggaagggacaagagggggaccaaagaagatcctcgcgcagattatgcttgcatcgccgagaacaagcctacatag

SEQ ID NO: 228605 - DNA, 87 bp, synthetic construct
  misc_feature 1..87: note = Description of Artificial Sequence: Synthetic coding sequence
  source 1..87: mol_type = other DNA
atgctgtccaggaatgacggacccggattactacgtgccggaacgcctctgtgcatttcagctgaggccgcatctgctcaacagtag

SEQ ID NO: 228606 - DNA, 201 bp, synthetic construct
  misc_feature 1..201: note = Description of Artificial Sequence: Synthetic coding sequence
  source 1..201: mol_type = other DNA
atgctgtcaaggaacgacgtaaaacggcttgagcggtcctgggcccaaggctcaagcgagcaggagttgcattatgcctcactgcagaggttaccggtgccaagcagcgagggacctgacctgaggggaagagacaagcggggaaccaaagaggacccgagggccgactatgcttgtatcgcggagaacaagccaacctag

SEQ ID NO: 228607 - DNA, 42 bp, synthetic construct
  misc_feature 1..42: note = Description of Artificial Sequence: Synthetic coding sequence
  source 1..42: mol_type = other DNA
atgctgagtcgcaatgatgaagccgcaagtgctcaacagtag

SEQ ID NO: 228608 - DNA, 132 bp, synthetic construct
  misc_feature 1..132: note = Description of Artificial Sequence: Synthetic coding sequence
  source 1..132: mol_type = other DNA
taccggggaatgatgatttacgtgagtacaggtgcctggggatgggccggttcttgcttctggcaatggtccttttgccctcccgcatgtgtcggctgcatcgaggaaagattgcctgtcccaagcagctag

SEQ ID NO: 228609 - DNA, 201 bp, synthetic construct
  misc_feature 1..201: note = Description of Artificial Sequence: Synthetic coding sequence
  source 1..201: mol_type = other DNA
atgttatcccgaaatgatgtgaagcgactggagaggtcttgggcccaggggtcctcagagcaggaactgcactatgcgagcctccagcggctgcctgtcccctcctcagaggggcctgatctgcgcggaagggataagcggggaaccaaggaagacccccgagccgattacgcttgtatcgccgagaataaacccacgtag

SEQ ID NO: 228610 - DNA, 294 bp, synthetic construct
  misc_feature 1..294: note = Description of Artificial Sequence: Synthetic coding sequence
  source 1..294: mol_type = other DNA
atgctttcgcggaatgacgacatctgtatttacgggggtctaggtctgggtggactgctgctgctggcggtggttctgcttagtgcttgcctctgttggctgcaccgacgcgtgaagaggctggaaagatcatgggcccagggatcttccgagcaggaactgcactacgccagtcttcagcgtctcccagttccatcatctgagggtcctgatctccggggacgtgacaaaaggggaacaaaagaggatcctcgcgctgactacgcctgcattgctgaaaataagccaacttag

SEQ ID NO: 228611 - DNA, 222 bp, synthetic construct
  misc_feature 1..222: note = Description of Artificial Sequence: Synthetic coding sequence
  source 1..222: mol_type = other DNA
atgctgagcaggaacgatgtgaaacggttagagaggtcctggcacctcctgtcatggtcacaggctcagggatcttcagaacaggagcttcattatgctagcctgcagaggctgcccgtacctagcagcgagggtccagatctgagagggagggacaagcgaggaacaaaagaagacccacgggctgattacgcctgtattgccgagaacaagcctacttag

SEQ ID NO: 228612 - DNA, 42 bp, synthetic construct
  misc_feature 1..42: note = Description of Artificial Sequence: Synthetic coding sequence
  source 1..42: mol_type = other DNA
atgctgagtcgcaatgacgaagcagcctctgcccagcagtag

SEQ ID NO: 228613 - DNA, 276 bp, synthetic construct
  misc_feature 1..276: note = Description of Artificial Sequence: Synthetic coding sequence
  source 1..276: mol_type = other DNA
atgatttacgtgtctacaggtgcctggggctgggccggaagttgcttttggcagtggagcttctgccctcccgcatgtgtcggatgcatcgaggaacatctcttaagttggtcacaggcccaggggtctagcgagcaggaacttcattacgccagtctgcaaaggttgcctgtacctagctccgaaggacccgatctccggggtcgggacaagcgaggcaccaaagaggacccacgcgctgactatgcgtgtattgccgaaaacaaacccacatag

SEQ ID NO: 228614 - DNA, 276 bp, synthetic construct
  misc_feature 1..276: note = Description of Artificial Sequence: Synthetic coding sequence
  source 1..276: mol_type = other DNA
atgatttacgtcagtacaggcgcatggggatgggcaggatcctgtttctggcagtggagcttctgtccacccgcatgcgttggctgcattgaggaacacctactgtcttggagtcaagcacaggggtcttccgagcaggagcttcactatgcatcactgcagcgtctacctgtgccctcttcggaaggaccagacctcagaggtagagataaacggggtaccaaagaagatcccagggctgattacgcctgtatcgcagagaacaaacccacctag

SEQ ID NO: 228615 - DNA, 276 bp, synthetic construct
  misc_feature 1..276: note = Description of Artificial Sequence: Synthetic coding sequence
  source 1..276: mol_type = other DNA
atgatctacgtgtccactggcgcatggggctgggcgggaagctgtttctggcaatggtcattctgtcctccagcttgcgtcgggtgtatcgaagaacaccttctgtcctggtctcaggctcaggggtcaagcgagcaagaactgcactacgcttctctccagagattgccagttccaagttctgaaggacctgatctccggggaagagacaagaggggcaccaaggaggatccgcgtgctgactacgcctgtatagccgagaacaagcctacctag

SEQ ID NO: 228616 - DNA, 108 bp, synthetic construct
  misc_feature 1..108: note = Description of Artificial Sequence: Synthetic coding sequence
  source 1..108: mol_type = other DNA
atgcttagccgcaacgacgctccctccgttttagtgcctggacctgggctcctcagggcgggaacccctttgtgtatcagcgccgaagcagcctccgcacagcaatag

SEQ ID NO: 228617 - DNA, 276 bp, synthetic construct
  misc_feature 1..276: note = Description of Artificial Sequence: Synthetic coding sequence
  source 1..276: mol_type = other DNA
atgatctacgtctctactggcgcttggggttgggcagggtcctgtttctggcagtggtccttctgtcctccagcatgtgtagggtgcattgaggaacacctcttgtcctggagccaggcccaaggttccagcgaacaagagctgcattatgccagtctccagagattaccggtgccttctagcgaagggcctgatttaagaggacgcgataagcgtggtacaaaggaggatcccagagccgactacgcttgcatcgcggaaaataaacctacgtag

SEQ ID NO: 228618 - DNA, 108 bp, synthetic construct
  misc_feature 1..108: note = Description of Artificial Sequence: Synthetic coding sequence
  source 1..108: mol_type = other DNA
atgttgagcagaaatgacgcaccctcagtgctagtgcctggtccaggtttgcttcgggctgggactcccctgtgtatatcggccgaggcagcctctgcacagcagtag

SEQ ID NO: 228619 - DNA, 108 bp, synthetic construct
  misc_feature 1..108: note = Description of Artificial Sequence: Synthetic coding sequence
  source 1..108: mol_type = other DNA
atgctgagccgcaacgatgccccaagcgtgttggttcccggacctgggcttctgcgtgctggcacgccactgtgcatctccgctgaagcagccagtgcacaacagtag

SEQ ID NO: 228620 - DNA, 276 bp, synthetic construct
  misc_feature 1..276: note = Description of Artificial Sequence: Synthetic coding sequence
  source 1..276: mol_type = other DNA
atgatctacgtgagcaccggagcctggggatgggctggctcctgcttttggcaatggagtttctgtccgccagcctgtgtcggatgtattgaggaacacctactgtcctggtcacaagcgcaaggctcgtctgagcaggagctacactatgcctccctgcagcggttgccagtaccttctagcgaggggcctgacctgcgtggtagagacaagcggggaacaaaagaagacccaagagctgattatgcatgcattgcagagaacaagcccacttag

SEQ ID NO: 228621 - DNA, 276 bp, synthetic construct
  misc_feature 1..276: note = Description of Artificial Sequence: Synthetic coding sequence
  source 1..276: mol_type = other DNA
atgatctacgtatctaccggtgcctggggatgggctggttcatgcttttggcagtggtcgttttgtcccccagcctgtgtaggctgtattgaagagcacctcctgagctggtcacaagctcagggctcctccgaacaagagttgcactacgcttccctgcagcggttacctgtaccaagtagcgaaggcccagatctgcgaggtagagacaaaagagggacgaaggaggacccaagggccgactatgcttgtatcgcggagaacaagcccacatag

SEQ ID NO: 228622 - DNA, 108 bp, synthetic construct
  misc_feature 1..108: note = Description of Artificial Sequence: Synthetic coding sequence
  source 1..108: mol_type = other DNA
atgttgagccgcaacgacgctccttccgtgttggttcccggacccggactgctgcgagccggaactcccctatgcatttcagcagaggccgcatccgcacagcagtag

SEQ ID NO: 228623 - DNA, 108 bp, synthetic construct
  misc_feature 1..108: note = Description of Artificial Sequence: Synthetic coding sequence
  source 1..108: mol_type = other DNA
atgctgagtagaaacgacgcaccatctgtcctggtgccgggacccggtctgctgagagccggtacacctctgtgcatttcagccgaggccgcttcagctcaacagtag

SEQ ID NO: 228624 - DNA, 108 bp, synthetic construct
  misc_feature 1..108: note = Description of Artificial Sequence: Synthetic coding sequence
  source 1..108: mol_type = other DNA
atgctcagccgaaacgacgcacctagcgtattggtgccagggcctgggctgcttcgcgcagggacccccctatgtatatctgccgaggctgcctctgcacagcagtag

SEQ ID NO: 228625 - DNA, 108 bp, synthetic construct
  misc_feature 1..108: note = Description of Artificial Sequence: Synthetic coding sequence
  source 1..108: mol_type = other DNA
atgctgtccaggaacgatgctccgtctgtgttagtgcctggtcctgggctactgagagccggaactcccctgtgtatcagcgcagaagctgcctccgctcagcagtag

SEQ ID NO: 228626 - DNA, 276 bp, synthetic construct
  misc_feature 1..276: note = Description of Artificial Sequence: Synthetic coding sequence
  source 1..276: mol_type = other DNA
atgatctacgtgtcaacgggggcatggggttgggctggctcctgcttctggcagtggagtttctgcccccctgcatgcgtgggttgcattgaggaacacctgttgtcatggtcccaggcccaaggctcttctgagcaggagctacactacgccagcctgcaaaggctcccggttcctagctctgagggcccagaccttagggggagggataagagggggacaaaagaggacccaagagctgactacgcatgtattgccgaaaacaaacccacttag

SEQ ID NO: 228627 - DNA, 843 bp, synthetic construct
  misc_feature 1..843: note = Description of Artificial Sequence: Synthetic coding sequence
  source 1..843: mol_type = other DNA
atggagcgtgagatggtgctgtgtctggcccaaactattcatacccaagaagatctccccagaccatccatctcagccgagcccggaaccgtgatccctctaggatcacacgtcacgttcgtgtgtcgtggcccagtgggtgttcagacgttcaggctcgagagggagtcaagatccacctataatgacaccgaagacgtgagccaagcttccccctccgagagtgaagctagattcagaatcgacagcgtcagcgaaggcaacgcagggccttatcgctgcatttattacaagcctcctaagtggagcgaacagtccgattacctcgagctccttgttaaagaaacctctggaggccctgacagccccgataccgagcccggatccagtgcagggccaacacagcggccatccgataatagtcataatgagcacgctcccgcatcccaaggactgaaagccgaacacctctacatcctgatcggtgtgagtgtggtcttcctcttctgtctcctcctgctggttttgttttgtttgcaccggcagaaccaaatcaaacagggtccacctcgctccaaggacgaggagcagaagccgcagcagcggccagacctggccgtcgacgtgctggaaaggacagcagacaaggcgaccgtgaacggcctccccgaaaaggatcgcgaaacggacacgagcgccctcgccgctggttctagccaggaagtcacgtatgcacagcttgatcactgggcattgactcagagaacggccagggccgttagcccacagtctacaaaacccatggcagaaagcataacgtatgctgccgtagctagacattag

SEQ ID NO: 228628 - DNA, 813 bp, synthetic construct
  misc_feature 1..813: note = Description of Artificial Sequence: Synthetic coding sequence
  source 1..813: mol_type = other DNA
atgtcaccccatccgacagctctgctcggtctggtgctctgtctcgctcagaccatccatacccaggaggaggacctccctagaccctccatctccgccgaacccggaactgtcattccactcggtagtcatgttacctttgtctgtagagggccagtgggcgtccaaacctttagactggaacgggaatcacgcagcacatataacgatacagaagacgtctcacaggccagcccgtctgagtcggaggcccgatttcggatcgacagcgtgagtgagggcaatgccggaccttataggtgtatttactataagccccctaaatggtccgagcagagcgactatttggagctgctcgtgaaaggacccacgcagcgaccctctgacaattctcataatgagcacgctccagcgtcacagggcttgaaggcagagcatctctatattctgattggcgtgtctgttgtttttctgttttgcctgctgttattggtgcttttctgtctccaccgacaaaaccagattaagcaagggcctcccaggtccaaagatgaggagcagaagccccagcaaagacctgatttagcagtcgacgtcctcgagcggactgccgataaagcaacagtgaacgggctcccagagaaggatcgcgaaacagacacctcagcccttgccgctggttcttctcaggaggtgacatacgctcagctggatcattgggccctgacacagagaacagccagggcggtgtctcctcagtcgacgaaaccaatggcagagagcatcacatatgcggctgtggcacggcactag

SEQ ID NO: 228629 - DNA, 864 bp, synthetic construct
  misc_feature 1..864: note = Description of Artificial Sequence: Synthetic coding sequence
  source 1..864: mol_type = other DNA
atgagtcctcaccccaccgctctgttggggctcgtgctttgcctcgctcagaccatacacacacaagaggaggatctccctagaccgtccatatctgcagagcccggtaccgtgatcccactcggctcacatgtcaccttcgtgtgtcgcggaccggtaggagtccagactttccgcctggaaagagaatcaaggtcaacctacaacgacacagaggacgtaagtcaggcttcaccatctgagtccgaagcccgattccggattgacagtgtttccgaggggaatgctggaccttacagatgcatctactacaagccccctaagtggagcgaacagagcgactatctcgaactcctggtgaaggaaacctcaggtggacccgattcccccgacacagagccgggatcttcagcgggacctacccagagaccatccgacaattcccataacgagcatgcccctgccagccaagggttgaaggcagagcacctgtacattctaataggtgtgtccgtcgtgttcttgttttgtctgcttctgcttgtgctattctgcctgcatcgccagaaccagatcaagcaaggaccgcctaggtcaaaggacgaggagcagaaaccgcagcagcggccagatttagccgttgatgtgttagagcgaacagccgacaaggcgacagtgaatggccttccagaaaaagaccgcgaaacagacacttccgctctagctgctggaagctcacaggaagtcacttacgctcaattggaccattgggctcttactcagcgaaccgcacgcgctgtgagcccccagtctacgaaacccatggccgagtcaatcacttatgcagctgtggcaagacactag

SEQ ID NO: 228630 - DNA, 1545 bp, synthetic construct
  misc_feature 1..1545: note = Description of Artificial Sequence: Synthetic coding sequence
  source 1..1545: mol_type = other DNA
atgctcactcgtgtaaagtccgccgttgcgaactttatggggggaataatggctggctccagcgggagcgaacacggcggtggaagctgcgggggatccgacttgccccttcgcttcccatacgggcgacctgagtttctgggcttaagccaggatgaagttgagtgttctgccgatcatatagcacgccctatccttatcttgaaggagaccagaaggttgccttgggccaccgggtacgccgaagtgataaacgccggaaagtcaacacataacgaggaccaggcctcgtgcgaggtgctgacagtgaagaagaaagctggcgcagtgacatcaacgccaaacagaaattcctctaaacgaagatcctccctgcctaatggcgagggtctgcagttaaaggagaactccgaatcggaaggtgtaagctgccattactggtccctgttcgacggacacgcgggttcaggcgcagccgttgtggcatcgcgattgttacagcaccatatcactgagcagctccaggacatcgtcgatatcctcaagaacagcgcagtgctgccacctacctgcctgggcgaggaaccagagaatactcctgcgaattccaggaccctcacccgtgccgcttctctgagaggcggtgtcggggctcccggatcaccgagtacaccacccaccagattctttacagagaagaagattccccacgagtgcctggtcatcggggctctggaatctgcatttaaagagatggatctgcagatcgaacgtgaaaggtcttcatataatataagcgggggttgtaccgctctgatcgtgatatgtttattgggcaaactttatgtggcgaatgccggtgacagccgggctatcattatcagaaatggcgaaatcatccctatgtctagcgagttcacacccgagacagaacggcagcgtttacaatacctcgcgtttatgcagccccacttgctcggcaatgagtttactcacctggaattccctcgtcgagtacaaaggaaagaactgggcaagaagatgctctacagagacttcaatatgacaggctgggcctacaagactatcgaagacgaagacctcaaatttcccctgatctatggcgaaggaaaaaaggcaagggtaatggcgaccatcggagttacacgcggtctgggtgaccacgatcttaaggtccacgactcaaacatctacatcaagcctttcctctcttcagcccctgaagtgcgtatatacgacctgtctaaatatgaccacggaagtgacgatgttctcatcctggcgaccgatggcctatgggatgtgctgtctaatgaggaagttgcagaagctatcacccaattcttacctaactgcgatcctgatgaccctcaccgttatactttagctgcacaggatctcgtcatgcgtgctcgtggcgtactgaaggacagaggatggcgcattagcaacgacaggctcgggagtggagacgacatatctgtgtatgtcattcctcttatccacggaaataaactaagttag

SEQ ID NO: 228631 - DNA, 1527 bp, synthetic construct
  misc_feature 1..1527: note = Description of Artificial Sequence: Synthetic coding sequence
  source 1..1527: mol_type = other DNA
atgcttccccaacgaaacttatctaaacgacaggtgcctaccatgcatataccagtcaaaacacggaggctgttagccgcactcaaggtccttgacacaaaggatctgaccatagaaaaggtggtcataaatggtcaggaagtcaagtacgcccttggggagcgacagagttataagggatctcccatggaaatctctctacctatcgcactcagtaagaaccaggagatcgtcatcgaaatctcttttgaaacgtctccgaaatccagcgctctgcaatggctgacccccgaacaaacgtctggcaaggagcacccctaccttttctcacagtgtcaggcaattcactgcagggctatcctgccttgtcaggacacaccgagcgtgaagttgacatacacagccgaggtgtccgttcctaaagaactggtcgccctcatgagcgcgattcgggacggcgaaacacctgacccagaagacccatcccggaagatctacaagtttattcagaaagtcccaataccctgttatctaatagcactggttgtgggcgcattagagtcacgtcagatcggccctcgcacgctggtctggtcagaaaaagaacaggttgagaaatcggcctacgagttttcagagaccgagtcgatgctgaagatcgcagaggatttgggcggaccatacgtgtgggggcagtacgatctgctggtgttgcccccatctttcccatacgggggaatggagaacccctgtctgacctttgtgacgccaaccttactggccggtgacaaatccctgtccaacgtgatcgcccacgaaatatcacactcgtggactggcaacctcgtaacaaacaaaacatgggaccacttttggctcaatgaaggacacaccgtgtatctcgaaaggcatatttgcggtcgattattcggcgagaagttcaggcactttaatgcgctcggaggatggggggagctgcagaattcggtgaagacctttggcgagacacacccctttaccaagcttgttgtggatctgacggatatcgaccccgatgtggcctacagttctgttccctacgaaaagggtttcgccctgcttttttacctggaacagctgctcggcggaccagagatctttctcggctttctcaaggcctacgtggagaagttctcctataaatccatcactacagacgactggaaggatttcttgtacagctacttcaaagacaaagtggatgtactgaaccaggttgactggaacgcgtggttgtacagtccaggcctgcctcccatcaaacccaattatgacatgacactcacgaacgcatgtatcgcgcttagccagcgctggattacggctaaagaggatgatctgaactcatttaatgccacggacctcaaagacctctcaagccaccaactcaatgagttcctggcccagacactccagcggatggcagcagcccttcacagtatccaggtgggcggaaggaactctttcggggcaaaggacggcaactag

SEQ ID NO: 228632 - DNA, 1764 bp, synthetic construct
  misc_feature 1..1764: note = Description of Artificial Sequence: Synthetic coding sequence
  source 1..1764: mol_type = other DNA
atgctgcctcagaggaatctaagcaagagacaggtcccaaccatgcacataccagtgaagacacgcagattactcgccgcactcaaggtgctggataccaaggaccttaccatagagaaggtcgtgataaacggtcaagaggtgaagtacgcacttggagagcgacagtcctataaaggctcaccaatggaaattagtctcccgattgccctgtctaaaaaccaggaaatagtgatcgagatttcctttgagacctctcccaaaagtagtgctctgcagtggttgactcccgaacagacaagcgggaaagaacatccgtacttattctcgcagtgtcaggccattcactgccgcgctatactgccttgtcaagataccccttctgttaaactcacctatacagctgaagtatccgtgcctaaggaactcgttgctcttatgagtgcgatcagggacggcgagactccagacccagaggatccatccaggaaaatctacaaattcattcaaaaggtgcccatcccctgttatctaatcgcgctcgtcgtaggggctcttgaatcacgacagatcggcccacggacattagtctggtcagagaaggagcaagtggaaaagtctgcttatgagtttagtgaaacagaatcaatgctgaagatcgccgaggacctgggcggaccctatgtgtggggacaatacgatctcctggtgctgccccctagtttcccatatgggggaatggaaaacccctgcctcaccttcgtgaccccaacattacttgcaggtgacaaaagtctatcaaacgtgattgcgcatgaaatttcgcattcctggacagggaacctggtcaccaacaaaacatgggatcatttctggctgaatgaaggacacaccgtatatctagagcggcatatctgtggacgtctgttcggcgagaagtttcgccatttcaacgctctggggggttggggggagctgcagaactcggtgaaaacgtttggggagacccacccttttactaagctggtggtcgacctcaccgacatagacccagacgtagcttacagtagcgtcccttatgagaaagggtttgcgctcctattctacctggagcagttgctcggcggaccagagatatttctgggtttcttgaaggcgtacgtggaaaaattcagttataagtctattaccactgacgattggaaggatttcttgtatagctattttaaggataaggtggacgtactcaatcaagtcgactggaatgcttggctgtactctcctgggcttcctcccattaaacctaactacgatatgacactcaccaatgcttgcatcgcactgtctcaacgatggattactgccaaagaggacgacttgaattccttcaatgccacggacctaaaagatctctcctcccatcagctcaatgagtttctggcccagacactgcagagggccccactaccgttaggccatatcaaaagaatgcaggaggtgtataactttaacgctattaacaattctgagatccgatttcgctggctcaggctctgtatacagtccaaatgggaggacgctatccccctggccctgaaaatggccaccgaacagggcaggatgaagtttacacgtcctttgtttaaggatcttgcagcttttgacaaatcacacgaccaggctgtcaggacctatcaggagcataaggcctccatgcaccctgtcacagcaatgctcgtgggaaaagacctaaaggtcgactag

SEQ ID NO: 228633 - DNA, 1059 bp, synthetic construct
  misc_feature 1..1059: note = Description of Artificial Sequence: Synthetic coding sequence
  source 1..1059: mol_type = other DNA
atgaacaccacttcctccgcagccccacccagcctgggagtcgaattcatcagcctactggcaattattctactgtctgtcgcactggcagtcggtcttcctggcaactcctttgtggtttggagcatcctgaaacggatgcagaaaagatccgtcaccgcacttatggtcctaaatctggctttggctgacctggccgtattgttaactgctcctttctttctccacttcttggcacagggaacctggagcttcgggctggctggttgccgcctgtgtcactatgtttgtggtgtcagtatgtacgccagtgtcctgctgatcaccgctatgtccctggaccggtcccttgcagtggctaggcccttcgtttcacagaagttacgcactaaggccatggccaggcgagtcctcgccggaatttgggtgctctcatttctcttagccactcccgtcctggcctatcgcactgtagtaccctggaaaactaatatgagcctctgtttcccacgttatcccagcgaagggcacagagctttccatctgattttcgaagcggtgacgggtttccttttgccatttctcgcagtggtcgcctcctactctgacatcgggcgaaggctccaggcacgaaggtttcgacggtctagacggactggcagactggtggttttaatcattcttacctttgccgctttttggttgccttaccacgtggtcaaccttgccgaggctggtcgggctctcgcaggacaggctgccggtctaggacttgtcggtaagagactcagccttgccaggaatgtgctgatcgcactggcttttttgtcctcctccgtcaaccccgtgctgtacgcttgcgcagggggagggttactcagaagtgcaggcgtaggtttcgtggcaaaacttttggaaggtactggctcagaggctagcagcacgcgaaggggcggatccttgggacaaaccgcaaggtctggccctgccgcattagagcccggacctagcgagagtttgacggcatcaagtccactgaagctcaacgagctgaattag

SEQ ID NO: 228634 - DNA, 1059 bp, synthetic construct
  misc_feature 1..1059: note = Description of Artificial Sequence: Synthetic coding sequence
  source 1..1059: mol_type = other DNA
atgaacaccacctcaagtgcggctccgcctagtctgggcgttgaattcatcagtctgctggccattattctcctgtccgtcgcactggcggtgggcttaccagggaattctttcgtagtctggtctatactcaagagaatgcagaagagaagcgtcacagctttaatggttttgaatttagctctcgcagacctcgcggtgctgctcaccgctcctttttttcttcacttccttgctcagggcacgtggtctttcggactcgcaggatgtcgtctctgccactatgtgtgtggagtgagcatgtatgcttccgtgctcctgattacggctatgagcttggacaggagcctggccgtcgccagaccgttcgtgtcacagaaactgcgtactaaagcaatggccagaagagtactcgctggtatctgggtgctttcttttcttttagctactccagtgctggcatataggactgtggtaccttggaagaccaatatgtccctctgctttccaaggtatcctagtgaaggacacagagcgtttcatctaattttcgaggctgtcaccggttttctcctgccctttttagctgtggtggccagctattctgatattggacggaggctccaagctagacgtttccgtaggagtcgtcggacaggaaggctggtggttttgattatccttacctttgcggcattctggctgccttatcatgtggtgaacctggcagaagccggtcgagcgctggcaggacaggccgctggattaggcctggtgggtaagagactgagcctagcgcgtaatgtcctgatcgcactagcgttcttgtcctctagtgttaaccccgtcctctacgcttgcgcagggggagggttgttaaggagcgccggtgtgggattcgtggcaaaattgcttgaggggaccggcagcgaggctagctccactaggcgcggaggctccctgggtcagacagctcgatctgggccagcagctctcgagccaggaccaagtgagagtctaacagcctccagcccactcaaattgaacgagctcaattag

SEQ ID NO: 228635 - DNA, 1059 bp, synthetic construct
  misc_feature 1..1059: note = Description of Artificial Sequence: Synthetic coding sequence
  source 1..1059: mol_type = other DNA
atgaatactacctcaagtgctgccccaccatccctgggagtggaatttatctctctcctggcaataatactcctgtctgtggcactagccgtggggctgcctggcaatagctttgttgtgtggagtattctgaagcgtatgcagaaacgatcagttacagcgctgatggtgctgaacctggctctcgccgacctcgccgtcttgctgacagctcccttttttcttcacttccttgcacagggcacgtggtcttttggtctcgcgggatgccggctgtgtcattacgtctgcggcgttagtatgtatgctagcgtgctgctgatcacggccatgtccttagatcgcagtttggcggtggctcggcctttcgtttcacagaagctacggaccaaagcaatggccagacgggtgctggcaggaatttgggtcctgtccttcctgcttgcaacaccagtcctggcttaccggaccgttgtgccctggaagacgaatatgtcactgtgcttcccgaggtacccaagcgagggacacagagccttccatttgatcttcgaagccgtgaccggatttctgctgccttttttggctgtagttgcctcctattccgatataggcagaaggctccaggcgcgacgttttcgtagaagccgaaggacgggacgcttagtggtactgatcattctgactttcgccgctttctggttaccctaccatgtggtgaacctggcagaggccggtcgagccttagccggacaggccgcagggctgggcctcgtggggaagagactgtcgttggccagaaacgttctcattgcactagcctttctcagctcatccgtgaaccccgtgctgtacgcctgtgccggaggcggactactgaggtcagcgggtgtagggtttgttgccaaactgctggaaggcaccgggagcgaggccagcagcacacgtagagggggtagtctgggccagaccgctaggagcggccctgccgcactcgagcctggaccttctgagtctctgaccgccagctcgcccctgaaactgaatgaattaaattag

SEQ ID NO: 228636 - DNA, 309 bp, synthetic construct
  misc_feature 1..309: note = Description of Artificial Sequence: Synthetic coding sequence
  source 1..309: mol_type = other DNA
atgaatacaacctcctcagccgctcctccgtctctcggagtggaatttataagtttacttgccatcatcctgttgtccgtagccttggcagttggattgcctggcaactccttcgtggtgtggtcaattctcaagaggatgcaaaagcgcagtgttacggccctcatggtgctgaatctagccctggcggatctagcggtactgctgacagctccattcttcctgcacttcctggcccagggcacctggtcctttggactggcaggatgccgtctgtgccattatgtgtgtggggtgtccatgtactag

SEQ ID NO: 228637 - DNA, 483 bp, synthetic construct
  misc_feature 1..483: note = Description of Artificial Sequence: Synthetic coding sequence
  source 1..483: mol_type = other DNA
atgtcagtgtgctatagacccccaggtaatgagacattgctgagttggaagacctcccgcgcaaccggaacagctttcctcttgttagcagcgctgctcggcttacccggtaatggcttcgtagtctggagcctggccggatggaggccagctagaggcaggcccttggctgccaccctggtgctgcatttggcgttggccgacggagccgtgttattgctaacaccgttgttcgtagcctttttaacgcgccaggcttggcccttggggcaggcaggctgtaaagccgtttattacgtttgtgccctttccatgtatgcgtccgtgctcctgacaggactgctatcgctgcagcggtgcctggccgttactcgtccctttcttgctcctcgcctgcgtagtccagccctggctcgccgactcctgctggccgtttggctggcagcactgctgctcgccgtgccagccgctgtgtacaggtag

SEQ ID NO: 228638 - DNA, 1170 bp, synthetic construct
  misc_feature 1..1170: note = Description of Artificial Sequence: Synthetic coding sequence
  source 1..1170: mol_type = other DNA
atggcaccctctcacagagcttcccaggtgggattctgtccaactcctgaaaggcccctgtggcgtttgcccccaacttgtcgcccacggcgaatgagcgtgtgctacaggccgccaggcaatgagacacttctgtcgtggaagacttcccgtgcaacaggaactgcttttctcctacttgccgctctgctcggactgccaggtaacggcttcgtggtatggagcctagcaggctggcggccagcccgaggccgtcccctcgctgccaccctcgtgctacacttagccctggctgatggcgctgttctgctgctgacacccctcttcgtggcgttcctcacccgccaagcatggccacttggccaggccggatgcaaagcggtctactacgtgtgtgccctgtccatgtacgcttctgtgctccttaccggcctcttgagcctacagcgttgtctagccgtcaccagaccgtttctcgctcctagactcagaagcccagccctcgctaggcggctcctcctggctgtctggctagcagcactgctcctggccgtgcctgctgccgtttaccgccatttatggagggaccgggtatgtcagttgtgtcatccctcacctgttcatgccgctgcccacttaagccttgagacattgaccgccttcgtacttccgttcggcctcatgctgggctgttacagcgtgactcttgccagactgcggggtgccaggtggggctcaggacgccatggtgcgagggtcgggagactcgttagcgctatagtgctggctttcgggctgctatgggcaccataccatgccgtgaatcttcttcaggcagtggctgctctggccccacccgaaggagctcttgccaaactgggtggggcaggacaagcggctagagccggaaccacggctcttgccttcttcagttcatctgtgaaccccgtgctgtacgtgttcacggctggggatctgctccccagggctggacctcgatttttaacccggctgttcgagggaagcggagaagctcggggtggtggcaggagccgagagggaactatggaactcaggaccaccccacaactgaaggtcgtcggacaagggagaggcaatggagacccaggcggaggaatggagaaagatggacccgagtgggacctgtag

SEQ ID NO: 228639 - DNA, 960 bp, synthetic construct
  misc_feature 1..960: note = Description of Artificial Sequence: Synthetic coding sequence
  source 1..960: mol_type = other DNA
atgtcagtgtgttatagaccccctgggaacgaaacactgctttcttggaagaccagtagggcgaccgggacagcctttctcctgctcgcggcactcctgggcctgccagggaatgggttcgttgtctggagtctggctggctggcgacccgcaagaggcagaccccttgcagccacactagtgttgcacctcgccctggctgacggggcagtcttgctactcacgcctctgtttgtagcatttctcacacgccaggcatggccccttggccaggccggatgtaaagctgtgtactatgtctgtgcactgagcatgtacgcttccgtcctgctaactggcctccttagcctgcagcgatgtcttgctgtgactcgacccttcctcgccccacgtcttcggtctcccgctctcgccaggaggctcctgctggcagtctggcttgctgccctgctgctcgctgtcccagcagcagtgtacaggcacctttggcgggaccgggtatgtcagctctgccatccgtcccccgtgcacgcagctgcacacctgtccctcgagaccctcaccgccttcgtcctgccattcgggttaatgttgggttgctatagcgtgactctggccagactacgaggagctaggtggggctccgggaggcacggagctcgggtagggagactagtttccgctattgtgctcgctttcggattgctttgggctccgtatcacgccgtgaatcttctccaggctgttgccgcactggctccacccgaaggtgctcttgcaaagttgggcggtgcagggcaggccgctcgggcaggcaccaccgctcttgcgtttttttcatcgtccgttaacccagtcctctatgtgttcacggccggtgatttgctcccccgtgcgggtcctcgattcttgacccggctgtttgaggggagcggtgaagcgaggggcggaggacgatag

SEQ ID NO: 228640 - DNA, 1077 bp, synthetic construct
  misc_feature 1..1077: note = Description of Artificial Sequence: Synthetic coding sequence
  source 1..1077: mol_type = other DNA
atgtccgtgtgttaccgcccaccgggaaatgaaacactcctctcttggaagacctccagagctacagggacagccttcttgctgttagctgcactccttggtctgcctgggaacggcttcgtcgtgtggagcttggccggatggagacctgctcgcggaagaccactggcggcaacgctggtactgcacctggctttggcggacggggcagtactgctgctaactcctctgttcgtagcattccttacgagacaagcttggccactcggccaggcgggttgtaaggccgtctactatgtttgcgctctctcaatgtacgcgtccgtccttttgaccggcctgctgtctctccagcggtgtctggccgtcacgcggccttttctcgcgccaagactccgaagccctgctctcgcgcgacgcctgctcctcgcggtttggctggccgcactactcctggccgtgccagctgcagtttacagacacctctggagggatagagtttgccagctgtgtcacccttctccagtccacgccgcagcccacctcagcctggagactctcaccgcttttgttctgcccttcggtctcatgctcgggtgctattcagtgacattagccaggttaagaggtgcccgttggggttccgggaggcatggggctagagtgggcagactcgtgtcagctatcgtgctggcgtttggtctgctgtgggccccatatcatgccgtgaatctgctgcaggccgtagcggcactagctccacccgaaggagccctcgccaagttgggcggagcaggtcaggccgcaagggccggaacgacggcactcgctttcttttcttcatccgtgaatcctgtgctctacgtctttaccgcaggcgacctgctgccaagggccggtccgaggttcttgactcgcctgtttgaaggatcaggcgaggcgagaggcggaggccgatccagagaaggaacaatggagctgaggaccaccccgcagttgaaggtggtgggtcaagggagggggaacggtgatccagggggtggcatggagaaagacggccctgagtgggacttgtag

SEQ ID NO: 228641 - DNA, 1077 bp, synthetic construct
  misc_feature 1..1077: note = Description of Artificial Sequence: Synthetic coding sequence
  source 1..1077: mol_type = other DNA
atgtcggtgtgctatcgccctcctggcaatgagacactgctgtcatggaagaccagtcgtgcgacgggcaccgcctttctgttactcgccgcacttctcgggctcccgggaaatggcttcgtggtctggtcccttgccggttggagaccggctagagggaggcctctagccgcaacgttagtgttgcacctggccctagccgacggggcagttctgctacttaccccactattcgtcgcgtttctgactcggcaggcttggcctctgggtcaggccggatgcaaagcagtgtattacgtgtgcgctttgagtatgtacgcctcagttctattgaccggtctgttgtcgctgcagcgatgtctcgcagtgacaaggccattcctcgccccacgcttgaggagccccgcactggctagacggcttctcctggccgtctggttagccgctctgctgcttgctgtgcccgcagccgtgtacaggcacttatggagggacagagtgtgtcagctttgccaccctagccccgtacacgcagccgcacacttgagcctcgaaactttgacagcttttgtgttgccatttgggctgatgctgggctgttattctgttacactcgccagacttaggggcgctcggtgggggagcggtcgccatggcgcacgggtgggcaggcttgtgagtgctatcgtcctcgcttttggtctcttgtgggccccataccacgcagtgaacctgctccaagccgtggcagcccttgccccaccagaaggagctctggcaaagcttgggggagccggacaggcggcaagagccggaacaactgccctggcatttttcagcagttcagttaatccagtcctgtacgtattcactgcaggagacttgttaccacgtgccggacccaggtttctaactagattgttcgaaggttcgggagaggcacgcggaggcggtcgctccagggaaggaactatggaactgaggacgacacctcagttaaaagtggtgggccagggaaggggtaacggggaccctggcggagggatggagaaagacggtcccgaatgggacctttag

SEQ ID NO: 228642 - DNA, 453 bp, synthetic construct
  misc_feature 1..453: note = Description of Artificial Sequence: Synthetic coding sequence
  source 1..453: mol_type = other DNA
atgaaagacgaagttgccttattggccgctgtaacccttttgggggttctccttcaggcctactttagcttgcaggtgatttctgccaggcgggctttcagagtgtccccccctctcacaaccggacctcccgagttcgagcgcgtgtaccgcgctcaagtgaactgttctgagtattttcccctgtttttggcgaccctgtgggtggcagggattttctttcacgagggcgcagcagccctctgtggcctggtgtacctcttcgcacgcctgcgatatttccaggggtacgcacgttctgcgcagctgaggctcgcacccctttatgcttcagccagggcgttgtggttactggtggccctcgccgcactcgggctccttgcccatttcttgcccgcagccctccgtgcagctttgcttggccgtctacggaccctgctcccttgggcgtag

SEQ ID NO: 228643 - DNA, 1161 bp, synthetic construct
  misc_feature 1..1161: note = Description of Artificial Sequence: Synthetic coding sequence
  source 1..1161: mol_type = other DNA
atggaagaactcgacgccctgctagaagagctggagcggagtactctccaggactcggatgaatattcgaacccagccccattacctttggatcagcatagcaggaaagagaccaacctggatgaaacatcagagatccttagtattcaagacaatacttctcccttacccgctcagctggtatacacaaccaacattcaggaactgaacgtatattcagaggcacaggagcccaaggagtctccacctccgtctaaaacttctgccgctgcacagctggatgagcttatggcccatctgactgagatgcaggctaaggttgccgtccgagccgatgcgggtaaaaagcacctgcccgacaagcaagaccataaggcctcgttagattccatgctcggcggactcgagcaggaactgcaagacctgggaatcgctaccgtgcccaaggggcattgcgccagctgccagaaacccatcgctggcaaagttatccacgctttggggcagagctggcatcccgagcatttcgtgtgcacacactgcaaggaggagattggctccagcccgttcttcgagagaagcgggctggcctactgccctaatgactaccatcagctgttctctccaagatgcgcttactgtgccgcacctattctggacaaggtgctaaccgccatgaatcagacctggcatccggagcacttcttttgcagccactgcggtgaggtgtttggagctgaaggatttcatgaaaaggacaagaaaccgtattgtcgcaaggattttctcgccatgttctcccctaagtgtggcggttgtaaccgccctgtgctcgaaaactacctgagcgccatggacaccgtgtggcatcctgaatgcttcgtgtgcggggactgcttcaccagcttttctaccggctcatttttcgaactcgatggtagacctttctgtgaactccactatcaccaccggagagggaccctgtgccatggctgtgggcagcccatcacaggacggtgtatttcagccatgggttacaagttccatccagaacacttcgtctgtgctttctgccttactcaactgtccaaagggatcttccgggaacagaatgacaaaacctactgtcagccttgcttcaacaagctgtttccactgtag

SEQ ID NO: 228644 - DNA, 1176 bp, synthetic construct
  misc_feature 1..1176: note = Description of Artificial Sequence: Synthetic coding sequence
  source 1..1176: mol_type = other DNA
atgtctacccttctgatcagctctagtgacgctctgttagaggagttggaacgctcaacgctccaggactcagacgagtactccaatcccgcaccactgccgttggaccagcactccagaaaagagactaacttggatgaaactagcgaaatcctatccatccaggataacactagtcctctgccagcacagctggtctatacaaccaatattcaggagctcaacgtgtactcggaagcgcaggaacccaaggagtctccgcctcccagtaagaccagtgcagccgcacagctcgacgaactgatggcacatctgacggagatgcaagccaaagtggctgtcagagcagacgccggtaagaaacatttacccgataagcaagatcataaagcgtctctggatagcatgctgggcggactcgagcaagaactccaggaccttgggatcgccacggtgccaaaaggacactgcgcttcctgtcagaagcctatcgcaggaaaggtcattcacgcactggggcagagttggcaccctgaacatttcgtatgtacgcattgcaaagaggagattggctccagtcctttttttgagagatcagggctggcctattgtccaaacgactatcaccagctgttctctcccaggtgtgcttattgcgctgcaccaatcctggacaaggtccttacggccatgaaccagacttggcacccagagcacttcttttgcagccactgtggtgaggtgtttggcgcagaaggcttccatgagaaggataagaagccatactgtcgcaaagacttccttgccatgttttcccccaaatgtggcggttgcaacaggccagttctcgaaaattacctgtccgccatggataccgtgtggcacccagaatgttttgtttgcggagattgctttaccagttttagcaccggtagctttttcgagttggacggcagacctttttgcgaactgcactaccaccataggagaggcacactgtgccacggctgtggacaaccaataaccggacgttgtatctctgcgatgggttataaatttcatcctgagcatttcgtttgcgcattctgcctgactcagctatcaaaaggtatcttcagagagcaaaacgacaagacctactgtcaaccgtgctttaacaaactctttcccttgtag

SEQ ID NO: 228645 - DNA, 1131 bp, synthetic construct
  misc_feature 1..1131: note = Description of Artificial Sequence: Synthetic coding sequence
  source 1..1131: mol_type = other DNA
atgaattacgaatttgagcgcgagatcggattcatcaattcccagccctcactggccgagtgtttgacaagctttccacccgtggccgatactttccagtcatcttctataaaaacctctacacttagccacagcacattaatccctccccctttcgaacaaactattccgagcttgaatccaggttctcacccacgccatggtgccggaggacggccaaagccaagccccgcaggttcccgaggatcgcccgtgccagctggcgcactccaaccacccgaatatccatggatgaaagagaaaaaggctgctaagaaaacagctctgctgccagcagcagccgctgctgcgacagcagctgcaacgggtccagcctgcctcagccacaaagaatccctggagattgctgacggatctgggggaggctccaggcggttacggacggcgtatacaaatacacagctgctggagctcgaaaaggagtttcattttaataaatacctgtgtaggccacggagagtggaaattgccgctctcttagacttgactgagcgacaggtcaaggtgtggttccaaaacaggcgaatgaagcataagcggcagacccagtgcaaggagaatcagaactctgaggggaagtgtaagagcttggaggactcggaaaaggttgaagaagatgaagaggagaagacattgttcgaacaggctctgagtgtatccggggcattgctggagcgggaggggtacactttccagcagaatgccctgtcgcaacaacaggcccctaatggccataacggcgattctcaaagttttcccgtgtcccctttgaccagcaatgagaagaaccttaaacactttcagcaccagtcccccactgtgccgaactgcctcagtacaatgggtcagaattgcggtgccggattgaataacgattccccagaagccctggaggtgcctagtctgcaagatttcagcgtgttttccaccgacagttgcctccagcttagcgacgcagtgtcgcccagcctgcccggatccctagactcccctgtggatatctctgccgacagcctagactttttcaccgacacactgaccacaattgatctgcaacacttaaattattag

SEQ ID NO: 228646 - DNA, 753 bp, synthetic construct
  misc_feature 1..753: note = Description of Artificial Sequence: Synthetic coding sequence
  source 1..753: mol_type = other DNA
atgacacctggtaggtgctgcctggccgctgacatacaggtggaaactttcatttttacagatggagaggatgaggccctggcccgacacaccggcaatgttgtcatcactaactgctctgctgctcactccaggcaggcactatcctgtaaaatggccgtcgagtatgaccgctttattgagtcaggcaggaaatggttctgccacgtggatgacgacaactatgttaacttaagggctctgttgcgccttttggcttcgtatccccacacaagagacgtgtacgttggcaagccaagtcttgacaggcccatccaagccatggagcgtgtctctgagaacaaagtcagacccgtccatttttggttcgctactggaggcgcaggattttgtataagtaggggcttggcactgaagatgtctccctgggcatctgggggtcatttcatgaacacagcggaacggatcaggcttccggacgattgcaccattgggtacattgtcgaggccctgctcggcgtgccactgatccgaagtggcctgttccactctcacttggagaacctgcaacaagtgcctacaagtgagctgcatgaacaagtgaccctgtcatacggaatgttcgagaacaagaggaacgcagttcacgttaaggggccattttccgtggaggcggacccatcgcgattcagatccattcactgccatttataccccgatactccatggtgtcctaggaccgcgatcttttag

SEQ ID NO: 228647 - DNA, 1086 bp, synthetic construct
  misc_feature 1..1086: note = Description of Artificial Sequence: Synthetic coding sequence
  source 1..1086: mol_type = other DNA
atgttaaaacggtgtgggagaagattgctgttagctttggcaggtgcactgcttgcctgcttgctggtgttgactgcggatccaccgcctcccccactgcccgcagagcggggacggagagcacttcgcagcctggctggccctgccggagccgctcccgctcctgggctgggagccgcagcggcagctccaggtgcgcttgtgcgcgatgtccacagcctatctgaatatttctccctgctcaccagagccagacgcgatgctggccctccccctggcgctgcacccagacctgctgatggacacccccgtccccttgccgaaccactggcaccacgagatgtattcatcgctgtaaagacaaccaagaaattccacagggccaggctggatttgctcttagagacgtggatcagtcgtcataaggaaatgacatttatctttaccgatggtgaggacgaggccctggcacgacatactgggaatgtagtaatcacaaattgctctgccgcacattcaagacaagcactgtcctgtaagatggctgtggagtatgacagatttatagagtccgggaggaagtggttttgtcacgtggatgatgacaactacgtcaaccttagagccctcctccggctgctggcatcatacccccacactcgtgacgtttacgtcgggaaaccttcccttgacaggccaatacaggccatggaacgcgtctctgagaacaaagtgaggccagtgcacttctggtttgccaccggcggagccggattctgtatctctcgcggacttgccctcaaaatgtcaccctgggcatccggagggcatttcatgaataccgccgagcgcataagactccctgatgactgcactattggatacatcgttgaggctctgctgggtgtgcctcttatccgttctggtctctttcacagtcacctggagaacctccagcaagtgccaacgagtgagttgcatgagcaggtgaccctgagctatggcatgttcgaaaacaagcgcaacgccgtgcacgttaaaggtcccttcagtgtggaggccgatcccagccggtggggcaactag

SEQ ID NO: 228648 - DNA, 753 bp, synthetic construct
  misc_feature 1..753: note = Description of Artificial Sequence: Synthetic coding sequence
  source 1..753: mol_type = other DNA
atgactcctgggagatgctgtctggcggcagacatacaggtggagaccttcatctttacggacggcgaagacgaggccctggcgcgtcacaccggcaatgtggtgattactaattgctccgctgcacacagtcgccaggctctctcttgcaaaatggcagtggaatatgatagattcatcgagagtgggcgaaaatggttctgtcatgtcgatgatgacaattacgttaacctgagggctctcttgcgattgcttgcgtcatatccccatactcgggatgtgtacgttggcaaaccctcactcgacagaccgatccaagcgatggaaagagtgagtgaaaataaggttcgccctgtgcatttttggttcgccaccggtggtgctgggttttgcatcagtaggggcctcgctctcaagatgtcgccctgggccagtggaggccatttcatgaacactgctgagcgtattcggctgccggatgactgcactatcggatatatcgtcgaagctctgcttggagtccccctgattaggtctggcctcttccactctcatctggaaaatctgcaacaagttcctacatccgaattacacgaacaggttaccctgtcatatggaatgttcgagaacaaaagaaatgcagtgcacgtcaagggccctttcagtgtggaggccgatcccagccggtttagaagtatacactgccacctttatcctgatacgccctggtgtccgcgtacagccatcttctag

SEQ ID NO: 228649 - DNA, 927 bp, synthetic construct
  misc_feature 1..927: note = Description of Artificial Sequence: Synthetic coding sequence
  source 1..927: mol_type = other DNA
atggatgagcagacgggaagactacgcctggatacatattgcatgagcgcaaaacagatttgggcatggtccaagtgctctggacgtttgtgggatgaacacatgaagtggatggaagggtggacagaccgatggactgatggatggatggacgggtggatggacgaatggtctcctaccccggctctgcggagttacggcggagggctgtcccaacagacatttatttttactgacggagaagatgaagccttggccaggcacaccggaaatgtagtgattacgaattgctctgctgcacactcccgacaggccttatcctgtaaaatggcggtggagtatgatagattcattgaaagtggccgtaagtggttttgtcacgtagacgacgataactacgtcaacctcagagctctactgcggctgttagcttcctaccctcacacccgagacgtatatgtggggaaaccttcgctggacaggcctatccaggccatggaaagagtgtctgaaaataaagtccggcctgtccacttttggttcgccaccggcggagccggattctgtatttcccggggtctggctctgaaaatgtctccgtgggctagcggcggacactttatgaacactgcagagcggattaggctgcctgacgactgtacaatcggctatatcgtggaggcactgctcggggtgcctctcattcgcagcgggttgtttcactcccacttagaaaacctgcagcaagtccctacaagcgaacttcatgaacaggtgacgttgagctatggcatgtttgaaaacaagagaaatgcagttcatgtgaaggggcctttcagcgtggaagccgacccctccaggtttcggtccatccactgccatctgtatccagataccccttggtgtcctcggacagccattttctag

SEQ ID NO: 228650 - DNA, 1302 bp, synthetic construct
  misc_feature 1..1302: note = Description of Artificial Sequence: Synthetic coding sequence
  source 1..1302: mol_type = other DNA
atgcaacggatgatacagcagtttgcagccgagtatacttccaaaaacagtagcacgcaggatcccagtcagccgaatagcaccaagaatcagtctctgccgaaagcctcccctgttactacatccccaactgccgcaacaactcaaaacccagtgttgagcaagctgctcatggcagatcaggattcacccttggatctcactgtgcggaaatctcagagcgagcctagcgaacaggacggcgttttggacctatcaaccaaaaaatccccatgtgctggctcaacgagtctgagccactctcccggatgttcgagcacccaagggaacgggagacctggacggccaagccagtacagaccagacggcctgagaagtggagacggggtcccaccaaggagtctgcaggatggaaccagagagggcttcggccactcaacctccctgaaggtgccactggctcggagcctccagattagcgaggaattgcttagcaggaaccagctctctactgctgcctccttaggaccatccgggttgcagaatcacgggcagcatctgattctttctagggaagctagttgggcaaagcctcactatgagtttaatctctctaggatgaaatttagaggcaacggtgcgcttagcaacatttcagatttacctttcctggcagagaacagtgcctttcccaagatggctcttcaagccaagcaggacggtaagaaagatgtaagccacagctctccagtagacctcaagatcccccaggtgaggggtatggatctctcgtgggaatcacggactggggaccagtattcatattcaagcctagttatgggctcacagactgagtctgccttatccaagaagctacgagcaatcttgccgaagcaatcacgcaagagcatgctcgatgctggtcctgatagctggggttccgacgcagaacagtccacctccggacagccatatcccacatccgatcaggagggggacccgggatctaagcagcccaggaagaagcggggtaggtatagacaatacaactccgagatactagaagaggccatttccgtggtcatgtcaggaaagatgtccgtgtctaaagctcaatctatttatggcatcccacactctactctggaatataaggtgaaagaacgccttggcactctgaaaaatccacctaagaaaaaaatgaaacttatgcgctcggaaggccctgatgtcagcgtcaaaatagagcttgaccctcagggagaggcagcccagtctgccaatgaatccaagaatgagtag

SEQ ID NO: 228651 - DNA, 1302 bp, synthetic construct
  misc_feature 1..1302: note = Description of Artificial Sequence: Synthetic coding sequence
  source 1..1302: mol_type = other DNA
atgcagaggatgatccagcaatttgcagcggagtacacgagcaaaaattcttcaacccaggatccatctcagccaaactcgactaaaaatcagtcactgccaaaggccagcccagtgaccacctcccccacagccgcaacgactcagaacccagtgttgagtaaactgttgatggctgatcaggattcacctcttgatcttacggtaaggaaatctcagtctgagccttcagagcaagacggcgtgcttgatctctctaccaaaaagtcgccatgtgcaggcagtacaagtctgtcgcactcccctggctgttcaagtacacaaggcaacggcagaccgggaaggccttcccagtatcgccctgatggactcagaagcggtgatggtgttccacctagatcgctgcaggacggcacccgtgagggctttggccacagcacatctcttaaggtcccccttgcacgcagcttgcaaatcagcgaggaacttctttcgaggaatcagctgtctacagccgctagtctcggcccttctggcctgcagaatcacggccagcatctcattctttccagagaggcatcctgggcaaaaccacactatgagtttaacttatctaggatgaagttccgcggtaacggtgccctaagcaacatcagcgatctgccttttctagcagaaaattccgcttttcccaagatggctttgcaagccaagcaggacggaaaaaaggacgtgagtcactcttcgccagtggacctgaagatccctcaggtaagaggaatggatttaagctgggagtcccgcactggcgaccagtactcttactcctctctggtgatgggctcacaaactgaaagtgctttgtcgaaaaagctcagggcaattctcccgaaacaatcccgcaaatccatgctcgacgccggacctgattcctgggggtcggatgctgagcaatctacgtctggacagccttatccgacttctgatcaggaaggggacccaggttccaagcagccccgaaaaaagaggggaaggtaccgtcaatacaactcagagattctggaggaggctatttcagtcgtgatgtccggaaaaatgtctgtctccaaggctcaatcaatttacggaataccccactcaacactggagtataaagtcaaagaacgactcggaacactgaagaaccccccaaagaagaaaatgaagttaatgcggagcgagggcccagacgtgtctgtgaagattgaattggatccgcagggggaagcagcacagagcgctaatgagtccaaaaacgagtag

SEQ ID NO: 228652 - DNA, 1302 bp, synthetic construct
  misc_feature 1..1302: note = Description of Artificial Sequence: Synthetic coding sequence
  source 1..1302: mol_type = other DNA
atgcaacggatgatacagcagtttgccgctgagtacaccagcaaaaatagcagcacccaagatccttcacagcctaactcaactaagaatcagtccctgccaaaagcttcccccgtgacaacctcccccactgctgcaaccacgcagaatcccgttctttccaaattgctgatggccgaccaggactcaccgcttgacctgaccgtgcgaaaatcacagagcgagccctcagaacaggatggagtgctagacttatcaaccaagaagagcccgtgcgcagggtctacgtccctgtctcatagtcctggatgcagtagcacgcaaggcaacgggaggccagggaggccgagccaatacaggcccgatggacttcgcagcggggacggggtcccacctcgaagtctgcaggacgggacaagggagggtttcgggcacagcactagcttgaaagtacctcttgctcgctccctgcagatttccgaggaacttttaagtcgaaatcaacttagcaccgctgcaagcctcggacccagcggcctgcagaatcacgggcagcacctgatactcagtagagaggcctcctgggccaaacctcattacgaattcaatctgtcccgcatgaagtttcgcggaaacggtgcactgtctaacatctctgacttgccgtttctggccgagaattccgccttccccaagatggccctgcaggccaaacaggacggcaaaaaagatgtatctcattcgagcccagtcgatctaaagataccgcaggtgcgcggtatggacctgtcatgggaaagtagaacaggggatcagtatagttatagtagcctggtcatgggatcgcaaacagaatcagcgctgtcaaagaaactccgagcgatcttgccgaagcaatcgcgcaagtcaatgctggatgccggaccagatagctggggatctgacgccgaacagtcaacaagcggtcagccttatccaaccagcgaccaggaaggcgatcctggctccaagcagccacgcaagaagcgtggacgctatagacagtacaactccgagattttagaggaggccatctcagtggtcatgagcggcaaaatgagcgtatcgaaggctcaaagcatttatggcattccccattcgaccctggagtacaaggtcaaggaaagactggggacgctgaagaatcctcccaagaaaaaaatgaagctgatgcgctccgagggccctgacgtctctgtaaaaattgagctggatccccaaggggaagctgcccagtcagctaacgaatctaagaacgagtag

SEQ ID NO: 228653 - DNA, 1221 bp, synthetic construct
  misc_feature 1..1221: note = Description of Artificial Sequence: Synthetic coding sequence
  source 1..1221: mol_type = other DNA
atgcagcgcatgatccaacaatttgccgctgagtacacctcgaagaactcctccactcaggatccttcacagccgaatagtaccaagaatcaaagcctgccaaaggcctcccccgtgacgacgagtcctactgccgctactactcaaaatcctgtgttaagtaaattattgatggctgatcaagacagtccactagacttaaccgttcgcaaatcacagtccgaaccttcagagcaggacggcgtgctggacctgtccacaaagaagtccccttgtgccggatctacaagtctgtcccattctcctgggtgttcatccacacagggaaacgggcgaccaggtagaccatcacagtaccgtccggatggtctgagaagcggggatggggttcctccgaggagcttacaggatggcaccagggaggggtttggacacagtaccagtctgaaagttcctctggctcgatcactccagatctctgaggagctgttgtcaagaaatcagctgtcaaccgcagcaagcctgggaccctccgggctgcagaaccatggacagcacctcattttgtcccgggaggcgtcatgggctaagcctcactacgagttcaacctctctcggatgaagttcaggggcaatggagccttaagtaacattagcgacctgccttttctcgccgagaactctgccttccccaagatggccttgcaagcaaagcaggacggcaaaaaggatgtgagtcactctagccccgtggatctaaaaattccccaggtgaggggtatggacctgtcgtgggaatctaggaccggtgaccaatacagctattcatccctggtcatgggaagtcagacagagtcagcgctctcaaaaaaactcagagccattctaccgaaacaatcaagaaaaagcatgctagatgccggtcccgacagctggggaagcgacgcagagcaatccacatcaggtcagccgtatcccacgtcagatcaggagggcgaccctgggtccaagcagccaaggaaaaagcggggacgctaccgccagtataattctgaaattctggaggaagctattagcgttgttatgtccggcaaaatgagcgtgtctaaagctcaatcaatctacgggattcctcattctacgctggagtataaggtcaaagaacgcctgggcactctgaagaatcctcccaaaaagaagatgaagctgatgtcaggatag

SEQ ID NO: 228654 - DNA, 957 bp, synthetic construct
  misc_feature 1..957: note = Description of Artificial Sequence: Synthetic coding sequence
  source 1..957: mol_type = other DNA
atggataaaggaagggaaaggatggcagccgcagctgcagccgcagcagccgcagctgccgctgctcagtgccgctcccctagatgtgcggcagagcggagaggctttcgacgcgaacttgacagttggagacaccgactgatgcactgcgtcggctttgaaagcattctcgagggcctttacggaccacggctgcggagagacctgtcgcttttcgaggattgtgagccggaggaactaaccgattggagcatggatgagaagtgcagtttttgcaacttacaacgagaagctgtgagcgactgcattccctccttagactcgagccagagcacacccacagaggagctcagttcacaggggcagagcaatactgacaaaatagagtgccaggcagagaactatctgaatgccctatttcggaaaaaagacctaccgcagaattgtgatccaaatattccactcgtcgcccaagagcttatgaaaaagatgatacgccaattcgccatagaatacatctcaaaatcaggcaagactcaggaaaacagaaatggctccattgggccttccattgtctgtaaatcgatccagatgaatcaagctgagaattcactccaggaggagcaggaaggacctttggacttaacagtgaaccggatgcaggagcaaaacacccagcaaggcgatggagtgctcgacctaagcactaagaaaacatcaatcaagtccgaggagagctccatctgcgaccccagttccgaaaattctgtggcaggcatgctgcaggtgaagacagacgagaaactgaacgtgtccgacgagaacactgcgagttgcccgctatctcccatcaaaatgtgcctgaataggccgattgaatggaatttgaatctgacaaccgccagtttaacgagttgcactgtgcacaaccagaacctcaagtcggaggagaagtag

SEQ ID NO: 228655 - DNA, 1557 bp, synthetic construct
  misc_feature 1..1557: note = Description of Artificial Sequence: Synthetic coding sequence
  source 1..1557: mol_type = other DNA
atggacgagaagtgctcattctgcaacctccagagagaggccgtgtccgactgtatcccatccctggattctagccagtccactccaacagaggagttgtcgtcacagggccagtccaacacagacaagattgagtgccaagcggagaattatttgaacgccttattccgaaagaaagacctgccgcagaattgcgaccccaacatccccctcgtcgcacaggagctgatgaagaagatgattaggcagtttgctatcgaatacatatctaagagtggaaagacccaagagaaccgcaatggttctattggcccatccatcgtttgtaagtcaatccagatgaatcaggccgaaaatagcttgcaggaagagcaggaagggccacttgatctcaccgtgaaccgaatgcaagagcaaaacactcagcaaggggatggtgtgttggacttgagcacaaaaaagacaagcataaaaagcgaggagtcctctatatgcgatcctagcagtgaaaattccgtagctggtcggttacacagaaaccgagaggattatgtggaacgttctgccgaatttgccgacggcctcttgtccaaagctctgaaagatattcagtccggcgctcttgatatcaataaagccggaatcctgtacgggatcccccagaagaccctactgctccacctcgaagcgctgccagccggtaagcctgcatctttcaagaataagacccgcgacttccacgactcttactcatataaggatagtaaggagacttgcgctgtcctgcagaaggtcgccctctgggcaagggcgcaggcggaaaggaccgaaaagtctaagttgaacttactcgagactagtgagattaaatttcccacggcaagcacatacctccaccagctgaccctgcagaagatggtgacccagttcaaagagaagaatgagtccctccagtatgagacttctaatccaaccgtgcaacttaaaattccccagcttagggtctcctccgtttccaagagccaacctgacggaagtggcttgctcgatgtgatgtatcaggtgtcgaagacctcgagcgtgctggaggggagcgcgctccagaagctcaagaatattctacccaaacagaataaaatcgagtgttccggtcctgtcactcattcttcagtggatagctatttcctgcacggagacctgtccccactgtgtctgaacagtaaaaacggtactgtcgacggaacctcagaaaacacagaggatggacttgacaggaaagatagcaagcagccccgtaaaaagcgaggacggtacaggcaatatgatcatgaaatcatggaagaggccattgccatggttatgtcaggtaaaatgtcggtgtccaaggcccaggggatttacggcgtgccccattcaactctagaatacaaggtgaaagagaggtccgggacactgaagacaccgcctaagaagaaactacggctacccgacactgggctctataatatgaccgacagcggaacaggctcttgcaagaatagctcaaagcctgtgtag

SEQ ID NO: 228656 - DNA, 1809 bp, synthetic construct
  misc_feature 1..1809: note = Description of Artificial Sequence: Synthetic coding sequence
  source 1..1809: mol_type = other DNA
atggacaaggggagagaacggatggcagccgctgcagcagctgccgctgccgcagcagcagctgcccagtgccggagtccgcgatgtgccgctgagagacgaggatttagacgagagttggattcatggcgccaccggttaatgcattgcgtgggctttgagagcatcctcgagggcctgtatggccctcgtctgcggagggatctaagcctgttcgaagactgcgagccggaggagctgacggactggagcatggacgagaaatgtagcttctgtaacctgcagcgggaggctgtgtcggactgcatacccagtctggactcctcgcagagtacacccaccgaagagctgtcttcccaaggccagtccaataccgataaaattgaatgtcaagcagagaactacctgaacgccctgttccggaaaaaggacctaccccaaaactgcgatccaaatatacccttggtagcacaggaactgatgaaaaaaatgatccggcagttcgccattgagtacatttcaaaaagcggtaaaacacaagagaatcgaaatggttcgatcgggccttccattgtgtgcaagtccatccagatgaaccaggcagagaactctctacaggaggagcaggagggacctctggacctaacagttaaccgcatgcaggagcaaaatactcagcagggcgacggagtgctagatctctcgactaagaaaaccagtatcaagagcgaggaatctagcatttgtgatccctcttcagagaacagcgtggccggtagactgcatcggaacagagaggactacgtggagagatctgcagaattcgcagacggcctcctaagcaaagctctgaaggatatccaatctggagccctggacataaataaggcaggcattctttacggaatcccacagaagaccctactattgcacttggaagccctccccgctggaaagcccgcttccttcaaaaataaaacccgcgactttcacgattcttacagttataaggactcaaaagagacctgcgcggtgctacaaaaggtggccctgtgggcacgggcacaggcagaaaggacagagaagtccaaattgaatctcctcgaaacttctgagatcaagtttcctaccgctagcacatacctccaccagctaactttacagaaaatggtaactcaattcaaagagaagaacgagagccttcaatacgaaacctccaacccaaccgttcagcttaagattccccagctgcgtgtatcatctgtctcaaagagccaacccgacggctcagggttgctggacgtcatgtatcaggtctccaaaacaagctccgtcttggagggctctgccctccagaagcttaagaacatccttcccaaacagaataagatcgaatgttctggacccgtgacccacagtagcgttgacagctattttctccatggtgatctcagtcctctgtgcttgaatagcaaaaatggaaccgtcgatgggacctcagaaaacacagaggacggacttgatcggaaggattccaagcagcctaggaagaagcggggacggtatcgccagtacgatcacgaaatcatggaagaagctatcgccatggtgatgagtggtaagatgtccgtctcaaaggcacaggggatttacggcgttcctcactccactctggagtataaggtcaaggaacgctcaggtactctcaaaaccccacctaagaaaaagctgcggttgcccgatactggcctgtataacatgaccgactcaggcaccggcagctgtaagaattccagcaaaccagtgtag

SEQ ID NO: 228657 - DNA, 435 bp, synthetic construct
  misc_feature 1..435: note = Description of Artificial Sequence: Synthetic coding sequence
  source 1..435: mol_type = other DNA
atggaccacggctacgaagagacatccgtttacttaaaggactgtataccatcccttgactcctcccagagcacgccaacagaagagctttcctctcagggccagtccaacaccgacaagatagaatgtcaggctgagaattacctgaacgccctgtttaggaaaaaggacctccctcaaaattgcgacccaaatattcctctcgtagctcaagagctgatgaagaaaatgatccgacagtttgccattgaatacatcagtaagagcggcaagactcaggaaaaccgcaatggatctatcggcccttcaatagtctgtaagtccatccaaatgaaccaggccgagaatagcctgcaagaagaacaggagggccctcttgacctgacagtaaaccgcatgcaggagcagaatacacaacaagcctgctacaaatag

SEQ ID NO: 228658 - DNA, 2187 bp, synthetic construct
  misc_feature 1..2187: note = Description of Artificial Sequence: Synthetic coding sequence
  source 1..2187: mol_type = other DNA
atgaaccagccagaaagcgccaatgaccctgagcctctgtgtgcggtctgtggacaagcacacagcctggaggagaatcacttttatagctatcccgaggaggtggatgatgatctgatctgtcacatctgcttgcaagcattactcgacccactcgacactccgtgtggtcatacatactgcacactgtgcttaacaaatttcctggtggagaaggatttttgtccgatggaccgcaaaccattggtcctgcagcattgtaagaagtcttctattctcgtcaataaactgctaaacaagttgctcgtcacttgtcctttcagagagcactgcacccaggtactccagcgctgcgacctggagcatcattttcagacatcctgtaaaggagcctctcattatggccttacaaaagatagaaagcggcgatcgcaggacgggtgtccagacggctgtgccagcttgaccgccaccgctccttcacctgaggtgagtgcagctgccacaatctcacttatgaccgacgaaccaggcctcgataaccctgcttatgtaagttccgcagaagacggccagccggctatctctccggtggacagcggaagatccaaccgaacccgcgctcggccatttgaaagatccaccatccgctcccgtagcttcaagaagataaaccgggctctatctgttcttagacgcacgaagtccggcagcgcggtcgccaatcacgccgaccagggcagagaaaatagcgaaaacaccactgccccagaagttttccccaggctgtatcacctcattcccgatggcgagattacttcaataaagatcaaccgcgtggaccctagtgagagtctctccatccgactggtgggcggatccgagacaccccttgttcacataattattcaacacatataccgcgacggggtgattgctcgcgacggaagacttcttcccggagacatcatccttaaagtgaacggaatggatatctccaacgtacctcataactatgctgtgcgactgctgcgccagccttgccaagtgctctggttaacggtgatgcgagaacagaaatttagatcaagaaacaatggccaagctcctgacgcctacaggccaagggacgacagcttccacgttatcctgaacaagtcctcccctgaagaacagctcggaattaaattggtgagaaaggtggacgagcccggtgtctttatttttaatgtcctcgacggaggggttgcctataggcatggtcagctagaggaaaatgaccgcgttctggccatcaatggacacgacttgcgatacggcagtcccgagagtgcggcacacctgattcaggcctccgaacgcagagtgcatctggttgtaagcaggcaggtgcgccagcggtccccagatatcttccaggaggcagggtggaactcaaatggctcttggagtccagggccaggggaaaggtccaataccccaaaacctctccatcctaccattacttgtcacgagaaagttgttaatatccaaaaggatccgggtgaatcccttggcatgactgtggccggtggggcttcgcacagagaatgggaccttcccatctacgttatctctgtcgaacccggtggggtaatttctcgcgacgggaggatcaagaccggggacattctgttgaacgtggacggagtcgaattaactgaggtttcaaggagtgaggctgttgcacttctgaagcgtacttcctccagcatcgtgctcaaagcgctcgaggtgaaggagtacgagccccaggaggactgtagttcaccagctgcccttgactctaatcacaacatggcacccccatcagactggtctccctcctgggtgatgtggttagagctgccccgatgcctgtataactgcaaggatatagttctgcgcaggaatacggcaggcagtttgggattctgcatagtgggtggatacgaggagtacaatgggaacaaacctttctttataaaatctattgtcgagggtactcctgcatacaatgatggtagaatccgctgcggagacatactcctcgccgttaatgggcgaagcacatcaggcatgatccatgcatgcttggccaggcttttaaaagaattaaaaggccgtattacactgaccattgtgagctggccaggaacttttctgtag

SEQ ID NO: 228659 - DNA, 1899 bp, synthetic construct
  misc_feature 1..1899: note = Description of Artificial Sequence: Synthetic coding sequence
  source 1..1899: mol_type = other DNA
atgaaagccctcctgttacttgtcttaccttggcttagcccagcaaattatattgacaacgtggggaatctgcattttctttacagtgagctatgcaagggggcaagccactatggactaacaaaagacaggaaaagacgcagtcaagatggttgcccagacggttgtgccagcctgaccgcgactgctccttcgcccgaagtgagtgcagcagccacaatctctctcatgaccgacgagccaggcctggataatccggcttacgttagtagtgcagaggatggccagccagctatttctcccgttgattccggacggagcaaccggacacgggctagaccctttgaaaggtcgactatcagaagcaggtcatttaagaagatcaatagagccctgagtgtactcagaagaacaaaatccggctccgccgtggcaaaccacgctgaccagggacgggaaaacagtgagaacaccacagctccagaagtattcccccgactgtaccacctgatcccggacggggaaattacttcaatcaagatcaaccgcgttgacccttccgagtctctgtccattcgcttagtgggcggatccgaaacacctctggtccacatcatcatccagcatatctaccgcgacggagtcatagccagggacggccgacttctgcctggagatattattctaaaggtcaatggaatggacatctctaacgtgcctcacaactacgcagttagactgctgcggcagccatgccaagtgctttggcttacagttatgagagagcagaaattccggtccaggaataatggccaagccccagatgcctatagacctcgggacgacagcttccacgtgatcctcaacaagtcgagccccgaagagcagctgggaatcaagctcgtccgaaaggtcgacgagcctggcgttttcatatttaatgttctcgacgggggagtcgcatacaggcatggccaattggaggagaacgaccgggtgttggccatcaatggccacgatcttagatacggctcaccagagagtgccgcacatttgattcaagcttccgaacggcgtgttcacctggtggtctccagacaagtgagacagcgatcacccgacatctttcaagaggccggatggaacagtaatggcagctggtctcccggtcctggtgagcggtcaaataccccaaagcctctgcaccccaccattacctgccacgaaaaggttgtgaacatccagaaagatcccggagagtcccttggcatgactgtcgccggtggcgcttcacatcgcgaatgggacctgcccatctacgtcatttccgtcgaaccgggaggtgtaatctctagagacgggcgaattaaaactggcgacatcttgcttaacgttgacggcgtggagttaacagaagtgagtaggtccgaggcggttgccttgcttaaacggactagttcatccatcgtgctaaaggctctggaggtcaaggagtatgaaccacaggaggattgttccagtccggcagcccttgactccaaccacaatatggcccctccaagcgattggtcccctagctgggtaatgtggctcgaacttcccaggtgcctgtataactgtaaagacattgtgctaagaaggaacactgcgggtagcctcggattctgtattgtggggggatacgaggagtataacggcaacaaaccctttttcattaagtctattgtcgaaggcacccccgcatacaatgatgggagaatacggtgtggagatattctgctcgcagtgaacggccgaagcacatccggtatgatccacgcctgtctggcaagactgctaaaagagctgaagggacgaataaccctgaccatagtctcatggccagggacattcctgtag

SEQ ID NO: 228660 - DNA, 21 bp, synthetic construct
  misc_feature 1..21: note = Description of Artificial Sequence: Synthetic coding sequence
  source 1..21: mol_type = other DNA
atgaatcagcctgaatcttag

SEQ ID NO: 228661 - DNA, 51 bp, synthetic construct
  misc_feature 1..51: note = Description of Artificial Sequence: Synthetic coding sequence
  source 1..51: mol_type = other DNA
atgaaccagccagaatctgccaacgaccctgagcccctgtgcgctgtgtag

SEQ ID NO: 228662 - DNA, 300 bp, synthetic construct
  misc_feature 1..300: note = Description of Artificial Sequence: Synthetic coding sequence
  source 1..300: mol_type = other DNA
atgaatcagcccgagtccgcaaacgatcccgaacctctgtgtgctgtgtgtggccaggcacatagtctcgaggagaaccacttttattcctatcctgaggaggtggatgacgaccttatttgtcatatttgcctacaagccctccttgaccccttagacactccatgtggtcacacctactgcacattatgcctgactaattttctggtggagaaggatttttgccccatggaccgcaaaccgttggttctgcagcattgtaaaaaatcgtcgatcctcgtaaataaactgttgaactag

SEQ ID NO: 228663 - DNA, 273 bp, synthetic construct
  misc_feature 1..273: note = Description of Artificial Sequence: Synthetic coding sequence
  source 1..273: mol_type = other DNA
atgaaccaacctgagtccgccaacgatccggagcctttgtgcgccgtttgcggacaggcccatagtctggaggagaatcatttctactcatacccagaagaggtggacgatgacctcatttgtcacatctgtctgcaggctctgctcgatccactggatacaccttgcgggcacacatactgtaccttatgcttaacaaatttcctggtggaaaaggatttttgcccgatggatcggaaacccctggtgctgcagcactgcaagaagtcttag

SEQ ID NO: 228664 - DNA, 381 bp, synthetic construct
  misc_feature 1..381: note = Description of Artificial Sequence: Synthetic coding sequence
  source 1..381: mol_type = other DNA
atgaaccaacccgagagcgcaaacgatccggagccgctttgcgccgtttgtggccaggcccactcccttgaggagaatcatttctattcttacccagaggaggtggacgatgacctgatttgccacatttgtcttcaggccctgttggatccactagatactccttgtgggcacacttactgcactctatgccttacaaatttcctggtagagaaagatttctgccccatggacagaaagccactggtgctgcaacattgtaagaaatcatccatacttgtgaacaaactcctgaataagctgctggtcacatgccccttcagggaacactgtacacaagtgctgcagcggtgcgacctggagcatcactttcagacctag

SEQ ID NO: 228665 - DNA, 1701 bp, synthetic construct
  misc_feature 1..1701: note = Description of Artificial Sequence: Synthetic coding sequence
  source 1..1701: mol_type = other DNA
atggccgtccagactgccgtgagagccagccagccccgactgccaccactggacaacccagcctacgtctctagcgcggaggatggccaacccgctatctcaccagtggactctggcaggtccaacagaacaagggctaggcccttcgagcgctcaactatccgatcgaggtcttttaagaaaatcaacagagcactgagtgttctgcggcgtacaaagagtgggtccgcggtggctaaccatgctgatcagggaagagaaaatagcgagaatacaactgcgccagaagtgttcccgaggctctaccatcttattccggatggcgaaatcacatcaattaaaatcaaccgcgtggatccgtcagagagcttatcaattcgcctagtcggcggaagtgaaacgcctctcgtccatatcattatccagcacatctacagggatggcgtgatcgccagagacggccgacttctcccaggggacattatactgaaggtgaacggcatggacatctccaacgtcccgcataattacgccgtacgtctcctaaggcaaccttgccaggtcctctggcttacagttatgcgcgaacagaagttcaggtccaggaacaacgggcaggcacctgacgcctatcggcctcgggatgatagtttccacgtcattctgaataagagtagccccgaggagcagctgggcattaagctggtacgaaaggttgacgagcctggggtgttcattttcaatgtgctggacggcggtgttgcctacagacatggtcaactggaggagaacgacagggtgctcgccattaatggacacgatctaagatacggcagccccgagtctgcagcccatttgatccaagcaagcgagcgtcgggttcatctggtcgtgagcaggcaggtccgtcagaggtctccggatatcttccaggaggccggttggaatagtaacggatcttggtctcccggaccaggagagagatcaaatacgcctaagcctctgcaccccacaattacctgccacgaaaaagtggtgaacattcagaaggaccccggtgagtctctgggcatgaccgtggccggtggggctagccacagagaatgggatttaccaatatacgtgataagtgttgaaccagggggtgtcatatcacgcgatggaagaataaagactggtgacatcttgcttaatgtcgacggagtcgaactgactgaagtgtcacgaagcgaggctgtcgcacttctaaagcgcactagcagctcgatcgttttgaaggcccttgaagtgaaggaatacgaacctcaggaggattgttcaagccccgcagccctcgactctaatcataacatggcccctccatccgattggtctccttcttgggtgatgtggctggaattaccccgatgcttgtataattgtaaggacattgttctgaggcgcaacactgcaggtagcttgggattctgcatcgtggggggttacgaagagtataacggtaataagcctttcttcatcaaatcaatcgtggagggcacgcccgcttacaatgacggcagaattcgctgcggagatattctgctggccgtcaacggccgatctacctccggtatgatccacgcctgcttagccaggcttctgaaggagttaaaaggcaggattacactgaccattgtatcctggcctgggacttttttgtag

SEQ ID NO: 228666 - DNA, 2073 bp, synthetic construct
  misc_feature 1..2073: note = Description of Artificial Sequence: Synthetic coding sequence
  source 1..2073: mol_type = other DNA
atgggaacaacatcagatgagatggtgtccgtcgagcagacgtctagcagttccctaaaccccctctgttttgagtgcgggcagcaacattggactcgggagaatcatctgtacaactatcagaacgaagtggatgatgatctcgtgtgtcacatctgtctgcaaccactgttgcagcctctggacaccccctgtggccacaccttctgttataaatgtcttcggaacttcttacaagagaaggacttctgccctctagataggaaacgcctgcacttcaagctgtgcaagaaatcctccatcctcgtgcacaagctcctggataagctgctggtcctgtgtccattctcttccgtgtgcaaagatgtcatgcagagatgcgatctggaggcccacttaaagaaccggtgtcctggtgcgtctcacagacgtgttgcattagagcgcaggaaaacctccagaacacaggcagagatagaaaatgagaacgggccaaccctgcttgacccagcagggacactgagccctgaggcagactgtctgggtactggggcagtgcccgtggaacggcaccttaccagcgccagtttgtctacctggagtgaggagccgggactcgacaatccagcattcgaagagtcagccggagccgataccacacagcagcccctgagtctgccagagggagaaataaccacaatcgagatccatagatctaacccctatattcagttaggcatttctatagttggcggaaatgaaactcccctgatcaatatcgttatccaagaggtctaccgcgatggcgtgatcgctcgggatggcagacttctggctggggaccagatcctgcaggttaataattataacatctctaatgtgtcccataactatgcacgagctgtgttatctcagccatgcaatacactgcacctgaccgtgttaagggagcgcagatttgggaatagggctcataatcactcagacagtaattctccccgtgaggaaatcttccaggtggcactgcacaagagggattctggagagcagctggggatcaagcttgtccggaggacagatgaaccaggagtgtttattctggaccttctcgaggggggactcgccgctcaagacgggagactgtctagtaacgaccgagtgctggcaattaatggtcatgaccttaagtatggcacccctgaactcgccgcacagatcatacaggcttccggtgaacgagtgaatctgactatagccagacccggaaagccacaaccaggcaatactatacgcgaagctggaaatcattcctcttctagccagcatcataccccaccaccctactacagtcgcccttctagccacaaggacttgacgcagtgtgtgacctgtcaagaaaagcacattaccgttaaaaaggaaccccacgaaagtctgggcatgaccgtagcgggtgggaggggttctaaaagcggtgagctgcctatatttgtgacgtctgtacctcctcacggctgtcttgcccgtgatgggcgtatcaagcggggagatgtgctgctgaatatcaatgggattgatctgaccaatctttctcactccgaagcggtggctatgttgaaggcatctgctgcttctccagccgtggcattaaaggccctggaagtgcaaattgtagaggaggccacgcagaatgccgaagagcagccatcgacgtttagcgagaacgagtacgacgcttcatggagtccatcgtgggttatgtggctgggtttgccgtccacattacattcctgccacgacatcgtgctaaggcggagttatctgggtagctggggattttctattgtcggcggatatgaggaaaatcacactaatcagccattcttcattaagacaattgtgctgggaacccctgcatactatgacggcaggttgaaatgcggcgatatgatcgttgcagtgaacgggctgagcaccgtgggtatgagccacagcgccttggttccgatgctcaaggaacaaagaaataaggtcaccttgactgtaatctgctggccagggtcgctcgtctag

SEQ ID NO: 228667 - DNA, 2115 bp, synthetic construct
  misc_feature 1..2115: note = Description of Artificial Sequence: Synthetic coding sequence
  source 1..2115: mol_type = other DNA
atgttggggatctgtcgaggcagaagaaaattcttggccgctagcctgtccctcctttgcattcccgcaatcacgtggatctacctgtttagcggctccttcgaggatggcaagcctgtgtctctgtcgccacttgaatctcaagcccacagcccaagatatactgcaagtagccagcgcgagcgcgaatcccttgaggtgagaatgagagaagtggaagaggagaatagggccctaaggagacagcttagtctggcccagggacgggctccgtctcaccggagggggaaccactcgaaaacatattctatggaggagggaaccggcgatagtgagaacctgagagcaggcattgtcgcaggcaatagctctgaatgtggccagcagcctgtggtggaaaaatgcgaaacaatccacgtcgcaatcgtatgcgccggatataacgctagccgggatgtcgtcactctggttaagtcagtgttgtttcaccggcgtaacccactccacttccacctaatcgccgactctattgccgaacaaatcctcgcaactctttttcagacctggatggtacctgctgtcagggttgacttttacaatgccgatgaattgaaatctgaagtgagctggattccaaacaaacactacagtggtatctacggattaatgaaactagttctgacgaagacacttccggctaacctcgagcgcgtgattgttctcgacacagatatcactttcgctactgacatcgcagagctgtgggctgtcttccacaagtttaaaggccaacaggtcctgggcctcgtcgaaaaccagtccgactggtatctggggaatctgtggaagaaccacagaccatggccagcactgggtagggggtacaacacaggcgtcatactattattgctcgacaagctcaggaaaatgaagtgggaacaaatgtggaggcttacagccgagagagagctgatggggatgctgtccacctccctcgcggaccaagacatcttcaatgccgtgattaagcagaatcctttcctcgtctaccagctgccctgcttctggaacgttcagttgagcgatcacacgcgctcagaacagtgctaccgcgatgtttctgatctgaagctgcaaaagcaactaagcgaactggatgaggacgacctctgctatgagtttcggagggagcgattcaccgttcaccggacccacctgtacttcctccactatgaatacgagcctgcagctgactccacagacgtgaccctggtggcccaattaagtatggaccgattgcagatgcttgaagcaatctgcaagcactgggaaggtcccatctccttggccttgtacctgtcagacgccgaagcgcaacagttcttgcgttacgcccagggttccgaggtgctgatgagtagacacaacgtaggttatcatattgtctacaaagagggtcagttctaccctgtgaacctcctgcggaatgtagctatgaagcatatctccaccccttatatgtttttgagcgatatcgatttcctgcccatgtatgggctgtacgagtatctcagaaagtcagtgattcagctggacctcgccaatactaagaaggctatgattgttcctgcgttcgagaccctgcggtatcggttgtcgttccccaaaagcaaagccgagctgctgagtatgttggatatgggcacactgtttacgtttcgataccatgtgtggaccaaggggcacgcaccaacaaatttcgccaagtggcgcactgccaccaccccataccgcgtggagtgggaggcagatttcgaaccatatgtggtggtgaggcgcgattgtccagagtacgatcgccgttttgtgggtttcggttggaataaggttgcccacatcatggagttggatgtccaagagtacgagttcattgtactccctaacgcatatatgatccacatgccgcacgctcccagcttcgacatcactaagtttcggagcaataaacaatatagaatctgcctgaaaacacttaaagaagaattccagcaggatatgtcccgacgatatggatttgcagcactcaagtaccttacggcagaaaacaactcgtag

SEQ ID NO: 228668 - DNA, 2271 bp, synthetic construct
  misc_feature 1..2271: note = Description of Artificial Sequence: Synthetic coding sequence
  source 1..2271: mol_type = other DNA
atgctggggatttgccgaggccgtcgtaagttcctggctgctagcctttcactgctttgcattcccgctattacatggatatacttgttcagcggctccttcgaggacggaaaacctgtatctttgtccccacttgaatcccaggcacacagccctaggtacaccgcctcaagtcagagggaaagggaatccctcgaggttcggatgcgagaggtcgaagaggagaatcgcgctttaaggagacagttgagcctggcccagggtcgagctccctcacaccgcagaggcaaccattcaaagacttattccatggaggagggtacaggagatagcgaaaatctgcgtgcaggaatcgtggccggaaatagttctgagtgcggtcaacaacctgtagtggaaaaatgtgaaaccatacacgttgcaattgtgtgcgcgggatacaacgcttccagagacgtggtcacactagtgaaaagtgtgttgtttcatcgcagaaacccgctgcacttccacctgattgctgatagtatcgccgaacagattcttgcaacgcttttccagacctggatggtcccagctgtcagagtcgacttttataacgcggacgaactgaagtccgaagtcagctggattcctaataagcattactccggtatctacggtctcatgaaactggtgctaactaaaactctgccggcaaacttagagcgtgtcatcgtccttgatacagatattactttcgctacggacatcgcagaattatgggccgttttccataagtttaaaggccaacaggttcttggcttggtcgaaaatcagtccgactggtacctcggaaatctgtggaagaatcacagaccttggccagccctcggcaggggctacaacacgggcgttatcctgctactgttagataagctgcggaaaatgaagtgggaacagatgtggaggctgaccgctgaacgcgagctcatgggtatgctttcgacctccctggcagaccaggatatcttcaacgctgtcattaagcagaaccccttcttggtgtaccagctgccatgtttttggaacgtgcagctcagcgaccacacgagatctgaacagtgttatagggatgtgtccgacctcaaagtcatccactggaattcacctaagaagctgcgggtcaaaaacaagcacgtggagttctttaggaatctgtatctgacatttctagaatacgacgggaatctgcttcgacgcgaactcttcggatgccctagtgaggccgacgtgaactcggaaaacctgcaaaaacagctgagtgaactggacgaggatgatctctgctacgaatttcgccgtgagaggtttacagttcacagaactcatctgtacttcctgcattatgaatatgagcctgccgcagacagcacggacgttacactggttgcccaactctctatggataggcttcagatgctggaagctatctgcaagcactgggagggccctatttctttagctctttacttatctgatgctgaagcccagcagttcctgagatacgcacagggatcagaggtcctcatgtcccggcacaatgtaggttatcacattgtttataaggagggtcagttttatcccgtaaacctccttagaaacgtagcgatgaaacacatttccacgccttatatgtttctgagcgatattgacttcctccccatgtacggtttatatgaatacttgagaaaatcagtcatccagctcgacctggccaataccaagaaagctatgattgttccagcatttgaaaccctgaggtatcggttgagctttcctaagagcaaagccgagcttctgagcatgctggacatgggcactctcttcacattccgctaccacgtgtggaccaagggacatgcgcctaccaattttgccaagtggcgaacagcaacaactccctatagagttgaatgggaagctgacttcgagccgtatgtcgttgtgcgcagggattgtccagagtatgaccgacgctttgtcggtttcggctggaataaggttgcccatatcatggagctggatgtccaggaatacgagttcatagtgctacccaacgcctatatgattcacatgccacacgctccttcttttgatatcaccaaattccggtcaaacaagcaataccgaatttgcctcaagaccctgaaagaagaatttcaacaggatatgagtagacggtacggctttgccgctctgaaatacctgacagctgaaaataacagctag

SEQ ID NO: 228669 - DNA, 2271 bp, synthetic construct
  misc_feature 1..2271: note = Description of Artificial Sequence: Synthetic coding sequence
  source 1..2271: mol_type = other DNA
atgttgggcatatgccgcggacgccgaaagtttcttgccgcttcactgagcttactgtgcatccccgctataacctggatttacctgttcagtggatcatttgaagacggcaagccagtctcccttagtccactcgaatctcaggcacactcccctagatataccgccagtagtcagcgggagcgtgagtctcttgaggtccggatgagagaagtagaagaagaaaaccgggctctgaggcggcagttgagcctggctcagggcagggcaccctcccatcggaggggcaaccacagcaagacctactccatggaagaaggcaccggcgactccgagaatctcagggcaggcatcgtggccggaaatagctcagaatgcgggcagcagccagtcgttgaaaaatgtgagacgattcacgtggccatcgtatgtgccggttacaatgcctctcgagacgtcgttacgttggtgaaatctgtcctgtttcacagacgcaatccgttgcactttcatctgatagctgacagcattgccgaacagattctcgccacattattccagacatggatggtgccggctgtgcgcgttgacttttacaacgctgatgagctgaaatctgaggttagctggatcccgaacaaacattacagtggcatctacgggctgatgaagctggtgctgactaaaacactgcccgcaaatttagaacgagtcatcgtgctcgacaccgacattacattcgctacagacattgcggagctgtgggctgtcttccacaagtttaaaggccagcaggtgctgggcttagtggaaaaccagtctgattggtacctcggaaacctgtggaaaaaccaccgtccttggcctgccctcgggcgtgggtataacacaggagttatcctgcttctactcgacaaattgaggaagatgaagtgggagcaaatgtggcgcctcactgctgagcgggagcttatgggcatgctgtccactagtctggcagaccaggatattttcaatgccgtcattaaacagaatcctttcctcgtgtatcagctcccgtgtttctggaacgtccagctcagtgaccatacacgttctgaacaatgttacagggatgtttcagatttgaaagtgatccactggaatagcccaaagaaactccgtgtcaaaaacaaacacgttgagttcttccgaaatctgtatctgactttcctggagtatgacggcaacttactaagaagggaactgttcggttgtccgtcggaggccgacgttaactccgaaaaccttcagaaacagctgtccgaactcgatgaggacgacttgtgctacgaatttcgccgtgagcggttcactgtgcatcgaactcatttgtactttctacactacgagtacgagccagccgctgattcgactgacgtgacgctggttgcgcagctgtcgatggacaggcttcagatgctcgaagccatctgtaagcactgggaggggcctattagtctagcactctatctctcagatgctgaagcccagcagttccttcggtacgcccagggatccgaagtgttgatgagtagacacaacgtgggctaccacatcgtctacaaggaggggcaattctatccggtcaacctccttcgaaatgtggctatgaagcatattagcactccctacatgtttctctctgatattgacttcctgcccatgtatggcctgtacgaatatctccgcaaaagcgtcatccagctggacttggctaacacaaaaaaggccatgatcgttcctgctttcgagacacttagatatcgcctgagtttcccaaagagtaaggctgagctgctctcgatgcttgatatggggaccctctttactttccgctatcatgtctggaccaaaggccacgcacccaccaacttcgcgaaatggcgaactgccacaacaccatatcgggtcgagtgggaagccgactttgagccgtatgttgtggtgcgacgcgattgtcctgaatatgatcgtaggttcgtcggctttggctggaacaaagtggcccatataatggagcttgatgttcaggagtatgagtttatcgtcctgccaaacgcctatatgatccatatgccccacgctccttccttcgatatcaccaaatttagatctaacaagcagtaccgcatctgcctgaagaccctcaaagaagaattccagcaggatatgtcgagaagatacggcttcgctgccttaaagtatctgactgccgaaaacaacagctag

SEQ ID NO: 228670 - DNA, 2115 bp, synthetic construct
  misc_feature 1..2115: note = Description of Artificial Sequence: Synthetic coding sequence
  source 1..2115: mol_type = other DNA
atgctgggaatctgtcggggaaggcgaaagttcctggcagcatctctgagccttctctgtattcccgctatcacgtggatctatctgtttagtggttcctttgaagatgggaaacctgttagcctttccccgctggagtctcaagcacattcacctcgctacaccgcctcctcacagcgtgagcgggaaagcctggaggtgcgcatgcgggaggtggaggaggaaaaccgcgcattgcgcaggcaactatccctggcacagggtagggcgccaagccaccgcagaggcaaccactccaaaacatatagcatggaggaaggtacaggggactcggagaacttgagggctggtatagtggctggcaatagttcggagtgcggtcagcaaccagttgtggagaagtgcgagaccattcacgtggccattgtgtgcgcaggctataacgcttctcgagatgtcgtgaccctggtaaagagcgttctcttccaccggaggaatcctctgcattttcacctgatcgccgattctattgcggagcaaatcctggctaccttattccagacatggatggtccctgcagtaagggttgacttctataatgctgacgagctcaagtccgaggtctcttggatcccgaataagcactacagtggtatctatggcttgatgaaattggttctcacaaagactttacccgctaatctagagcgcgtaatcgtcctggacacagacatcaccttcgcaacagacattgccgagttatgggccgttttccataagttcaagggccagcaggttctcggtctcgttgaaaaccagtctgactggtaccttggaaacctgtggaaaaatcacaggccttggcccgcactgggccgaggctacaatacgggcgtgatcctcctccttctggacaagctgcgtaaaatgaagtgggagcagatgtggagactcaccgcagaacgtgaattgatgggaatgctcagtactagtcttgccgatcaggacatatttaatgccgtcattaagcagaacccttttttggtttatcagctgccttgcttctggaatgttcagcttagcgaccacacaagatcagagcaatgctacagggatgtgtctgatctgaaactacagaaacaattaagcgagctggatgaggatgacctttgctatgaatttagaagagagcgtttcactgtgcatcggactcatctctacttcttgcattatgagtatgaacccgcagccgattcgactgatgtgaccctggttgcccagctgagcatggatagactccagatgctggaggctatttgcaaacattgggagggccctatctcactagctctctatctgtccgacgccgaggctcagcagttcctgcgttacgctcaaggttctgaggtgctgatgtcgaggcacaacgtcggatatcacatcgtttacaaggagggtcagttttacccagtgaacctgttgaggaatgtggcgatgaaacatattagcactccatatatgtttctgtctgatatcgattttcttcccatgtatggtctgtatgaatatttgaggaagtcggtgatccagttggaccttgccaatacaaagaaggcaatgatcgtacctgcctttgagacgcttagatataggctgagttttccgaagtcaaaagcagaattactaagtatgttggatatggggactctgtttaccttcaggtaccacgtgtggacgaagggccatgcccctacaaatttcgctaagtggcgcaccgctacaacaccctatcgtgtagagtgggaagctgactttgagccttatgtcgtggtacggagggattgccccgagtacgaccggcgttttgtgggctttggatggaacaaagttgctcacatcatggaattagatgtgcaggaatatgagttcattgttctcccaaatgcctacatgatccacatgccccatgcgccttcctttgacatcaccaaattccgctcaaacaagcagtatcgtatatgcttgaaaaccctgaaggaggagtttcaacaggacatgagcagaaggtacggatttgctgctctgaaatatctgaccgccgagaataacagctag

SEQ ID NO: 228671 - DNA, 408 bp, synthetic construct
  misc_feature 1..408: note = Description of Artificial Sequence: Synthetic coding sequence
  source 1..408: mol_type = other DNA
atgcttgggatttgtcgaggccgaaggaaattcctggcagctagcctgagcctcttgtgcattccagccattacttggatctacctcttctctggatcctttgaggacgggaaacccgtgagtctgagcccccttgagtcacaggcacatagcccccgatataccgcatcttcccagcgagaacgcgaatccctagaggtacgtatgagggaagtggaggaagagaaccgtgccctcagacgacagctctctctagcccaggggagagctccttctcacaggagaggcaaccacagcaaaacttactctatggaggaggggaccggcgactctgaaaacttgagggccggaatcgttgctgggaattcctcagagtgtgggcagcagcctgtggttgaaaagtgttag

SEQ ID NO: 228672 - DNA, 144 bp, synthetic construct
  misc_feature 1..144: note = Description of Artificial Sequence: Synthetic coding sequence
  source 1..144: mol_type = other DNA
atgttgggcatctgtcgcggtcggaggaagtttttggccgcatctctcagtttactctgcattccggctatcacttggatctatttattcagcggatccttcgaggatggaaagcctgtctccctttcaccgttagaatcttag

SEQ ID NO: 228673 - DNA, 411 bp, synthetic construct
  misc_feature 1..411: note = Description of Artificial Sequence: Synthetic coding sequence
  source 1..411: mol_type = other DNA
atgctgggtatatgcagggggaggcgcaaattcctggccgctagcctgagtctcctctgtattccagccattacctggatttatctgtttagtggaagtttcgaagacgggaaacccgtatccctttcacccctggagtctcaggctcatagccccaggtacaccgcttcaagtcagcgggaacgggagagcctcgaagttcggatgagagaggttgaggaagagaaccgggcacttagaagacagctgagcctcgcccagggacgcgctccgtctcatcgcaggggaaaccactctaagacctatagtatggaggaaggcactggcgacagtgagaacctgcgggctggcattgtagcgggaaatagtagcgagtgtgggcagcagcccgtggtggaaaaatgcgagtag

SEQ ID NO: 228674 - DNA, 183 bp, synthetic construct
  misc_feature 1..183: note = Description of Artificial Sequence: Synthetic coding sequence
  source 1..183: mol_type = other DNA
atgctgggcatctgccgcggaagacggaaatttttggccgcatcactgtccctcctctgcatacctgccataacatggatctatctcttctccggtagttttgaagatggcaagccggtgagcctcagtccactcgaaagccaggcccattcccctcgctacaccgctagctcccaaaggtag

SEQ ID NO: 228675 - DNA, 330 bp, synthetic construct
  misc_feature 1..330: note = Description of Artificial Sequence: Synthetic coding sequence
  source 1..330: mol_type = other DNA
atgctgggtatatgtcggggtcgtcgaaagttcctcgcggcatcactctccctcctatgtattcctgcaataacttggatctacctgttctcaggatctttcgaagacgggaaacccgtaagcttatcaccgctggaaagtcaggctcactctccacggtataccgcttcttcccagagggagcgcgagagtttggaagtccggatgagagaggttgaggaagagaaccgtgcattgagacggcaactatcactcgcacaaggaagggcacccagccacaggagagggaaccactcaaagacgtactccatggaagagggaacaggctag

SEQ ID NO: 228676 - DNA, 2124 bp, synthetic construct
  misc_feature 1..2124: note = Description of Artificial Sequence: Synthetic coding sequence
  source 1..2124: mol_type = other DNA
atgctcggcatctgccggggtcggagaaagttcttggcagcttctctctctctgctgtgcataccggctatcacttggatctatctgttctctggctcctttgaggatgggaagccggtgtccctctcacccctggaatctcaggctcatagccccaggtatacagcttcatcacagagggagcgagagagcctggaggtccggatgcgggaggtagaagaggagaacagggctcttagaaggcagctttccctcgcacagggtcgggcaccctctcaccgtaggggcaatcactccaagacgtacagcatggaggagggaactggagacagcgaaaatctgcgcgcaggtatcgtggcgggaaattcctcagaatgtggccagcaacccgttgtcgagaagtgcgagactattcacgtggctatcgtctgcgctggatataatgcgagccgtgatgtggtgaccctcgtgaaatcagtgttatttcatcggagaaaccctctgcacttccaccttatcgccgatagcattgccgagcagatcctagccactttatttcagacctggatggtacctgccgtccgggtcgatttctacaatgccgacgaactgaaatcagaggtgtcatggatacctaacaaacactattctggtatctatggcctaatgaaactggttctgacaaaaacactgccagccaacttagagagagttattgtgctagatacagatatcacattcgcaacagatatagccgagctgtgggccgttttccacaagtttaagggtcagcaggtcctagggctcgttgaaaatcagagcgattggtatttgggaaacttatggaagaaccatcggccttggcccgctttgggtcgagggtacaacaccggtgtcattttacttctcttagacaaattgcggaaaatgaaatgggagcagatgtggcgcctgaccgccgagagggagctgatggggatgttgagcaccagtctggcagatcaggacatattcaatgccgttatcaagcaaaacccgttcctcgtttaccaactgccctgtttttggaatgtccagttgtcagaccatacacgctctgagcagtgctatcgcgacgtcagcgatcttaaggtcattcactggaattctcccaaaaaactgagagtaaagaacaaacacgtcgagttttttcggaatctttacctcacattcctagaatacgatgggaatctgctgagacgtgagctctttggttgtcctagcgaagctgatgttaattctgagaatttacagaagcagctgtccgagctggacgaagacgatttgtgctacgagttcaggagggagaggttcacagtgcatcggacacatctctattttcttcattacgagtatgagccagccgctgacagcaccgacgtgacactggttgcgcaactatccatggaccgcctccaaatgctagaggccatttgcaagcactgggaaggacccattagcctggctttatacctctcggatgcagaagcgcagcagttccttcgctatgcgcaaggtagcgaagtgctcatgagcaggcacaatgttgggtatcatatcgtttataaggagggacagttttatcctgtgaatttactcaggaatgttgcgatgaagcacataagtaccccctatatgttcctgtcggatatcgattttttacctatgtatgggctctatgagtatctgaggtaccacgtgtggactaaggggcacgcacccacaaattttgctaagtggcggacggctacaacaccctaccgcgtggaatgggaggcagatttcgaaccctacgtggtggtacgtagggattgccccgaatatgatcggagatttgtggggtttggatggaataaggtggctcacataatggaactggacgtccaggagtacgaattcattgtgctcccaaacgcctatatgattcacatgcctcatgccccatccttcgacatcaccaagtttcgcagcaacaaacagtatcggatatgtctcaagactctgaaagaggaattccaacaggatatgtcccgcaggtatggcttcgctgcactcaagtatcttacggctgagaataacagctag

SEQ ID NO: 228677 - DNA, 1668 bp, synthetic construct
  misc_feature 1..1668: note = Description of Artificial Sequence: Synthetic coding sequence
  source 1..1668: mol_type = other DNA
atgctgatctggtcagaggtgtcttggattcctaacaagcactacagtggaatctatggcctcatgaagttggttctgaccaagacactcccggcaaacctggagagagttattgtgcttgatactgacataacttttgctacagacatcgcagaactctgggccgtgttccacaaattcaaagggcagcaggtgctaggcttagtagagaatcagtcggattggtatctcggtaacctgtggaagaatcatcggccttggccagcgctcgggagaggatacaataccggtgtgatccttctgctgctcgataagctccgtaagatgaaatgggagcagatgtggcgcctcactgcagagcgcgagctcatgggcatgcttagtacaagcctggcagaccaggacatatttaacgctgttataaagcagaaccctttcctcgtctatcagctcccatgcttttggaatgtgcagttaagcgaccacacacgatccgagcagtgttaccgggacgttagtgacctgaaggtgattcattggaattctcccaagaaattacgggtcaaaaataagcacgtagaattctttcggaatctgtacttgacattcctggagtacgacggcaacctgctgagacgggagctgttcgggtgccctagtgaagctgatgtcaatagcgaaaacctgcagaaacaactaagcgaactagatgaggatgatctgtgctacgagttcaggagagaacgtttcacagtgcaccgcacacatctgtactttctacattatgaatacgagcctgccgctgactcgacagatgtaacactggtggctcagctgtctatggatcgcttacagatgttggaagctatatgcaagcattgggaaggcccaattagcctcgccttatatctaagcgacgcagaggcccagcagtttttgaggtacgctcaaggttcggaggtgctgatgagcaggcataatgtcggttaccatattgtgtacaaggagggacagttctaccctgtcaacctgttgaggaacgtagctatgaaacacattagcactccctatatgtttctttccgatattgattttctcccgatgtacggcctctatgaatatctcaggaagtcagtcattcagctcgatctggccaacaccaaaaaggccatgatcgtccccgcatttgaaaccttgcgctataggttgtcttttccaaaaagcaaagcagaactcctgtctatgcttgatatgggcaccctattcacttttagataccacgtttggaccaagggccacgcgcctaccaattttgcaaagtggcggactgctaccactccctaccgtgtagaatgggaagctgatttcgagccctatgttgtagtccggcgtgattgtcccgaatacgatcggagattcgttggatttgggtggaataaagtcgctcacatcatggagctcgatgtgcaggagtacgagttcatcgttctgcctaatgcatacatgattcacatgcctcacgcaccttcctttgatatcacaaagtttcggtctaataaacagtatcgcatttgccttaagaccctgaaagaagagtttcagcaagatatgtctagacggtatgggtttgcagccctgaaatacctcaccgccgaaaacaactcttag

SEQ ID NO: 228678 - DNA, 1098 bp, synthetic construct
  misc_feature 1..1098: note = Description of Artificial Sequence: Synthetic coding sequence
  source 1..1098: mol_type = other DNA
atggcgaaagtggcaaaggacctaaacccaggtgtcaagaaaatgagcctgggacagctgcagtccgcgaggggagtggcatgcctcggctgcaaagggacgtgtagcgggtttgaacctcactcttggcggaaaatttgtaaaagttgcaaatgtagccaggaggatcactgcctgacttcagacctggaggatgatcggaagatcgggagacttctgatggatagtaaatattcaacgctaacggccagggtgaagggaggcgatggtattcgtatatacaaaaggaacaggatgattatgactaacccaatcgcaacaggcaaagatcctacctttgataccatcacttatgagtgggcccctccaggtgtgacgcagaagttgggcttgcagtacatggagctgatccccaaggaaaaacagcctgtcactggaaccgagggggctttctatcgacggcgtcagctgatgcaccaactccccatctacgaccaggacccatccaggtgcaggggcctgctcgaaaatgaactgaaactgatggaggagttcgttaaacagtacaaatcagaggccctgggcgttggggaggtggcccttcctgggcaggggggacttccgaaggaagagggaaagcagcaggagaagcctgaaggggcagagacaactgccgctactacaaatgggtcactaagcgaccctagcaaggaagtggagtatgtttgcgagctgtgcaaaggcgcagcaccacctgactcacccgttgtgtacagcgatcgcgctggctataacaaacagtggcacccgacctgcttcgtttgcgctaaatgctccgagccattggtcgatttgatatatttctggaaggacggagcaccgtggtgtggtcgccactactgcgaaagcttgaggccacggtgctctggttgtgacgagattatctttgcagaagactaccaaagggtcgaagatttagcgtggcatcggaagcacttcgtatgtgagggctgtgagcagctgttgagtggacgtgcatacattgtgacaaaaggccagctcctttgcccaacctgcagcaaatcaaaacggtcgtag

SEQ ID NO: 228679 - DNA, 762 bp, synthetic construct
  misc_feature 1..762: note = Description of Artificial Sequence: Synthetic coding sequence
  source 1..762: mol_type = other DNA
atgttcggcatgcagggcgacgtgttcggattgcgtgcaaccttcatggagggcctgcagtatatggagttgatccccaaagagaagcaacccgtcaccggtaccgagggggcattctacagacgacgccagctgatgcatcagctacccatttacgatcaagatcctagcagatgtaggggcctgttagaaaacgaactgaaactcatggaggagtttgttaagcagtataagtctgaggctttgggcgtcggagaggttgccttgccgggacaaggaggtttaccaaaggaggaggggaaacagcaagaaaagccagagggcgcagaaacaaccgccgctactaccaacgggtctctaagtgacccatccaaggaggttgagtacgtttgcgaactgtgcaagggcgctgctcccccagatagccctgtcgtatactctgaccgagccggatataacaaacagtggcatcctacatgcttcgtctgtgctaagtgctccgagccgctggtggatctgatatacttctggaaggacggtgcaccatggtgtggaaggcattactgcgagagtcttaggcccaggtgctccggctgcgacgaaataattttcgcagaggactatcaaagggtcgaagatctggcctggcataggaaacacttcgtgtgtgagggttgcgagcagttgctatctggtagagcttacatcgtcaccaaaggccagttattgtgtccaacctgttccaaatccaagcgctcctag

SEQ ID NO: 228680 - DNA, 879 bp, synthetic construct
  misc_feature 1..879: note = Description of Artificial Sequence: Synthetic coding sequence
  source 1..879: mol_type = other DNA
atggatagtaaatacagtacactgactgcaagggtcaaggggggagatggtattcggatatacaagcgcaataggatgatcatgactaatccaatagcaacgggcaaggatcccacctttgacacaataacttacgagtgggctcctcctggcgtgactcagaagctgggcctccagtacatggagctgattccaaaggagaaacagcctgtgaccgggacagaaggcgcattctatcggagaagacagctgatgcaccagctgcccatctacgatcaagacccttcaaggtgcaggggcttgctagaaaatgaattaaagctgatggaggagttcgtcaaacaatacaagtctgaagcccttggagtcggtgaagtggctctcccagggcaggggggtctgcccaaggaagaaggcaagcagcaggagaagccagagggagccgaaaccaccgctgctactacaaacggcagtctgagcgatccttccaaggaggtggaatatgtttgcgaactgtgtaaaggtgcagcccctcctgactccccggtggtctacagcgatagggccggttataacaagcagtggcaccccacatgcttcgtgtgcgctaaatgcagtgagccgctggtggacctgatatacttttggaaagatggcgcaccttggtgcggacgtcattattgcgagtctcttagaccacgatgctctgggtgtgacgagattatctttgcagaggattatcagagagtcgaggacttggcgtggcatagaaaacacttcgtttgcgaagggtgtgagcagctgctctctgggagggcttatatcgtcacaaaagggcaactcctgtgtccgacttgttctaaaagtaagcgatcgtag

SEQ ID NO: 228681 - DNA, 744 bp, synthetic construct
  misc_feature 1..744: note = Description of Artificial Sequence: Synthetic coding sequence
  source 1..744: mol_type = other DNA
atggctaaggtagcgaaggacctaaaccctggtgtcaaaaaaatgtcgctcgggcagcttcagtctgccagaggagtagcctgccttggttgcaagggcacctgtagcggattcgagccacatagttggcggaagatttgcaagtcctgcaagtgttcccaggaagaccattgcctcacctcggatctcgaggacgatagaaagattggtagactgctgatggactccaagtatagcaccttgactgccagggtgaaagggggagatggaatcaggatctacaaacggaaccgcatgatcatgacaaaccctatcgcaacaggcaaggatcccacattcgataccataacttacgaatgggctcccccaggtgtgactcagaagctgggtctccagtacatggaattaatacccaaggagaaacagcccgtgaccggcacagaaggcgctttttatcggcgaagacagctgatgcaccaacttcccatttatgatcaggatcccagtcggtgcaggggattgctggagaacgagctgaaactgatggaagagttcgtgaaacagtacaaatctgaggccttgggagtgggggaggtcgcactgcccggacaggggggactccccaaggaggaagggaaacagcaggaaaaaccggaaggtgctgagacgacggctgccactacaaatggatccctgtcggaccctagtaaggaagtcgaatataaacctgttccactagtttag

SEQ ID NO: 228682 - DNA, 786 bp, synthetic construct
  misc_feature 1..786: note = Description of Artificial Sequence: Synthetic coding sequence
  source 1..786: mol_type = other DNA
atgaaccccaactgcgctcgctgcgggaagatcgtctatcccactgaaaaggtcaattgtttagacaagttctggcacaaggcttgcttccattgtgagacctgcaaaatgacccttaacatgaagaattacaaaggatacgagaagaaaccttattgcaatgcacattacccaaaacagtctttcactatggtggcggacactcccgaaaacctgcggctgaaacagcagagcgagctccagagccaggtgaggtataaggaggaatttgagaaaaataaaggcaaggggttctccgtcgtcgccgacacccccgagctgcagcggatcaaaaagacacaggatcagatcagcaacataaagtatcacgaagagtttgagaagtcccgcatgggacctagcggcggtgagggcatggaacccgagagacgcgatagccaggatggttcctcctaccgcagacctctcgagcagcagcagccccaccacatcccaactagcgcaccagtctaccaacagccacagcagcaacctgtagcccagagctacggcggttacaaggaacctgccgcacctgtgtccattcagcgcagcgcgcctggagggggtgggaagagatatcgagccgtgtacgactattctgctgccgacgaagatgaggtgtccttccaggacggagacacaatcgtgaacgtccaacaaatcgatgatggctggatgtacggaacagtagaaaggacaggcgataccggtatgctgccggctaattacgttgaggctatctag

SEQ ID NO: 228683 - DNA, 501 bp, synthetic construct
  misc_feature 1..501: note = Description of Artificial Sequence: Synthetic coding sequence
  source 1..501: mol_type = other DNA
atgaccttgaacatgaagaactacaagggttatgaaaaaaaaccctactgcaacgctcattacccaaagcagtccttcacgatggtcgctgatacccctgagaatcttaggctcaaacagcagtccgagcttcagtctcaggtcaggtacaaagaggaattcgaaaagaataaagggaaaggattcagtgtagtcgctgacacacccgagcttcagagaattaagaaaacacaggatcagatctctaatattaaatatcatgaagaattcgagaagtcacgtatggggccttcaggcggtgaaggtatggaaccggagcgcagagatagtcaggacggctcctcttaccgccgaccacttgagcagcagcagccacatcacattccgacctctgctcccgtttatcagcagccacagcaacagccagtggcacagtcttatgggggttacaaggaaccggcagccccagttagtatccaacgatcagctcctggagggtag

SEQ ID NO: 228684 - DNA, 618 bp, synthetic construct
  misc_feature 1..618: note = Description of Artificial Sequence: Synthetic coding sequence
  source 1..618: mol_type = other DNA
atgcttcccctaagagatctgcaagatgacactgagcacgaagagttacaaggtctgcgggaagaggcactgctgcagcgcgtcaggtacaaggaggaattcgagaagaataagggtaaggggtttagcgtagtggctgacaccccagagctgcaaaggattaagaagacacaggatcagatatcgaacattaaataccacgaggagtttgagaaaagccggatggggccttccggcggtgagggtatggagcctgagcggcgtgactcccaggacgggagctcctataggcgaccactagaacaacagcaaccccaccatattccgacatccgcccctgtgtaccagcaaccacagcagcagcccgttgcccagtcgtatggcggttataaggaacccgctgcaccagtcagcatccagaggtcagcgcctggaggcggtgggaaaaggtacagggcagtgtacgattacagcgctgccgacgaggacgaagtgagtttccaggatggtgacacaatcgtgaacgtgcagcagattgacgatgggtggatgtacgggaccgttgaacggaccggcgacacaggcatgctgcccgctaactacgttgaagccatttag

SEQ ID NO: 228685 - DNA, 786 bp, synthetic construct
  misc_feature 1..786: note = Description of Artificial Sequence: Synthetic coding sequence
  source 1..786: mol_type = other DNA
atgaatccaaattgcgcgagatgtgggaaaattgtataccccacagaaaaagtcaattgtctggacaaattttggcacaaggcctgtttccattgtgaaacctgtaagatgacactaaatatgaagaattacaaaggatacgaaaagaagccctattgcaatgcacattaccctaagcagagctttactatggttgcggatactcccgagaatctgcggctgaagcagcaatctgaactgcagagtcaagttaggtacaaagaagagtttgagaagaacaaaggtaaaggtttcagtgtggtagcggacacaccagaactgcagcgaattaagaaaacacaggatcagatatccaacattaagtatcacgaagaattcgagaaaagtaggatgggaccgagcggtggcgagggcatggaaccagaacgaagggattcccaagacggcagtagttaccgcagacctctagagcaacagcagccgcatcatatccctacctctgctcccgtttaccagcagccacagcagcaacctgtcgcccagagctatgggggatacaaagagccagcggctcctgttagcattcagcggagcgcacccggagggggtggcaagagatacagggcagtttatgattacagcgccgcagacgaagacgaagtttcttttcaggatggcgacaccattgttaatgttcaacaaatcgatgacggttggatgtacggcaccgtcgaacgaacaggcgacacgggaatgcttcccgctaattacgtcgaagcaatttag

SEQ ID NO: 228686 - DNA, 378 bp, synthetic construct
  misc_feature 1..378: note = Description of Artificial Sequence: Synthetic coding sequence
  source 1..378: mol_type = other DNA
atgaatcctaattgtgctcgatgcgggaagatcgtgtatccaactgaaaaggtaaactgcctcgataagttctggcacaaagcttgctttcactgcgagacctgtaaaatgacactgaatatgaagaattacaagggctatgagaaaaaaccgtattgtaatgcgcactacccaaagcaaagtttcacaatggttgccgacacacccgagaacctgcgtttgaagcagcagtcagagctgcaatctcaagtgaggtacaaggaagagtttgagaagaataagggtaagggcttttctgtcgtggctgatactcccgaactgcaacggtcaagcctcggctttttgtggaatgagatcccaccttccccccatctgtag

SEQ ID NO: 228687 - DNA, 4050 bp, synthetic construct
  misc_feature 1..4050: note = Description of Artificial Sequence: Synthetic coding sequence
  source 1..4050: mol_type = other DNA
atgaagaagattcgtatctgtcacatattcacattctactcctggatgtcatatgatgtcctctttcagagaacagaattgggggctctggagatctggcgacagctgatatgcgcacacgtgtgtatttgcgtcgggtggctgtatctcagagatagggtgtgcagtaagaaagacatcatcttgcgcaccgagcagaacagtggcagaactatactcatcaaggccgtaaccgagaaaaacttcgagacaaaggactttcgggcatcactagagaacggggttttactctgtgacctcattaacaaactcaagcccggagtgatcaagaagattaatcggctgtctacgccaattgcagggttagacaacatcaacgttttcctgaaggcgtgcgaacagatcggactgaaggaggcccagctatttcacccaggagatctgcaggatttaagcaaccgcgtaaccgtgaaacaggaggaaacagaccgcagggtgaaaaacgtgcttattacactttactggttagggcgaaaggctcaatcaaatccatactacaatgggccacatttaaacctcaaagcattcgaaaacctcttaggtcaagccctcaccaaggcgctggaagactccagctttttaaaaagatcaggtagagattccggctacggcgatatttggtgtccagagcgcggagagtttctcgctccgcctagacatcataaaagagaggactctttcgagtctctggactcactgggttctaggtctctgacgtcttgctcctccgacatcactcttcgaggcggtcgagagggattcgaatctgacaccgattcagaatttaccttcaagatgcaggattacaataaagatgatatgagctacagacgcatcagtgctgtggagcctaagaccgccctgccatttaataggttcctgcccaataagtcccgtcagcctagttatgttccagcacctttgcggaagaagaaaccagacaagcacgaagataatagaagatcctgggcttctccagtctacaccgaagccgatgggacatttagccgactctttcagaaaatttatggggaaaacggttccaagagcatgtcagatgtgtctgctgaagatgtccagaatctcaggcagctgagatacgaggagatgcagaagattaaatcacagttgaaggagcaggatcaaaagtggcaagacgatctagccaaatggaaggaccggcgaaaatcatacaccagcgacctccaaaaaaaaaaagaggaacgcgaggagatcgagaaacaggctcttgagaagagtaagcgcagcagtaaaacctttaaggagatgttgcaggatcgagaatctcaaaaccagaaatccaccgtgcccagcaggcgcaggatgtacagcttcgacgacgtgttagaagaagggaagcggcctccaaccatgacggtgagtgaggcctcgtaccagagtgagagggttgaggagaagggggctacatatccctccgagattccaaaagaggactctacaacttttgccaagcgagaggacagagtgaccactgagattcaactgccttcacaatcccccgttgaggagcagagtcctgcaagcctgtcatcactgcggagtaggagtactcagatggaaagtactagagtcagcgcatctcttccacggtcctatcggaaaacagacacagtccggctcacatccgtggttacgccccgacctttcggatctcagactcgcggaatatcttccctgccccgatcgtataccatggatgatgcctggaaatataatggagacgtcgaagacatcaagagaacacctaacaatgtggtaagcacgcccgcaccctcgcccgacgcatcacagctggcgtcatctcttagttcccagaaggaggtcgcagcgacggaagaggatgttacccggctcccttctcccacaagcccatttagtagcctgtctcaagaccaggccgcaacaagcaaagccacattgtcttctacatcaggcctagacctaatgtctgaatccggggaaggagagatcagccctcaacgcgaagtgtcacggtctcaggaccagttctccgacatgaggatctcaataaatcagacccccggaaagtctctggacttcggtttcaccataaaatgggacatacctggtatatttgtagcctcagtcgaagccggaagcccagccgaattcagccaactgcaagttgatgatgagataatcgccatcaataatacaaaattcagctacaatgatagcaaagaatgggaggaggccatggccaaggcacaggagactggtcacctagtcatggatgtgaggaggtacggaaaagcgggatctcctgaaactaaatggatcgatgctacgagcgggatctacaactctgaaaagtctagcaatctttccgtgacaactgacttttcagagtcccttcagagctctaacatagagtccaaggagattaacgggatccatgacgaatctaacgcatttgagtcaaaagctagcgaaagtattagtctgaaaaatttgaagcggagatctcagttttttgagcagggatctagcgattctgtagtgccagatcttcctgttcccaccatttccgccccttcccggtgggtgtgggatcaggaggaggagcggaagcgccaggaacgctggcaaaaggaacaagatagactgctccaggaaaagtatcagagggagcaggaaaagctgcgggaagagtggcagagggccaaacaggaggcggagcgagaaaattctaaatacctcgatgaggaactgatggtgctgagctccaactctatgtcgctgactaccagagaaccttcccttgcaacttgggaggctacatggagcgaagggtcaaagtcttccgacagagaaggaacacgtgcaggggaggaggagagaaggcagccccaggaagaggtcgtgcatgaggatcagggcaagaaaccacaggaccagctggtgattgagcgcgagcggaaatgggagcagcagctccaggaggagcaggaacagaagcgcctgcaagccgaggctgaggagcaaaagcggcctgcagaggaacagaagcgccaggcagaaatcgagcgtgagacttccgtccggatctatcaatataggcgcccagttgactcctatgatattcctaaaactgaggaggcctcttctggctttctccctggcgaccgcaacaaatcccgatctacaactgagctggacgactactcaacaaataaaaatggcaataacaaatatcttgatcagatcggtaacatgacttccagtcagagaaggtctaaaaaggaacaagtgccgtctggtgcagagctagagcggcagcagatcctgcaggagatgcgcaaacgcaccccacttcacaatgacaatagttggattcgacagaggtcagcatccgtcaataaagaaccagtgagtctgccgggaatcatgcgcaggggagaatcactcgacaatctggattctccaagatccaattcctggcgccagcccccttggctgaatcagccgactggcttttacgcctcctcttccgtccaggacttctcgcggccaccccctcagctggtatccacctcaaacagagcatatatgcggaatccctcatccagcgtcccgccacctagcgcaggctccgtgaaaaccagcacaaccggcgttgccacaacccaaagcccaactcctaggtcacattcccctagtgccagccagtccggatcacagttgcgcaaccgctccgtgtccggcaagcgaatctgctcttattgcaataacattctgggtaaaggagcagcaatgattattgagagtctcggcttatgttatcacctgcactgttttaaatgtgtggcctgcgaatgtgacctgggtggttcaagcagcggcgctgaggtgcgaattagaaaccatcaactctactgtaacgattgttacctgaggttcaagtcggggagacccacagctatgtag

SEQ ID NO: 228688 - DNA, 5012 bp, synthetic construct
  misc_feature 1..5012: note = Description of Artificial Sequence: Synthetic coding sequence
  source 1..5012: mol_type = other DNA
atgaagaaaattcgaatttgccacatcttcacattttattcctggatgtcctatgacgttctattccagagaactgaactgggcgctctcgaaatctggcgccagctgatctgcgcccacgtctgtatctgcgtcggatggctgtatttacgggatagagtttgttccaagaaggacattatactccgtaccgaacagaattccggacgtactattcttatcaaggccgtgacagagaaaaattttgaaaccaaagatttccgggctagcttggagaatggggtgctgctttgtgatctgatcaataagctgaagccaggggtcattaagaagatcaatagactctccacacctatcgccggactggataacatcaacgtttttctgaaagcatgtgagcagattggtctgaaggaggcacagctttttcatcctggcgacctgcaggacctgagcaatcgggttacggtcaagcaggaagagaccgatcggagggtcaagaatgtcttgattaccctctattggctggggaggaaagcgcagtccaacccatattacaacggcccacacttaaacctgaaagcgttcgaaaacctgctgggccaggctcttacaaaggctttagaggacagctccttcttgaagagatctggcagagattcaggatacggtgatatatggtgtccagagagaggggaattccttgcccctccccgacatcataagagggaagattccttcgagtccctagacagtttgggttcgaggtctcttacttcttgttccagtgacataacattacgaggcggaagagagggcttcgaatcagatactgacagtgaattcacgttcaaaatgcaagattacaataaagatgacatgtcatataggcgcatcagcgcagtggagccaaagaccgcactaccttttaacaggttccttcctaacaagagccgccaacccagctatgttcctgcaccactaaggaaaaagaagcccgataaacatgaggacaatcgtagaagctgggcgagtcctgtttatacagaagccgatggtacattctcctccaatcaacgaagaatttgggggacaaacgttgaaaactggccaaccgtccagggaacttcgaagtctagttgctacctcgaggaggagaaggctaaaactaggagtatcccaaatatcgttaaggacgacctgtacgttcggaaactttctcccgtgatgcccaacccgggaaatgctttcgatcagttccttcccaagtgctggacacccgaggacgttaactggaaacggattaaaagagagacctataagccctggtataaggagtttcagggattctcgcaattcttgctgctccaggcccttcagacctattctgacgacatactctcgtcagaaactcacacaaaaattgacccgacgtctgggccacgtcttatcactaggcgaaagaatctgtcttacgcaccaggctaccggagagacgacctggaaatggccgctcttgaccctgatctggagaacgatgatttctttgtgaggaaaactggcgcattccatgctaatccatacgtcctccgggcatttgaagactttaggaagttttctgagcaagatgatagcgtggagagggacattatcttgcagtgcagggagggagagctggtgctgcctgacctagagaaggacgacatgattgttcgaagaattccggcacaaaaaaaagaagttcccctgagtggggcaccagatagataccaccccgtcccgttcccggagccttggacattgccacccgaaattcaagccaagttcctgtgcgttctggagaggacttgcccctctaaggagaaatcaaattcctgtagaattcttgtgcctagttaccgccagaagaaggatgacatgctgaccagaaaaattcaatcttggaagctgggcaccacagtcccacctatcagtttcacccctgggccatgtagcgaagccgaccttaagcggtgggaggctatccgcgaggcctctcggttgcgccataaaaagcggctaatggtcgaacgattgtttcagaaaatctacggtgaaaacggcagtaagtcaatgtccgatgtgtcagcggaggatgttcagaacctccgccaactgcgctatgaagagatgcagaagatcaagtcacaattgaaagagcaagatcagaaatggcaagatgaccttgcaaagtggaaggatagacgcaagtcctatacaagcgatcttcagaaaaaaaaagaggagagagaagaaatagagaaacaagcactggaaaaaagtaaacgttcctcaaagacattcaaggagatgttacaagatagggagagtcaaaaccagaaatctactgtgccaagccggagacgcatgtactcattcgatgacgttttggaagagggtaaaagacccccaaccatgacagtttccgaggcctcttaccaaagtgagcgtgttgaagagaaaggggctacctatccgtctgagattcccaaggaggacagcacaacttttgctaagagagaggaccgggtcacaacagagattcaactcccttcccagagccctgtcgaagaacaatcacccgcaagcttgagttcgctaagatctaggtccacacaaatggaaagcaccagagtctctgcatccttgcctaggtcatacaggaagactgatactgttcggctgacctccgtggtcactccccgacccttcgggtctcaaacccggggaattagttctcttcctcgaagttacaccatggacgacgcgtggaaatacaatggagatgtcgaagatattaaaagaaccccaaacaatgtggtgtcaactcccgctccaagcccggatgcttctcagctcgcaagttcactctctagccagaaagaggtagcagccactgaggaagacgtaaccagactcccaagcccaacatccccattctccagcctgagccaggaccaggctgctaccagcaaagctactctgagtagcacttctgggcttgacctgatgtcagagtcaggtgaaggagaaatcagcccgcagagggaagtgtcacgctcccaggatcaattctccgatatgagaattagcataaatcaaacgcccggtaaatctctggacttcggctttactattaaatgggatatacctggtatcttcgtcgcctcagtcgaagcgggatctcctgcagaattctcacagctgcaggtcgacgacgagatcatcgcaatcaacaatactaagtttagctacaacgacagcaaggagtgggaggaggctatggccaaagcccaggaaacaggtcacctggtgatggacgtcagacggtatggcaaagccggatcgcccgagacaaaatggatagacgctacctctggtatctacaactctgagaagtcaagtaatctatctgtgacaaccgactttagcgaaagcttacagagcagcaatattgaatctaaagagatcaatggcattcacgatgagtctaatgctttcgagtccaaggcatctgagtccatttccctgaagaacctaaaacgacggtctcagtttttcgagcaggggtcttctgattcagtagtccctgaccttccagtcccaaccatctcagctcctagccgctgggtgtgggatcaggaagaagagaggaagagacaggagaggtggcagaaggagcaagacaggctcttgcaagagaaataccaaagggagcaggagaaattaagggaagaatggcagagggcgaaacaggaagcagagcgagagaacagcaaatacctggatgaggagctgatggtattgtccagcaattcgatgtcactgactacacgcgagccctcccttgccacatgggaggccacctggtcagaagggtcaaagagctccgaccgcgaagggacgcgggctggcgaggaagagaggagacagccacaggaagaggtggtgcatgaagatcagggaaagaagccccaggaccagctagtcatcgaaagagaacggaagtgggaacagcagctccaggaagaacaagagcagaagcgcttacaggccgaggccgaagaacaaaagagacccgcagaggaacagaaaagacaggcagaaatagaacgggagacctccgtgcgcatctaccagtacagacggccagtagatagctacgacattcccaaaactgaagaggcttcatcaggattccttcccggagacagaaataaatctcgctccaccaccgagctggacgattactccacaaataaaaacgggaacaataaatatctggaccagatcggaaacatgacttccagccaaagaaggagcaaaaaggagcaggtgccatctggggctgaacttgaacgccaacaaatcctccaggaaatgcggaaaaggactcctctgcacaatgataattcttggatccgccagcggtccgcatccgtgaacaaagaacctgttagccttccaggaataatgcgcagaggcgagtcactggacaaccttgatagccctcgcagtaacagctggaggcaacccccttggctcaaccagccgacgggattttacgcaagctctagtgttcaagatttttctagaccgcctccacagctggtgtccacctccaaccgcgcttacatgcgcaatccctcctcgtcagtacctcctccctcggctggttccgtgaaaacgtcaactactggggtggccacgacacagtcacctactccccgatcccattcacccagcgcaagccagtccgggtctcagttgagaaatagcgtgctgcccgtgagcgtcacttccgaagccctcccacaggagctaaaaagcggatctgagactaccaactgcacagctacaacagccatcagtgacagcaatctagatggtcagcccccatgcgacgtatccctccataccaaggccctgctgcagatcgaagaggaggtggtcgctgctcacgttgacctgta

SEQ ID NO: 228689 - DNA, 4844 bp, synthetic construct
  misc_feature 1..4844: note = Description of Artificial Sequence: Synthetic coding sequence
  source 1..4844: mol_type = other DNA
atgaagaaaatcagaatatgccacattttcacattctacagctggatgagctatgacgtgctgttccagcggaccgagctgggcgcactggaaatttggcgtcagttgatctgcgctcatgtctgcatttgtgttgggtggctgtacttacgggatcgggtctgttcgaaaaaggacattatcttaaggacggaacagaacagcgggaggactatacttattaaggcggtaactgaaaagaatttcgagacaaaagactttcgggcttcccttgagaacggtgtgctcctgtgcgatctgattaacaagttaaaaccgggtgtgataaagaagatcaacaggctgtcgacccctatcgctgggctggacaatatcaacgtttttttgaaggcctgcgaacagattggcttgaaagaggctcagctctttcaccccggtgacctgcaggacttatctaaccgagtcaccgtgaaacaagaagagactgatcgacgggtcaagaatgttctcatcactctgtattggctcggcaggaaagctcagagcaatccctactataacggcccacacctgaacctcaaggcatttgagaacctgctcggacaggcccttaccaaagccctggaggactcgtcattccttaagagatcagggcgtgatagtggttacggggacatatggtgccccgaaaggggcgaattcctagccccacccagacatcacaagcgagaagatagctttgagtcattagattccctaggaagtcgatctcttaccagttgcagttccgatattacactgaggggcggtagggaagggttcgaatctgataccgatagtgagttcacatttaaaatgcaggattacaataaggacgacatgtcctatcggaggatctccgccgttgaacccaagaccgcgctccctttcaaccgattcctgccaaataagagcaggcagcccagctatgtgcctgcgccactcagaaagaagaaacctgacaagcatgaggataaccgtagatcgtgggcatcaccagtctacactgaagcagatggcacattttcctcaaatcagaggcgtatatggggaaccaatgtagagaactggcctaccgtgcagggtacgtccaagtcctcctgctacctggaggaggagaaggccaagacacggagtatacctaacatcgtgaaggacgacctgtacgtaagaaaactttcccctgttatgcctaaccctggaaatgctttcgaccaatttctaccaaagtgttggactccagaggatgtaaactggaaaaggataaagagggagacatacaaaccttggtacaaggagttccaaggcttcagtcagtttctactgctacaggccctgcagacgtattccgatgatatcctctctagcgaaacgcacactaaaattgaccccacaagcggccctcgactgatcacccgcagaaaaaacctgagctacgccccaggctaccggagagatgatctggagatggctgccctggaccccgacctggaaaatgacgacttctttgtgaggaagacaggagctttccacgccaacccctacgtcctccgcgcatttgaagatttccggaagttctctgagcaggacgatagcgtcgagagggatattattctgcagtgtcgtgagggcgaactggtcctgcccgatctcgagaaagatgacatgatcgtgagaaggattcctgctcaaaagaaagaagtccctctgtctggggctccagatcgctaccatcctgtccccttccccgagccctggaccctccctcctgagattcaggccaagtttctctgcgtcctagagaggacctgtccgtccaaggagaagtctaattcttgtagaattctagtgccaagctatcggcagaaaaaagacgatatgctgactcgcaaaatacaaagttggaaacttggcaccacagtgcctcccattagcttcaccccaggaccctgttcagaggcggacctgaagaggtgggaagctattcgggaagcaagcagactgcgccacaagaaaaggcttatggtcgagcgcctcttccaaaagatctatggcgaaaacgggagcaaatctatgtcagacgtgagcgccgaagacgtgcagaatctgcggcagctgagatacgaggaaatgcagaaaatcaagagtcaactgaaggaacaagaccaaaagtggcaggatgatctggccaaatggaaagatcgccgtaagtcttacacatccgacttacaaaagaagaaggaggagcgcgaggagatcgagaagcaggccttggagaaatcaaagcggagctctaaaacttttaaagagatgctgcaggatagggagagtcagaatcagaaatcaacagtcccctcaagacgaagaatgtacagcttcgatgatgtgctcgaagagggcaagagacccccaaccatgacagttagtgaggccagctatcagtctgagagggtggaagagaaaggagcaacctatccctccgagatccccaaggaggattcaaccactttcgcaaagagggaagacagggtgaccactgagattcagctgccctcacaatcccccgtagaagagcagagtccagctagccttagtagcttgcgatctagaagcacacaaatggagtccacacgagtgagcgcctccctgccgaggtcctatagaaagactgatacagtgcgcctgaccagcgtagtgaccccaaggcccttcggaagtcaaacacgtgggatttcatccttgccacgaagctataccatggacgatgcttggaagtacaacggcgacgtggaagacataaagcggacccctaataatgtggtgagcacacctgctccctcgccggacgccagccagttggctagctccctgtcttcgcagaaggaggtggctgctacggaggaggacgtaacgagattgccatcccccacaagtccattctcgagccttagccaggaccaagctgccaccagcaaggccacactgagttctacaagcgggctggacctgatgtccgagtcaggcgagggtgagatctccccccagcgagaagtctccaggtcgcaggatcaattctcagacatgcgtatctctataaaccaaacaccgggtaaatctctggattttgggtttaccatcaagtgggatatacccggtatctttgtggcttcggtagaggcagggtcgcccgcagaatttagccagctgcaggtggatgacgagattatcgccatcaacaataccaaattcagctataatgatagtaaggaatgggaggaagcaatggcaaaggcacaagagacgggccatctggttatggatgtgaggcggtatggtaaagccggatctcctgagactaagtggattgacgccacgagtgggatttataattccgaaaagagttccaatctatccgtgaccacagatttttccgaaagcctacagtcttctaacatagagagcaaagagattaacggcatccatgatgagtctaatgcgtttgaatcgaaggcaagcgagtccatcagcctgaagaatctgaagaggcgtagccagttctttgagcaggggagctctgacagcgtggtgcccgatctgcccgtacctactatttctgcaccttcccgctgggtgtgggaccaggaggaggaacggaagcgccaagagcggtggcagaaagaacaggatagacttctccaagaaaagtaccaacgcgagcaggaaaaactgcgggaggagtggcagcgcgctaaacaggaggcagaaagagagaatagcaaataccttgacgaagaactgatggtcctctccagcaattcaatgagcctaactacaagggagccgagcctcgcaacctgggaggccacttggtcagaggggtccaagtcctcagaccgagagggcacacgggcaggagaggaggaacgcagacaaccccaggaagaggtggtgcacgaggaccagggaaagaaacctcaggaccagctggtgattgaacgggagaggaagtgggagcaacaattgcaagaggaacaggaacaaaaaaggctgcaggctgaggccgaagaacagaaacgccctgcggaggaacagaagcgccaagccgagatagagcgggaaacgtccgttagaatctaccaatacagacggccagtagacagctatgacattcctaagactgaggaagctagttcaggatttctgccaggcgataggaataagagccgcagcaccacggaattggatgattattccacaaacaagaacggcaataataagtacctggaccaaatcggcaatatgacctcctcccagcggagatcaaagaaagaacaggtcccttcaggggcagagttagaacgacagcagatcttgcaggaaatgcggaagagaacccccctgcacaatgataactcttggattaggcagcgttccgcaagcgtaaataaggaacccgtgtctctacctggcattatgaggcgtggagaaagtctggacaacttggactcccccagatctaattcttggcggcagcccccatggcttaatcagcctacgggcttctacgcctcttcttccgtgcaggactttagtcgccctccacctcagctggtgtctacctcaaatagggcatacatgcgtaatccgtcaagctcagtgcccccacccagtgccggaagcgtgaaaacctctactacaggagtggccacaactcagagccctactccgaggagtcacagcccaagtgcgtctcagtctgggagtcagttgcgaaatagttggacagctaacaggcacgtgatgta

SEQ ID NO: 228690 - DNA, 4158 bp, synthetic construct
  misc_feature 1..4158: note = Description of Artificial Sequence: Synthetic coding sequence
  source 1..4158: mol_type = other DNA
atgcaggattacaataaggacgatatgtcttacaggagaatctccgctgttgagccaaagacagccctcccgtttaacagattcctgcctaacaaatccaggcagccctcatatgttcctgctcctctcagaaagaagaaaccagacaaacacgaagacaatcgcagaagttgggcctcccctgtttacaccgaggcagatggcacttttagctccaaccaacggagaatctggggcacgaacgtggaaaattggccaacagttcaaggcacttcaaaatccagttgctacctggaagaggaaaaagccaaaacacggagtattccgaacatcgtaaaagatgacttgtacgtaaggaaactgtcacctgtgatgccgaatccaggcaatgcctttgaccagtttctgcccaaatgttggactcccgaggacgtgaactggaagcgcatcaagcgcgagacctacaaaccctggtacaaggaatttcaggggttttcccagtttcttctgctacaggccctgcaaacttacagcgatgatattctatcatccgagacccacaccaaaattgaccctacctccggtccacgtttgatcacaaggcggaagaacctgagctatgcacctggctacagaagggacgacctggaaatggctgcactggacccggacctcgagaacgatgacttcttcgtgagaaaaacgggggcttttcacgccaatccgtacgtattacgggcatttgaagatttcaggaaattctcagaacaggacgactccgttgaacgtgatatcatccttcagtgtcgagagggcgagttagtgctgcccgacctggagaaagatgacatgatagtcagacgcattcccgcacagaaaaaggaggtgcctctgagtggtgcacccgataggtaccatcctgtgccgttccccgaaccctggaccttgcctcctgaaatccaagccaagttcctttgtgtcctggaaaggacttgcccaagcaaggagaaatcaaactcatgccggattttggtgccgtcttatagacagaagaaggatgatatgttgactcgcaagatacagtcttggaagttggggaccaccgtgccacccatttccttcactcctggcccttgttccgaggccgacctcaagagatgggaggccatcagggaggcatctagactccggcacaaaaagagactgatggtggagaggctcttccagaaaatttacggtgaaaatggcagcaaatctatgagtgacgtaagcgctgaggacgttcagaacctgcggcaactcaggtatgaggagatgcagaaaatcaagagtcagctgaaggaacaggatcaaaagtggcaagatgatctggctaagtggaaggatcggaggaaaagttatacctccgatcttcagaaaaagaaggaagaacgcgaggagattgaaaagcaggctctcgaaaaaagcaagcgtagctccaaaacattcaaagaaatgctgcaggacagagagtctcaaaaccaaaagtccacagtgcctagccggcgacggatgtactctttcgacgatgttctggaggaaggcaagcggcctcccactatgaccgtgagtgaagcctcgtaccagagcgagcgggtggaggagaagggagccacctacccttccgagatccccaaagaggattccaccacgttcgcaaaaagggaggacagagtgacaaccgagattcaattgcctagccaaagcccggttgaggagcagtccccagcaagccttagtagcctgagaagcaggtctacccagatggagagcacaagggtgagcgcatctctccctagatcctaccgaaagacagacactgtcaggcttaccagcgtcgtcaccccaagacccttcggtagtcagacccgcggaattagctcactgccaaggtcatataccatggacgacgcttggaaatacaacggggatgtggaggacataaaacgaactcccaacaatgttgtttctacccctgcgccaagtcctgatgcatcccagttagccagcagcctctccagccagaaggaggtcgcagcaacagaggaggacgtaacacgattgcctagtccgacatcgccctttagctccctaagccaagaccaggctgctacctccaaagccaccttgtcatctacctccggcctcgatctgatgagcgaatcgggggaaggagaaatttcccctcagagggaagtgtcaaggtctcaggaccaattcagcgacatgcggatatccatcaaccagacccccggtaagtctctagattttggttttactattaagtgggacatccctggcatctttgtggcgtcagtggaggcaggctcaccagctgagttttctcagttgcaggtagacgatgagatcatagctatcaataacacaaaatttagttataatgacagcaaagaatgggaggaggccatggcaaaagctcaggaaacgggacacctagtgatggacgtccgaaggtatggcaaggcagggtcaccagagacaaagtggatagacgctacgtcagggatctacaattctgagaagagcagcaaccttagcgtcaccacggacttctcagaatccctgcagtcatcaaacatagagtctaaggagattaacggcattcatgatgaaagtaacgcctttgagtcaaaagcgtccgaaagtatttcccttaaaaatctgaagaggcgttcccagttctttgaacaaggttctagtgattcggtggtaccggacttgccagtccctaccatctccgcaccttcccggtgggtatgggatcaggaggaggagcggaagagacaggaacgctggcagaaagagcaagacaggctgctgcaggaaaaataccagcgtgaacaggagaagctgagggaggaatggcagagagcaaaacaggaagctgagcgggaaaacagtaagtatctggacgaagagctgatggtgttgtcctctaactccatgagcctcactaccagggagcctagcctggcaacctgggaggctacctggagcgagggctctaaatcctctgatagagaaggcacaagggctggagaagaagaacggaggcagccccaggaagaagtagttcacgaggaccaaggcaagaaaccccaggaccagctggtgattgagagagaacgcaagtgggaacaacagctgcaggaggaacaggaacagaaaaggctccaggccgaggcagaagagcagaagagacccgctgaagaacagaagcgccaagcagaaatcgagagagaaacctcagtcaggatttaccagtaccggaggccagtggattcttatgacattcctaaaaccgaggaggcctctagtgggttccttcctggagatagaaacaagtctaggagtaccacagaacttgacgactattcaactaataagaacggaaacaataaatacttggatcagatcggtaacatgaccagctcacaacgaaggtccaagaaggagcaagtgccttctggagctgagctcgagcggcagcagatcttgcaagaaatgcgaaagagaactcctctgcacaatgataactcatggattcgacagcggtcagccagtgtgaataaggagccagtaagcctgcccggaattatgcgcagaggtgagtctctggataatctggactcacccagaagcaacagctggcgccaaccaccttggttgaaccagccaacgggattctacgccagcagttcagttcaggactttagccgcccacctcctcagctggtgtcaacaagcaatcgagcatatatgcgcaatcccagcagctctgtgccaccgccttctgcaggtagtgtaaagacatcaacaacaggtgtcgcaactacccagtctccgacaccacggtcacattctccgagtgcatctcaaagtggctctcagctacgcaattctgtgctgcccgtttctgtcactagtgaggctctgccgcaggagcttaagtccggcagtgaaaccaccaactgtacagccactacggcaatatcggactcaaacctggatggacagcctccctgcgatgtctcactgcacactaaagccctgcttcaaattgaggaggaggttgtggcagcccatgtcgatctctag

SEQ ID NO: 228691 - DNA, 2280 bp, synthetic construct
  misc_feature 1..2280: note = Description of Artificial Sequence: Synthetic coding sequence
  source 1..2280: mol_type = other DNA
atggaaagctccccattcaacagaaggcagtggacctcactaagtctgcgtgtgactgctaaggagctctccctggtgaacaagaataagagcagtgccatcgtcgaaatcttctcgaagtatcagaaagctgctgaagagactaatatggaaaaaaagaggagcaatactgagaacttgagccaacacttccggaaggggactctgacagtgctgaagaagaaatgggaaaatccaggcctcggggcagagtctcacacagatagcttgcgtaactccagcacagaaattcgccacagggccgaccaccctcccgcagaggtgactagtcacgccgctagcggggctaaagccgatcaggaggaacagatccatcccagatcacgtctgcgatcacccccagaggccctggtgcagggaaggtatccacacatcaaggacggggaggacctgaaagaccactcaactgagagtaaaaaaatggagaattgcctcggtgagtccagacacgaggtggaaaaatctgagatcagcgagaacaccgatgcttccggcaagattgagaagtataatgtacccttgaacaggcttaaaatgatgttcgaaaaaggagagccgacacagaccaagatcctccgtgctcaaagccgatcagcctctggcaggaagatcagtgagaatagctactccctggacgatctcgaaattggcccaggccagctgtctagctcgactttcgacagcgaaaaaaacgaaagccgccgaaacctggaactgcccaggttgtcagagaccagcattaaagaccgcatggctaagtatcaggctgccgtaagtaagcagagcagctctactaactatacaaacgaactgaaggcctccgggggtgagatcaaaatccataaaatggagcagaaggagaatgttccccctggacccgaggtttgtataacacatcaagagggggagaagatttctgccaatgaaaactcactcgccgtacgatccacccctgccgaggatgacagcagagattcccaagttaaaagtgaggtacaacagcccgtgcatcctaaaccattaagtccagattctagagcctcgtcactaagcgaatccagtccacctaaggcaatgaagaaatttcaggctccagccagagagacatgcgtggaatgccagaagactgtgtatcccatggaaagacttctggccaaccagcaagtgttccacatttcctgtttcaggtgttcctattgtaataacaagctttccctgggaacttacgcttcactgcacgggcgaatctactgcaagccacacttcaatcagttatttaagagtaaaggcaattacgacgaaggattcgggcacagaccccataaagatctgtgggcaagtaaaaacgaaaacgaagaaattctggagcgtccagctcagctggccaatgctagagaaactccgcattcccccggagtggaagatgcaccaatcgcgaaggtgggtgtgttggctgcctctatggaagccaaagctagcagccagcaggagaaggaagacaaacccgctgaaacaaagaaactccggattgcttggcccccacccaccgagctggggtcaagcgggagtgccttagaggaggggataaagatgagcaaaccaaagtggccgccagaagatgagatctcgaagccagaagtgccggaagatgttgacttagacctgaaaaagctgcggcgaagcagttctctgaaggaacgatctcgaccatttacagttgcagcctccttccaaagtaccagtgttaagagtcctaaaaccgtgagtcccccaattcgcaagggttggtcaatgtccgaacagtccgaagaaagtgtcggcggacgagtagccgagcgaaagcaggttgagaatgctaaagcatctaaaaaaaacggcaacgtgggcaagacaacctggcagaacaaggaatccaagggcgaaacaggtaaacggagtaaagaggggcattcactggaaatggagaatgagaatctggtggagaacggggcagacagcgatgaggatgataattcttttctaaagcaacagtccccacaggaaccgaagtcgctgaactggtcatcatttgtcgataatacttttgccgaggaatttaccacacaaaaccagaaaagtcaagacgttgaattatgggaaggtgaggtggtaaaggagctctccgttgaggaacagatcaagcgtaaccgttattacgatgaagatgaagacgaggagtag

SEQ ID NO: 228692 - DNA, 2283 bp, synthetic construct
  misc_feature 1..2283: note = Description of Artificial Sequence: Synthetic coding sequence
  source 1..2283: mol_type = other DNA
atggaaagcagcccattcaatcgaagacagtggacgagcttaagtctccgggtaacagccaaggaactcagtctcgtgaacaagaataagtcctcagcaattgtcgaaattttttcgaaataccagaaagccgctgaggaaaccaatatggagaaaaaacgctccaacactgagaacctgtcccagcatttccggaaagggacactaacagtgttgaaaaaaaagtgggagaatccaggcctgggggctgagtcgcacacagactctctgcgaaacagttcaacagaaatccgtcatagggctgatcatccgccagccgaggtcacgagccacgccgctagcggagctaaagcagatcaggaggaacagattcacccaagatcccgcctcagatcaccacctgaggcactggtacaggggaggtatccccacatcaaggatggagaggatctgaaggaccattcaactgaaagcaaaaaaatggagaattgcttgggcgagtctcgacacgaggtcgagaaaagcgagatttcagaaaacactgacgcatcaggaaagatcgagaaatataacgtgcccctgaatcggttgaagatgatgttcgaaaaaggggaaccaacccagaccaaaatccttcgggctcaatcacgctccgctagcggcaggaagatctcagagaacagctacagccttgatgaccttgaaatcggcccagggcagctgagcagcagtacgttcgattcagagaaaaatgagagccgaaggaatctcgagttacccagactgtctgagacatcaattaaagacaggatggcgaagtaccaggcggcagtgtccaagcaaagttcaagtactaactacacgaatgaactcaaggcatcaggaggtgagatcaagattcacaagatggaacagaaggaaaatgtgcctccaggaccagaggtctgcattacacaccaggaaggagaaaagatcagtgccaacgaaaactccctggccgtcagaagtactccagccgaggatgactctccaggcgacagccaggtgaagtccgaggtgcagcaacccgttcaccctaaacccctgagccccgatagcagggcctcgtcactgtccgagagctcaccacctaaagccatgaagaagttccaggcacctgcccgtgagacttgcgtggagtgccagaagacagtttaccctatggagcggctgctggccaatcagcaggtgttccacataagttgttttaggtgcagctactgcaataacaaactgtctcttggcacctatgctagcttgcatgggaggatttactgcaaaccacattttaaccagctcttcaagagcaaggggaactacgacgagggatttggacatcgccctcataaggacctctgggcctccaagaacgagaacgaggagatccttgagagaccagcccagctggcgaatgcgcgagaaactccacatagcccaggggtggaggacgccccaatcgctaaagtgggcgtgctcgcggcaagcatggaggccaaagcttcgagtcagcaggaaaaggaggacaaacctgctgaaacaaaaaagctgcggatcgcttggccacccccaacagaactgggctcttcaggatcggcgttggaggagggcattaaaatgtctaagcctaaatggccacctgaggatgagattagtaaacccgaggtgcctgaagatgtagatctggacttaaagaaactacgcagatcgagtagtctcaaggaacgaagccggccattcacagtcgctgcatcctttcagtctacaagcgttaagtccccaaagaccgtttcaccacctatccgtaagggctggtcaatgtcagagcaatcagaggagagcgtgggtggacgcgtggcagaacgcaaacaagtcgagaacgcaaaggcgtctaagaaaaatggcaacgttggtaaaactacctggcagaacaaggagtcgaagggagagactggcaaacggagcaaggaaggtcactcattggaaatggagaatgagaatctcgtcgaaaacggagcggatagcgacgaggacgataattcttttctgaaacagcagagcccccaggaaccaaaaagtctgaattggtcctcctttgtcgataacacgtttgcagaggagtttactactcagaaccagaagtctcaggatgtggagctttgggagggtgaagtagtgaaagagctgtcagtggaagagcaaattaaaagaaaccggtattacgacgaggacgaagatgaggagtag

SEQ ID NO: 228693 - DNA, 2037 bp, synthetic construct
  misc_feature 1..2037: note = Description of Artificial Sequence: Synthetic coding sequence
  source 1..2037: mol_type = other DNA
atgtggcaaggatgtaactgcagccaattgagtgaaactgccgtggaccaggaacaactgggagtgctcacttttatacttcagaggaccacttgtttaaatgtgtccgctgatcaggaggaacagatacatccccgttcccgccttaggtctccccctgaggcccttgtgcaggggagatatccccatatcaaagacggtgaagatttaaaggatcatagtacagagtccaagaaaatggaaaactgcctgggggagtcccgccatgaagtcgagaaatccgaaatcagcgaaaacacagacgcgagtggtaagatcgagaagtacaacgtacctctcaacagactcaaaatgatgttcgaaaaaggagagcccacccaaactaagatcttaagagcacagtctaggtcagcgagcggtcggaaaataagcgaaaactcgtactctctcgacgatctggaaatcggcccaggccaacttagtagctcaacattcgactccgaaaaaaacgagagccgtcgaaatctggagctgcctagacttagcgagactagcatcaaggacagaatggccaagtaccaggctgccgtatcaaaacaaagcagtagtacaaattacacaaacgagttaaaggccagtgggggtgaaataaagattcacaagatggaacagaaggaaaatgttccaccgggtcccgaagtgtgcattacacatcaagaaggagagaagatctctgcaaatgaaaattcattggctgtacggtctacacccgcagaagatgactctagagacagtcaggttaaaagcgaggtccagcaacccgtgcaccctaagccactttcccctgattctcgcgcttcgtccctgagtgagagctcccccccaaaggccatgaagaagttccaggcgcctgctcgagaaacctgcgttgagtgccagaaaacagtctacccaatggaaaggctgctggctaatcagcaggtgtttcacatttcctgcttccgttgtagttattgtaacaataaactgtctcttggaacctatgcctcccttcatggtcgtatctactgcaagccgcacttcaatcagttgttcaagagtaaagggaactatgatgagggatttggccatcgtccacacaaagacctttgggccagcaaaaatgagaacgaagagatcctcgagcgccctgcccagctggctaatgccagggagaccccccatagccccggtgttgaagatgctcctatcgctaaagtcggcgtgctggccgctagcatggaggctaaggccagttcgcagcaggaaaaggaggataagcccgcagagactaaaaagcttaggatcgcttggcctccgccaacagaactgggtagctccggctctgcacttgaggagggcataaaaatgtccaagccaaagtggcccccagaggatgaaataagcaaacccgaggtacctgaagatgtggacctggatctcaaaaagttacgcagatccagcagcctgaaggagcgctcacgtccctttactgtggccgcaagcttccagtcaacatctgtgaaatcccctaagactgtatcgcccccaatccgtaaggggtggagcatgtcagaacagtctgaagaaagtgtcggaggtagggtggctgaacgtaaacaggtcgaaaacgccaaggcctccaaaaagaatggcaacgtaggtaaaactacctggcagaataaagaatccaagggtgagacaggcaagcgctctaaagaggggcacagtctcgaaatggagaacgagaatctggtggaaaacggagccgacagtgatgaagacgataactcattcctcaagcagcaatctcctcaggagcctaagtctttaaactggtcatccttcgtcgacaataccttcgcggaagagttcacgactcaaaaccagaagtcccaggatgtcgagctgtgggagggcgaagtggtcaaggagctgtcagtggaggaacagatcaaacggaaccgctattacgatgaagacgaggacgaggagtag

SEQ ID NO: 228694 - DNA, 1374 bp, synthetic construct
  misc_feature 1..1374: note = Description of Artificial Sequence: Synthetic coding sequence
  source 1..1374: mol_type = other DNA
atggagcaaaaagagaacgtaccaccaggcccagaggtgtgcataactcaccaggagggggaaaagatcagtgccaacgaaaactcgcttgctgtacgttccacgccagccgaagacgactccagggactcacaggttaaaagcgaagttcagcaaccagtccacccaaagccgctgagccccgactctagagcatcttctctgagtgaaagctctccaccaaaggctatgaagaagttccaagccccagctcgagaaacatgcgtggaatgccagaaaaccgtgtaccccatggagaggcttctggccaaccagcaggtgtttcacatctcctgtttcagatgcagttactgtaacaataagctcagcttagggacctacgctagcctgcacgggaggatctactgcaaaccccacttcaaccagctgtttaagagcaaagggaactacgacgaggggttcgggcaccggccacacaaggacttatgggcatcaaaaaatgaaaacgaagagatcctagagcgcccagcccagcttgccaacgctcgcgagacacctcatagccccggtgtggaggatgcacccatagctaaggtcggagtgcttgcggcatcaatggaggctaaggccagttcccagcaggagaaagaggataagcctgccgaaactaagaagctgcgaattgcctggcctccgcctacggaactgggctcgagcggctccgcccttgaagagggaattaaaatgtctaagccaaaatggccgccagaagacgagatctccaaacccgaagtacctgaagacgtggatttagacctcaaaaaactgcgcaggagttctagcttgaaagaacggtctaggcctttcacagtggctgcctccttccaatctaccagtgtaaagagccccaagaccgtaagcccccctatccggaaaggatggtctatgtccgaacaaagtgaggagagtgtcgggggacgagtcgcagaaagaaagcaggtcgaaaacgcaaaggctagtaaaaagaatggcaacgttggcaagacgacttggcagaataaggagagcaagggggaaaccggtaagagatccaaggagggccactctctggaaatggagaatgagaatcttgtggagaacggcgcagattccgatgaggatgacaatagtttcctaaagcaacagtccccgcaagagcccaaatctttgaactggtcatccttcgtcgacaatacctttgctgaggagttcacgacgcagaatcaaaaatcccaggacgtggaattatgggaaggcgaagtggtgaaggaattaagcgtggaggagcagattaagagaaatcgctattatgatgaggatgaagacgaggaatag

SEQ ID NO: 228695 - DNA, 336 bp, synthetic construct
  misc_feature 1..336: note = Description of Artificial Sequence: Synthetic coding sequence
  source 1..336: mol_type = other DNA
atggaaagcagtcctttcaaccgcaggcaatggacctctctcagcttgcgtgtgacagccaaggaattatccttagttaacaaaaacaaaagctcagccattgtggagatcttctcaaagtatcagaaagccgcagaagaaaccaacatggagaagaaaaggtcaaatactgaaaacctgtcgcagcactttcgcaaagggacccttactgtactgaaaaaaaaatgggagaacccaggtcttggtgctgaaagccacaccgattcactacggaatagcagcaccgaaatccggcaccgcgcagaccaccctccggcagaggtgaccagccactag

SEQ ID NO: 228696 - DNA, 393 bp, synthetic construct
  misc_feature 1..393: note = Description of Artificial Sequence: Synthetic coding sequence
  source 1..393: mol_type = other DNA
atggaatcctccccttttaaccggaggcagtggacctcactctcactcagggtcaccgctaaagagctctcattagtgaataaaaataaatcaagcgccatcgttgagatcttcagcaagtaccaaaaggcagcggaagaaactaacatggagaaaaaaagatctaacactgagaacctttcgcagcattttcgcaaggggactctgacggtcctgaaaaaaaagtgggagaacccgggactgggggcagagagccacactgatagcttacgcaatagttcaacagaaattcggcatcgcgctgaccaccccccagcagaagtgacaagtcacgccgcatctggcgctaaagcggaccaggaagagcaaatccatccccgttcacgactttag

SEQ ID NO: 228697 - DNA, 1371 bp, synthetic construct
  misc_feature 1..1371: note = Description of Artificial Sequence: Synthetic coding sequence
  source 1..1371: mol_type = other DNA
atggaacagaaagaaaatgttccgccaggacccgaagtatgtataacccaccaggagggcgaaaagattagcgctaacgaaaatagtctggcagttcgttccacccctgctgaggatgactcacgcgactctcaggttaagtccgaagtgcaacagccagtccatcctaaaccactgagccctgacagcagggcctcttctctgtccgagtcaagcccacctaaggcaatgaaatttcaggccccagcaagagagacttgtgtcgaatgccagaaaactgtgtaccccatggagaggttgctggccaaccagcaggtgtttcatattagttgcttcagatgctcttattgcaacaacaagctgagcctgggcacatacgcctcattgcatggacggatctactgcaagcctcactttaaccagttgttcaaaagcaaaggaaattacgatgaaggctttggacatcggccacataaggacctgtgggcttcgaaaaacgaaaatgaggagattttggagagacccgcacagctggccaatgccagagagactccacactctcccggagttgaggatgccccaatcgccaaggtgggtgtgctggccgcatccatggaggcaaaggcatcttctcagcaggagaaagaggataaacctgctgagaccaagaaactgaggatcgcctggccccctcccacagagcttgggagcagcgggagcgccctggaggaaggcatcaagatgtcgaagccaaaatggccccctgaagatgagatatcaaaaccagaagtcccagaggacgtggatctagacctgaagaaactgcgaagatccagctcactcaaagagagatcacgaccattcaccgtggctgcaagctttcagtcaacaagcgtgaagtctcctaagactgtgtcaccacccattcgaaagggttggagtatgagcgaacagtccgaagaatctgtcggtggcagagtggccgagcgtaaacaggttgagaacgccaaagcctcaaagaagaacggtaacgtcggtaaaacgacttggcagaacaaagaaagcaagggcgagacaggtaaacgctcaaaagaaggccactcccttgagatggaaaacgaaaatctagtcgagaacggggcagactctgatgaggacgacaacagctttcttaagcaacagagtccacaggagcccaaatcccttaattggagtagttttgtggataacacattcgccgaagagtttaccacccagaatcagaagtcacaggacgtggaactgtgggaaggcgaagtcgttaaagagctttctgtggaggagcagattaaaaggaatagatactacgacgaggacgaagatgaggagtag

SEQ ID NO: 228698 - DNA, 1803 bp, synthetic construct
  misc_feature 1..1803: note = Description of Artificial Sequence: Synthetic coding sequence
  source 1..1803: mol_type = other DNA
atggagaactgcctcggagaaagccggcatgaggtcgagaagtcggagatatccgagaatacagatgcaagcgggaaaatagagaaatacaatgtccccctcaacaggctgaagatgatgtttgaaaaaggggaacccacgcagacaaaaatccttcgcgcacagtctcgaagtgccagcggacgcaaaatcagcgagaacagctactcactcgatgaccttgagatcggcccagggcaactgagttcgtccacatttgacagcgagaagaacgagtctcggaggaaccttgaactcccccgactgtcagagaccagtattaaagaccgtatggctaagtaccaggccgctgtgagcaaacagagcagctccacaaactataccaatgagctcaaagcctcggggggagagattaaaatccacaaaatggagcagaaggagaatgtgccacccggtcctgaagtgtgcattacccaccaggagggtgaaaaaatttcagctaacgaaaactccctggccgtccggtccacacccgctgaggatgacagtccgggagactcacaagtgaaaagcgaagtccagcagcctgtgcatcccaagcccctcagtcccgacagtcgggcaagtagtctatctgaatcaagcccacctaaggccatgaagaaatttcaggccccagcacgagagacatgcgtggagtgccagaagacagtgtaccccatggaaagactcctagccaatcagcaggtcttccatatcagctgctttcgctgcagctactgtaataataaattatccctgggcacgtacgcttccttacacgggaggatttattgcaagcctcactttaatcagttgttcaaatccaaagggaattacgacgagggctttggccaccgccctcataaagacctctgggccagtaaaaacgaaaacgaggagatccttgaacgtcccgctcagctggcgaacgccagggagactcctcactcccccggtgtcgaagacgccccaattgccaaagtgggggtgctggctgcgtccatggaagccaaagcttcttcgcagcaagagaaagaagataagcccgcagagactaagaagctgcgcatagcctggcctccccctactgagctgggttcatccggctctgccctcgaggagggcatcaaaatgtctaaacccaagtggcctcctgaggacgagattagcaaaccggaagttcccgaagacgtagatcttgacttgaaaaaactacgcagaagttcctccttgaaggagagatctagacctttcacagtagccgcatccttccagagcacttcagtaaaatcacccaagacagtgtctccaccaattcgtaagggatggtctatgagcgagcagtctgaggagtccgtgggaggcagggttgccgaacgaaagcaggtggaaaatgccaaagcctcaaagaagaatgggaacgtgggtaagaccacatggcagaataaagaatcgaaaggagaaaccggcaaaagaagcaaggaaggacatagtctggaaatggagaacgaaaatctcgtcgagaacggagccgacagcgacgaagacgacaactctttcctgaaacagcagtctccccaagagcccaagtctttgaattggagctcctttgttgataatacctttgccgaggagttcacaacacagaatcagaaatcccaggatgtggagctgtgggagggtgaggtggtgaaagagctgagcgtggaggagcaaattaagcgtaatcggtattacgacgaggacgaggacgaagaatag

SEQ ID NO: 228699 - DNA, 1800 bp, synthetic construct
  misc_feature 1..1800: note = Description of Artificial Sequence: Synthetic coding sequence
  source 1..1800: mol_type = other DNA
atggagaactgccttggggaatcccgtcacgaggtggaaaagtctgaaatctccgaaaatacagacgcctcagggaagattgagaagtataatgtgccgctgaacaggcttaagatgatgtttgaaaaaggtgagccaacacagacaaagatcttgagagcccaaagtcggtcagcctccggcaggaagatctcagagaattcctatagcttggacgacctggaaattgggccaggccaactgagttcttccacctttgacagtgagaaaaatgaatcccggcgtaatctcgaactacctcgcctctctgaaacttcaattaaagatcgcatggccaaataccaggcagctgtttccaaacagtccagcagcacaaactacacgaacgagctcaaggcgagcggtggcgagattaagatacacaagatggagcagaaagagaatgtcccccctggccctgaggtttgcatcacacaccaggagggcgagaagatctcagctaatgagaactctctggcagtcaggagcacccccgctgaggatgacagccgggactcccaggttaaatcagaagtccaacagccagtgcaccccaagccactgagtcctgacagtagagcgtcaagcctgtctgaatccagcccccctaaggctatgaagaaattccaggctccggcaagggaaacctgcgtcgagtgtcagaaaacggtgtaccctatggagcggttacttgctaatcagcaggtttttcacatatcgtgttttagatgtagttattgtaacaacaaactgtcactggggacttacgctagcctgcacggcaggatttattgcaagccacattttaaccagctgttcaaatccaaggggaattacgacgagggttttggacatcgaccacacaaagacctctgggcctctaaaaacgaaaacgaagagatcttggaaaggcctgcccaactcgccaacgcccgagagactcctcactctcccggtgtggaagatgctcccattgctaaggtcggcgtgttggcagcttccatggaggcaaaagccagctcacaacaggagaaggaggacaagcctgccgaaacgaaaaagctcaggattgcctggcctccgcctaccgagctgggaagcagcggcagtgcgctggaggagggaattaaaatgagcaagcccaagtggcctccagaagacgaaatctctaaacccgaagtgcccgaggatgtggatttagacctgaagaagctgaggcgaagctcatctctgaaggagcgctctagaccatttacagtggccgcaagctttcagagcaccagtgtgaaatccccgaaaacggtgtcacctcccatcaggaagggatggtcaatgagtgagcagagcgaggaatcggtcggcggtcgcgtggcggaaaggaaacaggtggagaatgcaaaggcatctaaaaaaaatggtaacgtcggcaagactacctggcagaataaagagtctaagggtgagactggcaagcggagtaaagaagggcacagtctggagatggagaatgagaacctcgtagagaatggggcagattccgatgaagacgataattcgtttctgaaacaacagagccctcaggaaccaaaatctctaaactggtcctcgtttgtcgataacaccttcgctgaggaattcaccacccaaaatcagaagtcgcaggacgttgagctctgggagggagaggtggtgaaagaactgtctgtcgaggagcagatcaagagaaatcggtattacgatgaagatgaggatgaggaatag

SEQ ID NO: 228700 - DNA, 1128 bp, synthetic construct
  misc_feature 1..1128: note = Description of Artificial Sequence: Synthetic coding sequence
  source 1..1128: mol_type = other DNA
atgctggaccgcgacgttggtcccacccccatgtatcctcccacctatctggaacccggtatagggaggcacaccccttacgggaatcagaccgattatcggatcttcgagctgaataagaggctgcaaaattggacggaggagtgtgataatctctggtgggacgccttcactacagagttcttcgaagacgatgcaatgctcacaatcaccttttgccttgaggatggtcctaaaaggtacaccattggtcgtactcttataccacgttacttccggtctattttcgagggcggagctaccgaactgtactacgtgctcaagcatcccaaagaggcctttcattctaacttcgtctcactagattgcgatcagggttcaatggtcacccagcacggtaagccgatgtttacacaagtttgcgttgaagggaggctgtatctggagttcatgttcgatgacatgatgaggatcaagacttggcacttttctattagacaacaccgggagctaattccccgatcaattctggctatgcacgctcaagacccacagatgttggaccagctgagtaagaatataacgcgttgcggtctgagcaactcaaccctaaactacttaagactgtgtgtcattttggagccaatgcaggaactaatgagtaggcataagacttatagcctgtcccctagggattgtctgaaaacttgtctgtttcagaagtggcagagaatggtcgcacctccagcagaacccactcggcaacagccctctaagcgacgaaaacgcaagatgagcggcggaagcacaatgagctctgggggtggcaataccaataattcaaattctaaaaaaaagtctcctgccagcacctttgccctttcctcccaggtgcctgacgtaatggtggtcggtgaaccaaccctcatggggggagagttcggggatgaggacgaaaggctcatcacccgcttggagaatactcagttcgatgctgcaaatggaatcgacgatgaggacagcttcaacaattcaccagccctcggcgctaacagtccctggaactcaaagccacctagctcacaagaatctaagagcgaaaatcccacatcccaggcgtcacagtag

SEQ ID NO: 228701 - DNA, 1236 bp, synthetic construct
  misc_feature 1..1236: note = Description of Artificial Sequence: Synthetic coding sequence
  source 1..1236: mol_type = other DNA
atgtcagtcggttgcgcttgtccgggatgcagctccaagtcctttaaactgtattctccgaaggaacccccaaatggtaacgcattccctccctttcaccctggaaccatgctggatcgcgatgtcggccctacaccaatgtaccctcctacgtatctggaaccagggatcggcagacacacaccttacggaaaccagacggactaccgcatcttcgagttaaacaaaaggctgcagaattggaccgaggagtgcgacaatctatggtgggatgctttcaccacagaattctttgaagacgacgcgatgctgactattacattttgcctggaggacggtccgaagaggtatactattggacgaactctgattcccaggtatttcagatccatcttcgaaggtggagcgacggagctgtattacgtgttaaaacaccccaaggaggcgtttcattcaaactttgtatctctcgactgtgatcagggcagcatggtcacccagcatggcaagccaatgttcacccaagtgtgtgtagagggacggctgtatctggagttcatgttcgacgatatgatgaggataaaaacatggcacttttctatcagacagcacagagaattgattccgcgatctatcctcgccatgcacgcccaggacccacagatgctggatcagctatcaaagaatataactagatgcggtctatcaaacagcacgctcaactatcttcggctgtgcgtgatcctcgagccaatgcaggagctgatgagcagacataaaacatattctctcagtccgagagactgcttaaagacctgtttgttccagaagtggcaacgaatggtggcaccccctgccgaacccacgaggcagcaaccaagcaagcgcagaaagagaaaaatgagtggcggttccaccatgagtagcgggggaggcaatactaacaattcaaatagcaagaaaaagagccctgcatcaacatttgccctgagttcacaggttccagacgtcatggtcgtaggtgagcctacgttgatgggcggagaatttggagatgaagacgaacgactgattacccggttggaaaacacccagtttgatgccgctaacggaatcgacgacgaggatagcttcaataactctccagcgctgggtgccaacagtccgtggaatagtaaacccccatctagtcaggaaagcaagtcagagaaccctactagtcaagcttcacagtag

SEQ ID NO: 228702 - DNA, 1122 bp, synthetic construct
  misc_feature 1..1122: note = Description of Artificial Sequence: Synthetic coding sequence
  source 1..1122: mol_type = other DNA
atgtcttcgacaccacacgaccccttctacagctctcctttcgggcctttctatcgtcgccatactccctacatggtgcaacccgagtatcgtatatacgaaatgaacaaacggctccagagcaggactgaggacagcgataacttgtggtgggacgccttcgctacggagttttttgaggacgacgctaccctcactctgtccttttgcttggaagacgggcctaaaaggtataccataggcaggacccttattccaagatatttctccacagttttcgaagggggtgtgaccgacctgtactatatccttaaacactctaaggagagttatcacaattcctcaatcaccgtagactgcgaccagtgtactatggtgacacagcatggcaagccaatgttcacgaaggtgtgtacagaggggagactgatcctcgaatttacatttgatgatctaatgcggattaagacatggcacttcaccatcagacagtatcgcgaattagttccccgatcaatcctggcaatgcacgcacaagacccacaggtcctcgatcagttaagcaagaacatcactagaatggggctgactaattttacacttaactacctccgcctgtgtgtcattctggaaccgatgcaagaactcatgtctaggcacaagacctataacttatcgcctagagattgcctaaaaacttgtcttttccaaaagtggcagagaatggtggcacctccagctgagcctactaggcagccaaccaccaaacggaggaagagaaaaaactccacaagctccactagcaattccagtgctggtaataacgcaaactcaaccggtagtaaaaaaaagaccacagctgcaaacctctccctgtcatctcaggtacctgacgtcatggtggttggagaacctaccctcatgggaggtgaattcggggatgaggatgagcggctgattacccggctcgaaaatacacagtatgatgctgccaacggaatggatgacgaggaggatttcaacaacagccctgcactcggaaataacagcccatggaacagcaagcctccagcaacgcaggaaactaaaagcgagaacccacctccacaggcatcacagtag

SEQ ID NO: 228703 - DNA, 996 bp, synthetic construct
  misc_feature 1..996: note = Description of Artificial Sequence: Synthetic coding sequence
  source 1..996: mol_type = other DNA
atgagctccacaccgcacgatcccttttactccagtccattcggtccgttttacaggcgccacacgccatacatggtccagccagagtaccgcatctacgagatgaataagcggctgcaatctcgaactgaggacagcgataatctgtggtgggacgcatttgcaaccgagtttttcgaggatgacgccaccttgacactgagcttttgcctggaagatggccctaaacgatacacaatagggagaactctgatccctcggtatttttccaccgtttttgaagggggagttactgatctctactacattctgaagcattctaaggagagttaccataattcatctatcacagtggactgcgatcaatgcactatggttactcagcatggaaagccaatgtttacgaaggtatgcacagaggggaggttaatactggagttcacatttgacgatttgatgcggattaagacctggcattttaccatccggcaatatcgcgagctggttcccagatcgatcctggctatgcacgcccaagacccgcaggttctcgaccagctgtccaaaaacattactcgtatgggtctgactaattttactctaaattacttaaggctgtgtgtcattctcgagcctatgcaggagctgatgtcaaggcacaagacttacaatctatcccccagagactgtcttaaaacttgtctgttccagaagtggcagcggatggttgctccccctgccgaaccaacccgtcagccaactacgaagaggagaaagagaaagaactccacatcatcgaccagcaactcttcagcgggtaataacgccaacagcacaggaagcaagaaaaagacaacagcggcaaatctttcattgagctctcaggtgccagggctgggcgctattccaaactgtagcttgaacccgggacgagatggggacctatgtcacagcaccgctgtgacaccgagcggacagtttaaagagaagcactag

SEQ ID NO: 228704 - DNA, 942 bp, synthetic construct
  misc_feature 1..942: note = Description of Artificial Sequence: Synthetic coding sequence
  source 1..942: mol_type = other DNA
atgtcatccaccccacacgaccctttttattcttctcccttcggtcctttttacaggagacatactccgtatatggtacaacccgaatatcgaatctacgaaatgaacaaaagactgcaatcccgtacagaggacagcgataacctctggtgggatgcttttgccacagagttcttcgaggacgatgcaacactaaccctctctttttgcttagaggatggcccaaaacgatataccataggaagaaccctcattcctcgctacttctcaacggtcttcgagggcggagtgacagatctgtattacatccttaagcatagcaaagaatcctatcacaacagctccatcacagtggactgtgaccaatgtaccatggttacccaacacggcaaacccatgtttacaaaggtatgcactgagggtagactcattttggagttcacctttgatgatttgatgcgtatcaagacctggcactttactattcgccagtatagagagcttgtgccaaggagcatcctcgcaatgcacgcacaggaccctcaggtgctggaccagctgtccaaaaacatcacacgtatgggcctgactaactttaccctgaattatctacgtctctgcgtcatccttgagcccatgcaggagctgatgtcccggcataagacttacaatctttctcctagagactgtctgaaaacctgtctgttccagaaatggcaacgaatggtggcaccaccagcggaaccaaccaggcagccaaccaccaagcgcagaaaaagaaaaaatagtaccagcagcacttccaattccagtgcaggaaacaacgccaactcaacagggtccaagaagaagacaactgcagcgaatctgtctttgtctagccaagtgccaatcgcctccattgccaggtctccggtctcgggatgcgcccttagaacctag

SEQ ID NO: 228705 - DNA, 570 bp, synthetic construct
  misc_feature 1..570: note = Description of Artificial Sequence: Synthetic coding sequence
  source 1..570: mol_type = other DNA
atggtgacacagcacggcaaacctatgtttactaaggtgtgtactgaaggaagactcatcctggagtttacctttgacgacctgatgcgcatcaaaacctggcactttacaataagacaatatagagaactggtgcctcgaagtatacttgctatgcacgcccaggacccccaggtgttggatcagctgtcgaagaatattacacggatgggattaacaaatttcacgctgaactatctgcggctctgcgtgatactcgagcccatgcaagagctgatgtcacgccataaaacctataatctttcaccccgagattgcctgaagacctgcttatttcagaaatggcagaggatggtggccccacctgcggagcccaccaggcagcctacaactaaacggaggaaacgtaagaacagcaccagtagtacaagcaactcgtccgctggcaataacgcgaactctactggttcaaagaagaagactacagccgctaatttgagcctgagctctcaggtcccaattgcttcaatcgcaagatcccctgtgtccggttgcgctctgcgcacctag

SEQ ID NO: 228706 - DNA, 495 bp, synthetic construct
  misc_feature 1..495: note = Description of Artificial Sequence: Synthetic coding sequence
  source 1..495: mol_type = other DNA
atggtacagcccgagtaccggatttacgaaatgaacaagcgccttcagtctcgcactgaggattccgacaacctgtggtgggacgcattcgcaaccgagtttttcgaggacgacgcaacccttacactttctttttgcctggaagacggcccaaagagatataccattggaaggaccttaatccccaggtatttttctacggtgtttgaggggggagtgactgatctctactatattcttaaacattctaaggaatcttaccacaactcaagcattaccgtagactgcgatcagtgcactatggtgacacaacacggaaaacctatgtttacaaaggtctgcacagagggcaggctgatcctggaatttacttttgatgatctcatgaggatcaagacctggcacttcactattagacagtatcgagagcttgtcccaaggtctattctggcaatgcatgctcaagatccacaggtgctggaccaactgtcgtag

SEQ ID NO: 228707 - DNA, 333 bp, synthetic construct
  misc_feature 1..333: note = Description of Artificial Sequence: Synthetic coding sequence
  source 1..333: mol_type = other DNA
atgtcatctaccccacacgatcctttttatagcagcccctttggacccttctacagaagacatacgccttacatggtacagcccgagtataggatttatgagatgaataagcggctccagtcccggaccgaagattctgacaatctgtggtgggatgcatttgcaacagagttttttgaggatgatgcaacactgacgttgtccttctgtctcgaggatggccctaagcgatatatcgtgcattccgctgccgatgctagaggcaactgtaatcagttgggagattctgagcctgatgcttgtgatggactgctccagtttcctatcatgtag

SEQ ID NO: 228708 - DNA, 321 bp, synthetic construct
  misc_feature 1..321: note = Description of Artificial Sequence: Synthetic coding sequence
  source 1..321: mol_type = other DNA
atgtcttccacacctcatgatcctttttattcttcgccattcggacccttctatcgcagacacactccgtatatggtccagccggaataccggatttacgaaatgaacaaacgactgcagagcagaaccgaagactctgacaatttatggtgggacgccttcgccaccgagttctttgaggatgacgctacgcttactttatcattctgtctcgaagacggccctaaaaggtataggacaaaaaacctccgccctatcggcgagaaaatgaacattaacggaaagtgctacagacaggatccccatcctcccctgctgtag

SEQ ID NO: 228709 - DNA, 1116 bp, synthetic construct
  misc_feature 1..1116: note = Description of Artificial Sequence: Synthetic coding sequence
  source 1..1116: mol_type = other DNA
atgtctagcaccccacacgaccccttttattcgagccccttcggcccattctatcgacgccacacgccctacatggtccaacctgagtataggatttatgaaatgaacaagaggctgcaaagccgtacggaggacagtgataacctgtggtgggatgcttttgccactgaatttttcgaggatgatgctaccctgaccctttctttctgcctggaggacgggcctaaacggtacaccattggacgtaccttgattcctcggtactttagcactgtgttcgaaggtggggttacagatttatattatattctgaagcactcaaaggaatcttaccacaactcctccattacagtggattgcgaccagtgcacaatggtaactcagcacgggaaacctatgtttaccaaagtttgtacggaagggagactcatactggagtttaccttcgatgatctgatgaggattaagacgtggcactttactataagacagtacagagagctggttcctcgaagcattctggcaatgcacgcccaggatccacaggtcttggatcaattgtctaagaatataacccgcatgggcctcaccaattttacactgaactatcttcgcctgtgcgtcattctagagcccatgcaggaactgatgtcacgccacaaaacttacaacctatcccctcgggactgtctcaaaacttgcttgttccagaaatggcagaggatggtggcacctccagccgagcccacccggcagccgacaacgaaacgccgaaagaggaagaattcaacttcctccacatcaaactcttcagccggaaataacgccaacagtaccggctctaagaagaagactactgccgctaatttatcactgagctcacaagatgtcatggtggtcggcgaacctactctcatgggaggcgaatttggcgatgaagacgaacgcctgatcacccggctagagaatacacaatatgacgccgctaacgggatggatgacgaagaggatttcaataattctcccgcactgggcaacaacagtccctggaactccaaacccccagcaactcaggagaccaaaagcgagaatcctccgccacaagcttcccagtag

SEQ ID NO: 228710 - DNA, 1854 bp, synthetic construct
  misc_feature 1..1854: note = Description of Artificial Sequence: Synthetic coding sequence
  source 1..1854: mol_type = other DNA
atgtcctatagcgtcacccttactggaccaggtccatggggcttccgcctccagggcggtaaggattttaacatgccactcactatctctcgaatcacaccaggctctaaagctgcccagagccagctgagtcaaggcgatcttgtagtggccatcgacggcgtaaataccgatacaatgacacatcttgaagcccagaataagatcaaatcagcaagctacaacctgagtctcacactgcagaagtccaagaggcccattcctatttcaaccaccgctcccccagtccagacgccactgccagtcattccccaccagaaagttgtcgtcaactctccagccaatgccgactatcaggagcgatttaacccatctgcgctgaaagattccgccctgagcacacacaagcccatagaggtgaagggccttggaggtaaagctacaatcatccacgcacagtataatacccctattagtatgtatagtcaggacgctatcatggacgccattgcagggcaagcgcaggcccagggatctgattttagtgggtccctgccaattaaagatcttgcggttgacagcgcctccccggtgtatcaggccgtgatcaagtctcagaacaaaccagaagatgaagctgacgagtgggctagaagaagctccaacctccagagtaggagtttccggatactggcacaaatgacagggaccgagttcatgcaggatccagatgaagaagcgctcagacggtcccggcctcaggctagctcctattcaccagctgtcgcggcatccagtgcaccagctactcacacatcatactcggagggccctgccgctcccgctcctaagccccgagtcgtgacaacagccagtatccgcccttccgtgtatcagcctgtccccgcttccacatatagtccaagccccggagctaactattccccaaccccctatacaccctcgccagcccctgcctatacaccaagtcctgcgccagcttataccccgagtcctgtaccaacttacactccctccccagcacctgcctacacgccaagtcctgcgccaaactataatccagcaccttcagtggcctactctggtggacctgcagagccagcatctcggccaccttgggtgaccgacgactccttttcccaaaagttcgctcctggaaaaagtaccactagcattagcaagcaaactcttccccgaggcggtcccgcttatacacctgccggaccccaggtgccccctttagcacggggtacggtacagcgcgctgaacgctttcctgcttctagcagaacacctctatgtgggcactgtaacaatgtgattagggggccattcctcgttgccatgggaaggtcctggcatccggaggaatttacatgcgcgtattgcaaaacttcccttgccgatgtgtgcttcgtggaagagcagaataatgtctattgcgagcgttgttacgagcagttctttgcccctctttgcgcaaaatgcaacacaaagattatgggtgaagtcatgcacgcccttaggcagacttggcacaccacctgtttcgtctgcgccgcttgcaagaaacctttcggtaattctctattccacatggaagacggggagccatattgcgagaaggactacatcaacctgttttctacaaaatgccacggctgtgattttccggtggaagccggagacaagttcatagaggcactcgggcatacatggcatgacacatgtttcatctgcgctgtctgtcatgttaatctggaaggccagcccttctattctaagaaagaccgaccactttgtaaaaaacatgcgcacactatcaatctgtag

SEQ ID NO: 228711 - DNA, 993 bp, synthetic construct
  misc_feature 1..993: note = Description of Artificial Sequence: Synthetic coding sequence
  source 1..993: mol_type = other DNA
atgtcctacagcgtgacccttacaggacccggaccatggggtttcaggttacagggtgggaaggatttcaatatgccactgacaattagtcggatcacccccggtagtaaagctgcacagtcgcagctctctcagggcgatctcgttgtggccattgatggcgtcaataccgatactatgactcatctggaagctcaaaacaagattaaatctgcctcctacaacttgtcattaactctgcaaaagagcaagaggcctatccctatctccactaccgccccacctgtgcagactcctctccccgttattccccatcagaaagaccccgcactagacacgaacggtagtttggttgctccctccccgtcccccgaagcgagagcgagtccaggaaccccaggaacccccgagctcaggccaacattttcgccagccttcagtaggccgtccgctttcagctctctcgccgaggccagtgacccgggacctcctcgagcaagcttgcgcgcaaagactagtcctgagggggcacgcgatctgcttggaccaaaagcactgcccggtagcagccagcctagacagtataacaatcccatcggactgtactctgcggagactctgagggaaatggcgcaaatgtaccagatgtctcttcgcggaaaagcaagcggagtcggactgccaggaggatccctgccaattaaggacctggctgtcgacagtgcctctccggtctaccaggccgtgatcaagagtcagaacaaaccggaggacgaggccgacgagtgggccaggcgctcttccaacttgcaatctcgatctttccgaattctagcgcaaatgaccggaactgagtttatgcaagatcctgatgaagaggccctacgtcgcagccgtgagagattcgagaccgagaggaactcaccgagatttgcaaagttgcgtaattggcaccatgggctcagtgcccaaatcttgaacgtcaaaagttag

SEQ ID NO: 228712 - DNA, 1413 bp, synthetic construct
  misc_feature 1..1413: note = Description of Artificial Sequence: Synthetic coding sequence
  source 1..1413: mol_type = other DNA
atgtcttacagcgtgactttgaccggccctgggccttggggctttcggctccaggggggaaaggactttaatatgccactcacaatctctcgcataaccccaggcagtaaagccgcacagtcacagctcagccagggggacctggtggtagcaatagacggggtcaataccgatactatgacacaccttgaggcccagaataaaatcaaaagcgcctcctataacttgtctctcactttacagaaaagcaaacgcccaattccgatcagcactactgcccctccggttcagacgccgttgcctgtcatcccacaccagaaggctagcagttattcccccgctgttgctgcctctagcgctcctgcaacccacacttcttacagcgagggccctgcggcacccgctcccaaacctagagtggtcaccactgccagcatcagaccttctgtataccagccagtacccgctagtacttactcaccttctcccggtgcgaactatagtccaacaccctacacccctagccccgcaccagcctacactccatctcctgctcccgcatatactccgtcccccgttcctacttataccccatctcccgctccagcctacaccccatcccccgcaccaaactataatcctgctccctctgtggcatacagtggcggacctgctgaacctgcaagccgtccgccatgggttacagacgactccttcagccagaaattcgccccaggtaaaagcacaacatctattagtaaacagacactgcccaggggtgggccagcctatacaccagcaggtcctcaagtgcctcccctggcaaggggcaccgtacagcgggcagagcgcttccccgcatcttcacgcacaccactgtgtggtcattgtaataacgtgattaggggaccatttctcgttgcgatgggacggagctggcaccctgaagagttcacgtgtgcctactgcaagacaagcctggctgatgtgtgctttgtggaagagcagaataatgtatactgcgagagatgctatgagcaattcttcgctcctctgtgcgccaagtgtaacaccaaaatcatgggtgaagtgatgcacgccttaaggcagacctggcataccacatgtttcgtgtgtgctgcctgcaagaaaccatttgggaactctctatttcacatggaggatggtgagccctactgcgagaaagattacattaacctctttagtacaaaatgccacggctgtgacttcccggtggaggcgggagataaatttatcgaggcactcgggcacacctggcacgatacctgctttatctgtgcggtctgtcacgttaaccttgagggacagccattctactcaaagaaggacaggcccctgtgcaagaaacatgcgcacacgatcaacctgtag

SEQ ID NO: 228713 - DNA, 2184 bp, synthetic construct
  misc_feature 1..2184: note = Description of Artificial Sequence: Synthetic coding sequence
  source 1..2184: mol_type = other DNA
atgtcttacagcgtcactctgacaggacccggtccctggggatttcggcttcaggggggaaaggattttaatatgccactgacaatctcgcgaataaccccaggcagtaaggccgctcaatcccaactatctcagggcgacctcgttgtggcaattgatggcgttaacacagacaccatgacccatctggaggcacagaacaaaattaagtccgcctcctataatctctctctgaccttgcagaaaagcaagcggccaatccctatttcaaccacagcaccaccagtgcagactccactcccagtcattcctcatcagaaagatccggctcttgacaccaatgggagtctagtggcaccgtctccatctcccgaggcaagagcttcccccggaaccccgggtacaccggagctgcggcctaccttttctcccgctttctctaggccctctgcttttagctccctggctgaggcctcagatcccggtcccccaagagctagtctgcgggctaaaacttcgccagaaggcgctcgagatctactgggaccaaaggcactacccggttcatcacagccccgacagtacaataaccccattggcttatattcagccgagactttgcgggaaatggcccagatgtaccagatgtccctgcggggaaaggcctccggcgttggattgccaggtggatcactaccgatcaaggatctcgccgttgactccgcctctcctgtctatcaggctgtcattaaatcccaaaacaaaccagaagatgaagccgatgagtgggcacggagatcaagcaatttgcagtccaggtcgttcaggatcttggcgcagatgacgggcacggagttcatgcaggacccagacgaagaagcgcttaggagatcaagcacacccatcgaacacgcccctgtttgcacctcccaagccacgacacctctattaccggcttcagctcagcctcccgctgcagctagtcctagcgccgctagccctcccttggcaacagccgcagcccacaccgctatcgcttctgccagtacaacggcccctgctagctctcctgccgattccccacgcccacaggccagtagttattcgccagctgtggccgctagcagcgctcccgctacgcatacctcttactccgaaggccctgctgccccagcccctaagcccagggtggtgacaactgcttccattaggccatccgtgtaccagcctgtacccgcttcgacttacagccctagtccgggagcaaactactcacccactccatatacccctagtcccgctccggcttacactcccagtcccgctcctgcatatactccaagcccagtccctacttacacaccttccccagctccagcatacacaccgagccccgctccaaattataaccctgcgcctagcgtggcatactcagggggtcctgccgaacccgcttcaagacctccttgggtaacagatgacagcttttcccagaagttcgctcctggcaagagtacaacctccatatctaagcagactctaccacgtggcggtcctgcatatacacccgctggaccacaagtccctcctctggcccgagggaccgtccagcgcgcagaaagattcccagcttcctcacgaactcccttgtgtggccactgtaacaatgtgatacggggaccctttctcgttgcgatgggaagatcctggcaccctgaggagtttacatgcgcgtattgcaagacttcactagccgacgtgtgcttcgtggaggagcagaacaatgtgtactgtgagcggtgttatgaacagttttttgctcctctttgtgccaaatgtaatacaaaaatcatgggagaggtgatgcacgctctgcgacagacgtggcacaccacctgctttgtgtgcgcagcctgcaaaaaacccttcgggaactccttgtttcacatggaggacggagagccttattgtgaaaaggattatattaatctgttctccactaagtgtcacgggtgcgattttccagttgaggccggtgataaatttatcgaagccctgggccatacctggcacgatacatgttttatctgcgcagtgtgccacgtcaatttggaaggccaaccattttactcaaaaaaagaccgcccactgtgcaaaaagcacgcccacaccattaacctgtag

SEQ ID NO: 228714 - DNA, 1197 bp, synthetic construct
  misc_feature 1..1197: note = Description of Artificial Sequence: Synthetic coding sequence
  source 1..1197: mol_type = other DNA
atgagctattctgtgaccctcaccgggcctggaccctggggattcaggttgcagggaggcaaggactttaacatgcctcttaccatctcccgcattacccccggttctaaggctgcccaatctcagctgtcgcaaggggacctggtagtggccattgatggtgttaatacagatactatgacccatctggaagcccagaacaagattaaaagcgcttcatataatctatccctgacgttgcagaaaagcaagcggccaattcctatatccacaaccgctccacccgtccaaaccccattgcctgtgatcccgcaccagaaggaccccgcactggatacgaatggtagcctcgtggcacctagcccttctccggaagccagagcttcacccggaactccaggcactcctgagctgcgacctactttcagccccgcattctcccgccctagtgccttctcctcccttgccgaggcctcagacccagggcctccccgagcttctttgagggctaagacctcccccgaaggggcacgtgatttgctggggccaaaggcactgccaggcagcagtcagcctcgacagtataacaacccgattggactctattccgcggagactctgcgcgaaatggcacaaatgtaccagatgtctctccggggtaaagctagtggcgtcggcctgccgggaggcgctgactaccaggaaaggtttaacccttccgcactcaaagatagcgccttatctacacacaagcctatagaggtgaaaggcctagggggaaaagctacgatcatccacgctcagtataacactcccatttctatgtatagtcaagacgccatcatggacgctatcgccggtcaggcgcaggcacaggggagcgacttttctggaagtcttccaattaaggacttagcagtagattcggccagcccggtgtatcaagctgtgattaaatcacaaaataaaccagaagatgaagccgatgagtgggccaggaggagtagcaacctccaatccaggagctttaggattctggcccagatgactgggaccgagttcatgcaggaccctgacgaagaggctctacggcgatccagggagcggttcgaaaccgagcgtaattcccctcggtttgctaagcttcgcaattggcaccacggattaagtgctcaaatcctaaatgtcaagtcctag

SEQ ID NO: 228715 - DNA, 852 bp, synthetic construct
  misc_feature 1..852: note = Description of Artificial Sequence: Synthetic coding sequence
  source 1..852: mol_type = other DNA
atgtcgtactctgttactctgaccggtcccggaccatgggggttccgactgcagggtgggaaagattttaatatgccgttgacaattagccgcatcacccccggatctaaggctgcccagtcacagctgagtcagggtgacctcgtggtggcaatcgatggggtaaataccgacactatgacacacctggaggctcagaacaagattaagtccgccagctataacctatccctaaccctgcaaaaatctaaaagaccaatcccaatctctaccaccgcgcctcctgtgcagacccctctcccagtcatacctcatcagaaggtggtggtcaacagccccgcaaacgccgattaccaggagaggttcaatccctccgcgctgaaggactcggcactctccacgcataaaccaattgaagtaaagggattgggtggtaaagccaccattatccatgcccaatacaataccccaatcagtatgtactcgcaggatgctattatggacgcaatcgccggacaggcacaggcacagggttccgactttagcgggtccctgccgatcaaggaccttgcggtggactctgcttctcccgtttatcaggccgtaattaagtcccagaacaagcccgaggacgaagcagacgagtgggcaaggcggtcttctaatctccagtcccggagttttcggatcctcgcgcaaatgacaggtacagagttcatgcaggaccccgacgaggaagctttgagaagaagtcgggaacggttcgagactgaaagaaattcgccaaggttcgcaaagcttaggaactggcatcatgggctgtccgcccagatcctcaacgtgaaatcctag

SEQ ID NO: 228716 - DNA, 2199 bp, synthetic construct
  misc_feature 1..2199: note = Description of Artificial Sequence: Synthetic coding sequence
  source 1..2199: mol_type = other DNA
atgtcttactcagtgactcttacaggccctggaccgtgggggttcagactccagggcggaaaggattttaacatgcctcttacaatctccaggattacaccgggatctaaagccgctcaatcacagctgtcccagggtgatctggtcgtggccatcgatggagtcaataccgatactatgacacatttggaagcccagaataagataaaatcagcctcatacaatctttcattaacactacagaagtccaaaagaccaatccctatttctaccaccgcaccccctgttcagacccccttacctgttataccacaccagaaagacccagccctcgacactaatgggagtcttgtcgcaccatcaccgtcgcccgaggccagagcttcaccaggcacacctggcacgcctgaactgagacctacctttagtcctgccttttccagacctagtgccttcagctcccttgccgaagcctcagatcctggcccaccccgagcgtccctgcgtgctaagactagtccagagggagcacgcgatctgttaggtccaaaggccctccctggctctagtcagccacggcaatacaataacccgatcggcctttacagcgccgagacactcagagaaatggctcagatgtaccagatgtccttacggggaaaggcatccggggttggtctcccagggggtgccgattatcaggaacggttcaatcctagtgccctgaaggattccgctctctccacccataagcctattgaggtcaagggcctgggtggaaaggcaacaattattcacgcccagtacaatactcccatttcaatgtacagccaggacgccatcatggacgctatcgccggacaagcacaggcacagggctccgactttagtgggtccctgcccattaaagacttagcagtggacagcgcgtcgccagtgtaccaggccgtcattaagtcgcagaataaacccgaggacgaagcagatgagtgggcaaggcgctcatcgaatctccagtctcgctcctttcgcatacttgcccagatgacggggacagagttcatgcaagatcctgacgaagaagcgctcaggcgctctaggcctcaagcaagctcttactcccccgctgtcgctgccagctcagcccctgccacccacacatcgtacagcgaaggcccagcagcccctgcccctaagccgagagttgttacaacagctagcatacgtccaagcgtgtatcagcccgtccctgcttccacatatagtccgtctcccggagccaactatagtccgaccccatacaccccttctccagctcccgcttacaccccatcaccagcacccgcatacactccaagccccgtgcccacttacactccctcccctgcccctgcctacacaccttccccggctcccaattacaaccctgctccttctgtggcgtacagtggcggtccagccgaaccggcttcccgccctccgtgggttaccgatgacagtttcagccaaaagttcgcccctggaaagtcaacaacatctatcagtaagcagacactgccacgcggaggcccagcctataccccagccggaccacaggtccccccactggcgcgaggcacagtgcagagggccgaaagattccccgcttcaagtagaacacccctgtgcggtcattgtaataatgtgatccgcggaccatttctggtggcaatggggaggtcatggcaccctgaggaattcacgtgtgcctattgcaagacatcattagctgatgtgtgcttcgtagaagagcaaaataatgtttattgtgagcgttgctatgaacagtttttcgccccattatgtgccaaatgcaacacaaagatcatgggcgaggtgatgcacgcactccgccagacctggcacactacctgcttcgtctgcgcagcgtgtaaaaagccttttggcaactctctgtttcacatggaagacggcgagccatactgtgaaaaggattatatcaatttgttcagcactaagtgtcacggctgcgactttcccgtggaagcaggagacaagttcatcgaggccctgggccatacatggcacgatacctgtttcatttgtgccgtttgccatgtcaatctggaaggccagcccttctacagcaagaaggatcgaccactgtgtaagaagcacgctcatactatcaatctgtag

SEQ ID NO: 228717 - DNA, 1854 bp, synthetic construct
  misc_feature 1..1854: note = Description of Artificial Sequence: Synthetic coding sequence
  source 1..1854: mol_type = other DNA
atgtcctattctgtgactcttactggccctggcccttgggggtttcgcctccaaggcggaaaggattttaacatgccgcttacaatcagtaggataacaccaggatcgaaggctgctcagagccaattgagtcagggagacctcgttgtcgctatagacggggtaaacaccgataccatgacccacttagaggcgcagaataagattaaatcagcttcttacaatctgtccttgacgctgcagaaaagcaagagacccattccaatttcaacaaccgccccacccgtgcagactcctctccccgttatacctcaccagaaggtagtggtcaactccccagcgaacgctgactaccaggaacgctttaaccccagcgcgctgaaagacagcgctctttcaactcacaaacccattgaagtgaaggggcttgggggaaaagcgaccatcattcatgctcagtacaatacacctatcagtatgtattcccaggatgccatcatggatgcaatcgcgggacaggctcaggctcagggaagcgacttcagtgggtcacttcccatcaaggatctggcagtggacagtgcatcccccgtctatcaggctgtgataaaatctcagaataagcctgaggacgaggcggatgagtgggccaggaggtcttcaaatcttcagtccaggagctttcgtatcttggctcaaatgactgggaccgaattcatgcaggaccccgacgaagaggccctgcggaggtcccgcccacaagcctcgagctattcccctgccgtagcagcctcatctgcacctgctactcataccagctactcagaggggcctgccgctcccgctccaaaacccagagtagtcactacagccagtatcagaccctctgtgtaccaaccagtccctgcctccacatattccccaagccctggcgcaaattattcgccaaccccttacactccatcccctgcgcctgcctacacaccttcacctgcacctgcctacacccctagccctgttccaacatacactccaagtcccgctcccgcttacaccccaagccctgcccctaactacaaccccgctccatctgtcgcctactccggtgggcctgctgaacctgctagccgccctccgtgggttactgatgactcattcagccaaaaattcgctccgggaaagtctacgactagtatttctaagcagacgttaccacggggaggaccagcctatactcctgctggtccccaggtgccccctctcgctaggggtactgtgcaacgggctgaacggttccctgcctcgagccgaacgcctctgtgtggacattgtaataacgttattcgcggtccattcctggtggccatggggaggagctggcaccccgaggagttcacctgtgcctactgcaaaaccagcctcgcagatgtgtgcttcgtcgaagagcagaataatgtgtactgcgaacgatgttacgagcagttcttcgctccactctgcgccaagtgcaacactaagattatgggcgaagtcatgcacgcccttcgccagacctggcacactacctgcttcgtgtgtgctgcttgcaagaagccttttggcaactcacttttccacatggaggacggggaaccctactgcgagaaagattacatcaacctctttagcacaaaatgtcacgggtgtgattttcccgtcgaagcaggcgataaatttattgaggctcttgggcacacttggcacgatacttgcttcatctgtgccgtatgtcacgttaacctggaggggcagccgttctattcaaagaaagaccggccactctgtaaaaaacacgcgcacactatcaacttgtag

SEQ ID NO: 228718 - DNA, 1947 bp, synthetic construct
  misc_feature 1..1947: note = Description of Artificial Sequence: Synthetic coding sequence
  source 1..1947: mol_type = other DNA
atgtcttattcagttaccttaactggacccggaccatggggattccgactccagggtggtaaggatttcaatatgccgttgaccatctccagaattacccccggatccaaagccgctcagtctcaactctcccaaggtgatttagtagtcgctatcgacggagtcaatactgacacaatgacccacttggaagctcagaataagatcaagtcagcttcatataatctgtccctgactctgcaaaagagcaaacgcccaatccctatctccaccaccgcccctccagtacagacgcccctgccggtaatcccccatcaaaaggatcccgctttagacaccaatggatcactcgtggcgccaagtccaagccccgaggctagagcgtccccagggactccgggtacccccgagctgcggccaaccttttctccagctttttccagacctagtgctttcagttccctggccgaagcttccgaccccggtccgcctagggcctcacttagagcaaaaacctccccagaaggtgccagagacctccttggccctaaagcactccctggaagcagccaaccacgtcagtacaacaaccccataggcctgtattctgcagaaaccctgcgcgagatggctcagatgtaccaaatgtcgctccgcggtaaggcaagcggcgttggcctccccggtggctctctcccgatcaaagacctggctgtggactccgcctcacctgtctaccaggctgtgatcaagtctcaaaacaagccagaagacgaggccgacgagtgggctcgacggtctagcaacctccagtctaggagtttccgaattttggcccagatgacaggcactgaattcatgcaggacccggacgaagaggccctcaggcggagccgccctcaagcttcatcttatagccctgcggtcgccgcttcaagcgctcccgcaactcatacttcttatagcgaagggcctgctgccccagcaccaaaaccacgcgttgtgacaacagcctcgattagacccagtgtttatcagcccgtccccgctagcacctactcccctagtccaggggcaaattactcaccaaccccgtatacaccctctccagttccaacttatactccctccccagcccctgcctatacccccagtcccgctcccaactacaatcccgcaccatcggttgcttattccggaggccctgccgaacctgcctccaggcccccatgggttaccgacgactcgttcagccagaaattcgctcccggaaaaagtaccacttctatctctaaacagacactcccgcgaggtggaccagcatacactcccgctgggccacaagttccccctctcgcaagagggaccgtccaaagagccgagcgttttcctgcttctagtcggacacccttgtgtgggcattgcaataacgtcatcaggggaccgttcttggtagcaatgggaagatcatggcatcctgaagagttcacatgcgcctattgtaagacaagcttagcagacgtttgcttcgtggaggagcagaataacgtgtactgcgagaggtgctacgagcagttcttcgcccctctctgtgcaaaatgcaataccaagatcatgggagaggtgatgcacgctctgagacagacttggcacactacttgttttgtatgcgctgcgtgcaaaaagcctttcggaaactccttgttccatatggaggacggcgagccatactgtgagaaggattatattaatcttttttctaccaagtgtcacggttgtgatttccctgtcgaggcgggagacaagttcatcgaggccctgggtcatacctggcatgatacgtgcttcatttgtgcagtgtgtcacgtgaacctggaggggcagccattctacagcaaaaaagatagacctctctgcaagaaacacgcccatactataaacctttag

SEQ ID NO: 228719 - DNA, 696 bp, synthetic construct
  misc_feature 1..696: note = Description of Artificial Sequence: Synthetic coding sequence
  source 1..696: mol_type = other DNA
atgagctactcagtgacattgacaggaccgggaccgtgggggtttcgcctccaaggcggaaaagacttcaatatgcctctgactatatctaggatcacaccgggttccaaggctgcacaaagccagctgtcccaaggcgacctggtcgtggctatcgatggcgtgaatactgacactatgacacaccttgaggcacagaacaaaatcaaaagtgcatcttataacctgagtctgactttacagaagtctaagcgccctatccccatttctaccaccgcaccccctgtacagacacccctaccagtgatccctcaccagaaggaccctgcgttggacaccaatggcagtttagtggcccctagcccgagccccgaagctcgggcttcacctgggacgccaggcacccccgagttacgacctacctttagccctgcattttctcgaccttctgcctttagtagtctggctgaagcctccgacccaggcccaccgcgtgcctccctgcgagcaaagacatcccctgagggtgcaagagacctgctggggccaaaagccttgcccggaagctcccaaccgcgtcagtacaataatccgattgggctgtacagtgcagaaactctccgtgaaatggcccagatgtaccagatgtcactccgcggaaaagcttcaggtgttggccttccagggggttggtag

SEQ ID NO: 228720 - DNA, 1839 bp, synthetic construct
  misc_feature 1..1839: note = Description of Artificial Sequence: Synthetic coding sequence
  source 1..1839: mol_type = other DNA
atgagccatccatcttggctgccaccgaagtcaacaggcgagcccctcgggcatgttcctgccaggatggagacgacccattcgttcgggaacccatccatctccgtgtccacacagcagcctcctaaaaaattcgcgccagtggtcgcacctaagcccaagtacaatccctataagcagcctgggggagagggagactttttgcctccaccaccacctcctctcgacgattcatcagcccttcctagtatttctgggaacttcccacccccaccccctttagacgaggaagccttcaaggtgcagggaaatcccggaggcaagaccttagaggagcgcaggtcatctctggacgcagagatcgactctctgacctccatcttggccgatctggaatgttcctccccctacaagcctcgaccgcctcagtcaagcacaggatctacggccagtccgccagtaagcacccccgttaccggccacaaacggatggtcatcccgaatcagcccccactgaccgctacaaaaaaaagtaccctgaagcctcagcccgcaccccaggcaggacccattcctgtggcccctattggcaccttaaaaccccaacctcagcctgtgccagcctcatacacgacagcgagtacttcttctcgacccacttttaacgtgcaggtgaagagtgcgcaaccatcaccgcattacatggcagcgccatcaagcggacagatttatggttccggaccccagggttacaacacacagccagtaccggtgtcgggacaatgtcctccaccatcaacacgcggaggtatggattacgcttacattcccccaccaggtctccagcctgaacccggatacgggtacgcgcctaatcagggcagatactatgaagggtattatgccgctggtccagggtatggtgggagaaacgacagcgaccctacttacggccagcagggacaccctaacacttggaaaagggagcccggatacacacctccaggcgcagggaatcaaaatccacccggaatgtaccccgtgacaggaccgaagaagacatacattaccgacccagtgtctgcgccttgcgccccaccgttgcagcctaaagggggtcattcagggcagctcggtccaagcagcgtggccccttcgtttaggccagaagacgaattggagcacctgactaaaaagatgctgtacgacatggaaaatcccccagccgacgaatactttggaagatgcgcacgctgcggtgaaaacgtggttggcgaggggaccggctgtaccgccatggatcaggtgttccatgtcgattgtttcacttgcatcatttgtaataataaattacgaggacagccattctacgccgtggaaaaaaaagcttattgcgagccgtgctacattaacacactggaacaatgcaacgtctgttccaagcctattatggaaaggatcctgcgggctacaggtaaagcctatcacccccactgtttcacatgtgtcatgtgccaccgatccctggatgggattccttttacagtggacgccggtggacttatccactgcatagaagatttccacaagaaattcgctcctaggtgctctgtttgtaaagagcctatcatgcccgcacctggccaggaggagaccgtgcggatcgttgctcttgacagggactttcacgttcattgttaccgctgcgaagactgcgggggactcctctctgaaggggacaaccaaggatgttacccacttgacgggcacatcctgtgcaaaacctgcaatagtgcccgaattcgagtacttacagcaaaggcttctactgacttgtag

SEQ ID NO: 228721 - DNA, 282 bp, synthetic construct
  misc_feature 1..282: note = Description of Artificial Sequence: Synthetic coding sequence
  source 1..282: mol_type = other DNA
atgagccacccttcctggctgccacccaagtccaccggcgaacctttggggcacgtacccgctagaatggaaaccacccatagtttcgggaacccaagtatcagtgtgagcacacaacaaccgcctaagaagtttgccccagtcgtagcgcctaagccaaaatacaatccttacaagcagccgggtggggagggggattttctgcctccgccacctcccccattggatgattcgtctgcgctccccagcatctccgggaattttccacctcctcctccatag

SEQ ID NO: 228722 - DNA, 456 bp, synthetic construct
  misc_feature 1..456: note = Description of Artificial Sequence: Synthetic coding sequence
  source 1..456: mol_type = other DNA
atgagccaccccagctggcttccaccaaagtctaccggagagcctctaggtcacgtccctgccagaatggagacaacacatagctttggcaatccctcaatctcggtgtctacacaacaaccacccaaaaaatttgctcctgttgtcgccccaaagcctaagtataatccttataaacagccaggaggcgagggagacttcctcccccctcctcccccacccctggacgactcatccgctctcccatctatttccgggaacttccctcctcctcctcccctcgacgaggaagccttcaaagtgcagggcaaccctggtgggaaaacactggaggaacgccgatcttccctggacgccgaaatcgattctctgacttctatcctggcagacctggaatgttctagtccttataaacctcgtcctccgcagtcgtccaccggtagcacagcatcctag

SEQ ID NO: 228723 - DNA, 336 bp, synthetic construct
  misc_feature 1..336: note = Description of Artificial Sequence: Synthetic coding sequence
  source 1..336: mol_type = other DNA
atgtcccacccctcttggctccctccgaaatcaacaggcgagcctctgggacatgtgccagctcggatggagaccactcattcgtttggcaatccctccatctccgtgagtactcaacagccacccaaaaaattcgcacccgtcgtcgcccctaaacccaagtataatccctacaagcagcccggaggcgagggcgatttcttgcccccaccccctcccccactcgacgatagctctgctctgccgagcatctccggcaacttcccacctcccccacccttggacgaggaagcattcaaggtgcaggggaacccaggagggaaaacacttgaatag

SEQ ID NO: 228724 - DNA, 201 bp, synthetic construct
  misc_feature 1..201: note = Description of Artificial Sequence: Synthetic coding sequence
  source 1..201: mol_type = other DNA
atgtcccatcccagttggctaccacctaagtctactggtgaacctctagggcatgtgccagccaggatggaaactactcacagttttggcaatccctccatttccgtgtcaactcaacagcccccaaagaagttcgctcctgtggtggctcctaaaccaaagtataatccttacaagcagccgggaggagagggcgactag

SEQ ID NO: 228725 - DNA, 162 bp, synthetic construct
  misc_feature 1..162: note = Description of Artificial Sequence: Synthetic coding sequence
  source 1..162: mol_type = other DNA
atgtctcatccatcctggctgccccctaagtccacaggcgaacctctgggacacgtccccgcaagaatggagacaacccattccttcggaaacccgtccattagtgtaagtacccaacagccccctaaaaagtttgcccctgtcgtcgcccctaaaccctag

SEQ ID NO: 228726 - DNA, 144 bp, synthetic construct
  misc_feature 1..144: note = Description of Artificial Sequence: Synthetic coding sequence
  source 1..144: mol_type = other DNA
atgtcccacccaagttggctaccgccaaagagtactggggaaccactcggccacgtcccagctaggatggaaactactcactcctttggcaatccttctatttcagtaagtacccagcaaccccctaagaaattcgccccatag

SEQ ID NO: 228727 - DNA, 1287 bp, synthetic construct
  misc_feature 1..1287: note = Description of Artificial Sequence: Synthetic coding sequence
  source 1..1287: mol_type = other DNA
atgtctcatccgagctggctccctccaaagagcactggcgaaccactgggacacgtgccggcaagaatggagactacacactccttcggaaaccctagcataagtgtgagtacacaacagccacccaaaaaattcgcacctgtggtggctccaaagcctaagtataacccgtacaagcagcctgggggagagggcgactttctccctccccctcctccccctctggatgactcctcagcccttcctagcatctctggcaactttcccccacctccaccgctggatgaagaggctttcaaggtgcagggcaatccaggaggaaagaccctggaggagcgacggagtagccttgatgccgagattgacagcctcacaagtattctcgccgatctagagtgtagttcaccttataaaccacggccaccccaaagcagcacaggtagtaccgccagccccccagttagtacgccagtcactggccacaaacgcatggtcatccctaaccagcccccacttaccgccaccaagaaatccacgctgaagccccagccagcaccgcaggcgggtccgataccagtcgcccctatagggacactgaagccacaacctcagccagtgcccgcatcctatacaacggcctccactagctccagacctacattcaacgtgcaggtgaaatccgctcagccttccccacactatatggccgcaccatcatccggtcagatctatggttctggcccacaaggatacaacacacaacctgtgcctgtgtctggccagtgccctccaccctcgacaagggggggaatggattatgcatacatcccccctccgggtctacagcccgagccaggctatggctacgcaccaaatcagggacgttattatgaagggtactatgccgctggccctggatatggtggaagaaacgacagtgaccctacttacggccaacaggggcaccccaatacttggaagcgcgagccaggctataccccccctggggctggcaatcagaacccccctggcatgtatcccgttacgggtcccaagaagacctatataacagacccagtttcagccccttgtgcccctcccctgcaacccaagggcggacactcaggccaactaggtccctccagtgttgccccatcctttagaccggaggacgaacttgagcacttaaccaagaagatgctttacgacatggaaaatccacccgctgatgagtactttggagagtggggcctggagctgacgagcgaggttactatactgttgtag

SEQ ID NO: 228728 - DNA, 198 bp, synthetic construct
  misc_feature 1..198: note = Description of Artificial Sequence: Synthetic coding sequence
  source 1..198: mol_type = other DNA
atgtctcatccgagctggctgcctcctaagtcaactggggagcccctgggacacgtgcctgccagaatggagaccacacactccttcggaaatcctagtatttccgtgtcaacccaacagcctccaaagaagttcgccccagtggtcgccccaaaacccaagtataacccctacaagcagccaggaggcgagggatag

SEQ ID NO: 228729 - DNA, 174 bp, synthetic construct
  misc_feature 1..174: note = Description of Artificial Sequence: Synthetic coding sequence
  source 1..174: mol_type = other DNA
atgtctcatccaagttggctgcctccaaagtcaacgggagaacctctgggccatgtccctgcaaggatggagactacacattcgttcgggaacccctctatctctgtaagcacccaacagccaccaaagaaatttgctcctgtggtggcacccaaacccaagtacaatccgtag
